United States Patent Application Publication US 2011/0296543 A1 - sequence listing, part 11

SEQ ID NO: 47337 - DNA, 906 bp, Unknown
  Obtained from environmental sample
  misc_feature (1)..(906): n is a, c, g, or t
atgatggccgagctctggagtcggggtcatttcggacaccaggtgaagcggtgggatccgcggatgaaaaaattcatcttcgcggaacggaacggaattcacatcatcgatttacagaaaaccattcaggcgatcaaggacgcctacgaagcggttcgcaagaccgtcgcggcaggcaaatcggtgctcttcgtcggcaccaaaaagcaggcgcagcaggcggtacagaaagaggcggagcgctgcggcatgtactatatcaacaaccgctggctcggcggtatgcttacaaatttcagtacaattaaaaaatcgctgctccggttaaagaaactggaaaaaatggaagttgacgggacttttgaaaacctcaccaagaaagaaatcgcgtcattgggcaaggagcgggcaaagctccagaaaaaccttggcggcatcaaagaaatgaaagagcttcccggtatactattcattattgacacccgcatggaagcgattgcggtcgcggaggccaagcgcatgggcattcccattgtcgcggtggttgacacgaactgcaacccggaaaacatagactaccccatccccggcaatgacgacgcgatccgcgccatcaccctgttcacttcaatcgtcgccaacgcggtggtggaagccgataacgaagtgggcttaaaaattatcgaaaccctgggcgacgaggatgaggatcaggatcaggaaagcctgatgtccgatatgtccgtcaaggaagatgatcaggaagttgatattgccgcggcaatagaaaaatattctactgaaatcccgccggaagccgaaagggatgaagagccggcggatgaaaaagaagaacaccgcatccaggtggacgtggacaaaatttacggagatataggagaataa

SEQ ID NO: 47338 - protein, 301 aa, Unknown
  Obtained from environmental sample
  DOMAIN (1)...(220): Ribosomal protein S2
  misc_feature (1)..(301): Xaa is any amino acid
MMAELWSRGHFGHQVKRWDPRMKKFIFAERNGIHIIDLQKTIQAIKDAYEAVRKTVAAGKSVLFVGTKKQAQQAVQKEAERCGMYYINNRWLGGMLTNFSTIKKSLLRLKKLEKMEVDGTFENLTKKEIASLGKERAKLQKNLGGIKEMKELPGILFIIDTRMEAIAVAEAKRMGIPIVAVVDTNCNPENIDYPIPGNDDAIRAITLFTSIVANAVVEADNEVGLKIIETLGDEDEDQDQESLMSDMSVKEDDQEVDIAAAIEKYSTEIPPEAERDEEPADEKEEHRIQVDVDKIYGDIGE

SEQ ID NO: 47339 - DNA, 858 bp, Unknown
  Obtained from environmental sample
  misc_feature (1)..(858): n is a, c, g, or t
atggctgaaattagcgctgcggatgttaaaaaactcagggagaaaaccggcgcgggaatgatggaatgcaagaacgccctggtcagcacggaaggcgatttcgcgaaggccgaaaaactactcaaggaaaaaggacttgccgcgcttgaaaaacggtcgggccgggctacaaatgaaggcaagattttcgtgaaagtcaaggacgacggttccgccgccgtcctggtggaacttgcgtcagagacggattttgtcgcgcgtaacccggatttcatcgcgcttggctgggcgattaccgacaaagccctggaagaaggccataccgaaccccatgagggactgtccggcatggtacaggatctcgcgacaaagatacgcgaaaacatgggcctgaaacggctcaaggcaatcaaggcgaacaaggacgaataccttaccatgtatatacacggcgacggcaacatcggcgttgtcgttaaatgcaaatccgacaagccggagatttttaaaaacgaagacgtgaaggctttcatcttttctcttgccctgcacattgccgcgttcaacccgcaggcgctggacaaaagcaaaatcgatcccgcctacatcaccgagcaggaagagattttccgtaagcagatggagaaggacgaaaaactccagggcaaaccggccaacgtgcttgagggcatacttaaaggcaagatcaacaaacacctttcagaagtctgtcttcttgagcaaagctacgtgaaggacgaaaaacacaccgtcgcccaggcgctggaaaatgtcgccaaacaggcgggggcaaagctggagatcgcggagtatatttattttaaagtaggtgtatga

SEQ ID NO: 47340 - protein, 285 aa, Unknown
  Obtained from environmental sample
  DOMAIN (4)...(44): UBA/TS-N domain
  misc_feature (1)..(285): Xaa is any amino acid
MAEISAADVKKLREKTGAGMMECKNALVSTEGDFAKAEKLLKEKGLAALEKRSGRATNEGKIFVKVKDDGSAAVLVELASETDFVARNPDFIALGWAITDKALEEGHTEPHEGLSGMVQDLATKIRENMGLKRLKAIKANKDEYLTMYIHGDGNIGVVVKCKSDKPEIFKNEDVKAFIFSLALHIAAFNPQALDKSKIDPAYITEQEEIFRKQMEKDEKLQGKPANVLEGILKGKINKHLSEVCLLEQSYVKDEKHTVAQALENVAKQAGAKLEIAEYIYFKVGV

SEQ ID NO: 47341 - DNA, 489 bp, Unknown
  Obtained from environmental sample
  misc_feature (1)..(489): n is a, c, g, or t
atgatgcaggctgttataaacgcaaccgaagaaaaaatgaaaaagatcgcggcaaacttaaaagactcgtttgccgcgctgcgtaccgggcgggcttcggctgccctgtttgacaaaatccgcgtggattattacggcgagaagtccccgcttaaccaggtggcgaatatttccattcccgaggcgcggctcatagtcatccagccctgggacaagaaactcatcggcgaaattgagaaagcgatccgcacgtcggagctttcgcttaacccttccaacgacggaaaagtcatccgcgtcgccgttccgccgcttaccgaagatcgccgcaaggaacttgccaaacttgccaaaaaccaggcggagcagtcccgcgtggcgattcgcaacacgcgcagagacggcattgacgatctgaagaaactgctgaagaaatccgagattaccgaggacgacgaaagcaaaggagcggcggctcggccgatctga

SEQ ID NO: 47342 - protein, 162 aa, Unknown
  Obtained from environmental sample
  DOMAIN (19)...(159): Ribosome recycling factor
  misc_feature (1)..(162): Xaa is any amino acid
MMQAVINATEEKMKKIAANLKDSFAALRTGRASAALFDKIRVDYYGEKSPLNQVANISIPEARLIVIQPWDKKLIGEIEKAIRTSELSLNPSNDGKVIRVAVPPLTEDRRKELAKLAKNQAEQSRVAIRNTRRDGIDDLKKLLKKSEITEDDESKGAAARPI

SEQ ID NO: 47343 - DNA, 1047 bp, Unknown
  Obtained from environmental sample
  misc_feature (1)..(1047): n is a, c, g, or t
gtgaatttgttttttaccgcatttattcccggtttacaggacttaattactgacgtaataaaagagcgtctttcagacgtaaagatccacaaactgcttgacggggcggttttgtttgagactgttacagattacgataaacttaactttttttgttttaacaatatctttgctgtaataagcgtaatggagcatgttaataatgatgttaatcctaagactgcgcttgaaaagcacataaaatcagtggtaaaaacaaatgccgcgagtgaagttgtcagtaataataacaaaaaatttcacactttcaggattatcgcttcagctgagaatattcctgcggcgattgatgaaaaagcaagaatagacgcggaaaattatatttcccggttttccggcttgaaggtgaacagaagtctgcctgatactgaattttggtttttattcagaagtgaaaagaatcaaaataatttttcggtttttatgaaacgcctcaccctgcgccattcatgggaaaagacgcttcacaagggagaactgccgcctcctctcgcttggacattgtgccgtcttgcgcgtcttgtccacagcgataccgttcttgacccattttgcggttacggctcaatccccgacgcggcgttaaaacattttcatataaacaaattcatcgcctgtgataataacagagaagccgctttgtacacaaaagcaagatttaacaagcgcaagaaagacgactttgttttttacgaaaacgatttttccgcgatcccttcccttatcgccgaaaaaagcatagacgcgattgttacggaccctccatggggagagtacagggaaatcaacaagagtactttctataaggaaatatttgatgttttccagaaattacttaaacaggatggaagactcgttatgttatgcgcaaatagtgatggttttttgaatgaagcaccgaacacttttaaacttgaagccaaaactccaatattgctttcaggtaaaaaagcggctatttttcagtatgtctacaagctccaatga

SEQ ID NO: 47344 - protein, 348 aa, Unknown
  Obtained from environmental sample
  DOMAIN (168)...(339): Putative RNA methylase family UPF0020
  misc_feature (1)..(348): Xaa is any amino acid
MNLFFTAFIPGLQDLITDVIKERLSDVKIHKLLDGAVLFETVTDYDKLNFFCFNNIFAVISVMEHVNNDVNPKTALEKHIKSVVKTNAASEVVSNNNKKFHTFRIIASAENIPAAIDEKARIDAENYISRFSGLKVNRSLPDTEFWFLFRSEKNQNNFSVFMKRLTLRHSWEKTLHKGELPPPLAWTLCRLARLVHSDTVLDPFCGYGSIPDAALKHFHINKFIACDNNREAALYTKARFNKRKKDDFVFYENDFSAIPSLIAEKSIDAIVTDPPWGEYREINKSTFYKEIFDVFQKLLKQDGRLVMLCANSDGFLNEAPNTFKLEAKTPILLSGKKAAIFQYVYKLQ

SEQ ID NO: 47345 - DNA, 603 bp, Unknown
  Obtained from environmental sample
  misc_feature (1)..(603): n is a, c, g, or t
atgataaagcccctgttattctcattttcatgcctcttcctaatcacgggcttattgccgcttaacgcgtattacgtcacctataaagaacagtactaccggctgttccacctgcacctgattcaataccccgacgacaccatggagaatatctactggctggaaaaggcgctgaaggctgatttttgcaaccctctttacgccctcgccctgatagaaaacgagacccagtatgagaaataccgttatctgttcagtatgcacatcaacctgaagctgatcgagcagtacctgtttttggggaacaagtggaacaaaagaaaggcgtatttctacaacgcaccctggaaagaacagaaccttgaaagcctggaaaccgcggaaacctgctaccgcaccgcgctgtactattggacggcggcggctgaatgggccggaaaggcgcgggaaaggcgcttttatttcatcaatttgccaagggtgcagttctgggaagacgaggccctccgcatagaaaaaggcgagcttgactacgagaaaattatcaaccgcgaactggccctgttgcaaaaagtcagagaaagatttcaggcaatgcaatga

SEQ ID NO: 47346 - protein, 200 aa, Unknown
  Obtained from environmental sample
  SIGNAL (1)...(23)
  misc_feature (1)..(200): Xaa is any amino acid
MIKPLLFSFSCLFLITGLLPLNAYYVTYKEQYYRLFHLHLIQYPDDTMENIYWLEKALKADFCNPLYALALIENETQYEKYRYLFSMHINLKLIEQYLFLGNKWNKRKAYFYNAPWKEQNLESLETAETCYRTALYYWTAAAEWAGKARERRFYFINLPRVQFWEDEALRIEKGELDYEKIINRELALLQKVRERFQAMQ

SEQ ID NO: 47347 - DNA, 723 bp, Unknown
  Obtained from environmental sample
  misc_feature (1)..(723): n is a, c, g, or t
ttgcggaaggctttttttttaattgttcatcacctcctcgcggtcggcgagttgtatttccagggtgagggcggcatcgccgcgcaatattccgacttttaccttgtcgcccggcttgctgtgctcaagcgcggaaaacagatccgccagcgaagctatcttcatgccttccaccgaggtgataatgtcgccaccgatgtaaatctcgctgcccctgtacaggacgcgctcgccaccctgcttcagccccgccttgtccgccagaccgccgcgttttacgcgggataccaaaaggcccgaaccgacgggaagtttcgcgtaacgcaccagcgcgggaaaaagctgcaccattgtcgcgtcgaaccagccgcgccgcactttgccgtactgtataagctcgttcaccacccgcttggcggtgtccaccggcacggcaaaacctatacccacggagccgccggacggggaaaaaataatcgtgttgatgcctatcatcctgccgcgggagtccagcagggggccgcccgaattgcccggattaatggaagcgtcggtctggatcatgtcccgcactatgtgctggcgggtaatctgtattggccttccaaggccggaaacaatgccgaccgtaagggtacgctccagggcaaaggggttcccgatggccagcaccttctgccctactttcaggttgccggaatcgccgtaaggcacggtctttaa

SEQ ID NO: 47348 - protein, 240 aa, Unknown
  Obtained from environmental sample
  misc_feature (1)..(240): Xaa is any amino acid
MRKAFFLIVHHLLAVGELYFQGEGGIAAQYSDFYLVARLAVLKRGKQIRQRSYLHAFHRGDNVATDVNLAAPVQDALATLLQPRLVRQTAAFYAGYQKARTDGKFRVTHQRGKKLHHCRVEPAAPHFAVLYKLVHHPLGGVHRHGKTYTHGAAGRGKNNRVDAYHPAAGVQQGAARIARINGSVGLDHVPHYVLAGNLYWPSKAGNNADRKGTLQGKGVPDGQHLLPYFQVAGIAVRHGL

SEQ ID NO: 47349 - DNA, 957 bp, Unknown
  Obtained from environmental sample
  misc_feature (1)..(957): n is a, c, g, or t
gtggtaaacatcaccaccgagaccatggccgtcaactggtttctggagcctgttccgcaggaaggcggctcgggttccggctccatcatagatacgcggggctatgtgcttaccaacaaccacgtcatcaggaacgcctacaaggtatatatcaaccttgccgacggcagccagtacgaggggacggtgacgggaaccgatccggaaaacgatctggccgtgctcaagttcgatcctcccgccggaaccgtattaaagaccgtgccttacggcgattccggcaacctgaaagtagggcagaaggtgctggccatcgggaacccctttgccctggagcgtacccttacggtcggcattgtttccggccttggaaggccaatacagattacccgccagcacatagtgcgggacatgatccagaccgacgcttccattaatccgggcaattcgggcggccccctgctggactcccgcggcaggatgataggcatcaacacgattattttttccccgtccggcggctccgtgggtataggttttgccgtgccggtggacaccgccaagcgggtggtgaacgagcttatacagtacggcaaagtgcggcgcggctggttcgacgcgacaatggtgcagctttttcccgcgctggtgcgttacgcgaaacttcccgtcggttcgggccttttggtatcccgcgtaaaacgcggcggtctggcggacaaggcggggctgaagcagggtggcgagcgcgtcctgtacaggggcagcgagatttacatcggtggcgacattatcacctcggtggaaggcatgaagatagcttcgctggcggatctgttttccgcgcttgagcacagcaagccgggcgacaaggtaaaagtcggaatattgcgcggcgatgccgccctcaccctggaaatacaactcgccgaccgcgaggaggtgatgaacaattaa

SEQ ID NO: 47350 - protein, 318 aa, Unknown
  Obtained from environmental sample
  DOMAIN (11)...(191): Trypsin
  misc_feature (1)..(318): Xaa is any amino acid
MVNITTETMAVNWFLEPVPQEGGSGSGSIIDTRGYVLTNNHVIRNAYKVYINLADGSQYEGTVTGTDPENDLAVLKFDPPAGTVLKTVPYGDSGNLKVGQKVLAIGNPFALERTLTVGIVSGLGRPIQITRQHIVRDMIQTDASINPGNSGGPLLDSRGRMIGINTIIFSPSGGSVGIGFAVPVDTAKRVVNELIQYGKVRRGWFDATMVQLFPALVRYAKLPVGSGLLVSRVKRGGLADKAGLKQGGERVLYRGSEIYIGGDIITSVEGMKIASLADLFSALEHSKPGDKVKVGILRGDAALTLEIQLADREEVMNN

SEQ ID NO: 47351 - DNA, 948 bp, Unknown
  Obtained from environmental sample
  misc_feature (1)..(948): n is a, c, g, or t
atggccgagtctcagacgcgcagcggctggcacgtgtcgaaaaaagcttctggagcgccaaggaggctcatcatgggcatcaattcgcagtacaaagacagcgtattttcattgcttttcagcgatccggatgtgttgcgggagttatactgcgctttggagaatgttacactcccgccggataccccggtaaccatcaacactttgcaaaatgttctgtttatggattcgattaatgatatctcgtttgagataggcgggcggctggttgtgctgctggaacatcagagcagcataaatccaaacatggggctgcgatttctgatgtacatcgccaagatttacgagacaatgaatgaacgccgggtgctgtattccactaagctcgcgcgtattccgcagccggaattcttcgtgctctacaatggtctcgcgcctttccccgacgaacaaatcctgaagctttcggacgcgtttatggatgcgagggaattgggcatccccaaacaagatccatctcttgagcttacggtgcgcgtgctcaatattaacgatggcagaaacgcggaactgctttcctcgtgtaaagccctgggcgaatacagcgaatttgtcgcgcaagagcgttccttcgagcggcagcttggcgacaggcaaaaagcgatgcaagccgctgtacgctactgccttgaccgtgatatattgagatcgttcatggagaaacattcgcgggaggtgttcagaatgcggatcaccgagtggaatacagaggaagccatcgccgtctggcgcgaggaaggtcgggaggacggttttgcggaaggcaaagcggatggattggcggaagggcaaaaaaaattgcgcgaaaccgcccgaaaactcaaagctttaggtgtgtctgcggagcatataattgcggcgaccgggctttctccggatgagctgtag

SEQ ID NO: 47352 - protein, 315 aa, Unknown
  Obtained from environmental sample
  misc_feature (1)..(315): Xaa is any amino acid
MAESQTRSGWHVSKKASGAPRRLIMGINSQYKDSVFSLLFSDPDVLRELYCALENVTLPPDTPVTINTLQNVLFMDSINDISFEIGGRLVVLLEHQSSINPNMGLRFLMYIAKIYETMNERRVLYSTKLARIPQPEFFVLYNGLAPFPDEQILKLSDAFMDARELGIPKQDPSLELTVRVLNINDGRNAELLSSCKALGEYSEFVAQERSFERQLGDRQKAMQAAVRYCLDRDILRSFMEKHSREVFRMRITEWNTEEAIAVWREEGREDGFAEGKADGLAEGQKKLRETARKLKALGVSAEHIIAATGLSPDEL

SEQ ID NO: 47353 - DNA, 405 bp, Unknown
  Obtained from environmental sample
  misc_feature (1)..(405): n is a, c, g, or t
ttggtgtgtactacgcacaacaaaactgcttgccgaaaggcaaaaactgctccaaaacacccgatgtcgggttccaaacacccgccgtcggctgaaaaacatccggcgtcggttgcaaaatacccgccgtcggctggaaaacacccgatgtcggctgaaaaatacctgacgtcggctgaaaaacacctgatgtcgggcttcgcgaggccgtcgtcaggcttcgcgaggccgtcgtcaggcttcgcgaggccgtcgtcgggcttcgcgaggccgtcgtcgggcttcgcgaggccgtcgtcaggctcggcgaggccgacgcagggctccgcgaggccgtcgtcaggctcggcgaagccgacgcagggctccgcgaggccgtcgtcaggctcggcgaggcttccgtaa

SEQ ID NO: 47354 - protein, 134 aa, Unknown
  Obtained from environmental sample
  misc_feature (1)..(134): Xaa is any amino acid
MVCTTHNKTACRKAKTAPKHPMSGSKHPPSAEKHPASVAKYPPSAGKHPMSAEKYLTSAEKHLMSGFARPSSGFARPSSGFARPSSGFARPSSGFARPSSGSARPTQGSARPSSGSAKPTQGSARPSSGSARLP

SEQ ID NO: 47355 - DNA, 780 bp, Unknown
  Obtained from environmental sample
  misc_feature (1)..(780): n is a, c, g, or t
atgcgggcaaaaaagggcataccggttcttgcccttattatcgacgataaggcccgctggaaaccggtaaaaaaagaaacggatatcgcgcttattcgcaagttgaacaaccttaagacaaaactccgggaaggggctgtcgagacatggcttaacacaccggatctttgtcagaaggctttagcccttcttgcccaggaatttaccgttaatccccagccgggctgggtaagagaggacagaaccattgacccgcaggtcgccaatgaactttcgcgcctgtgcagcgaaaacagtttcctaaggcggcattatggccacgaggatcatgaagtactcactaaaatacagaacgaagaaaaacacatcctgaaattacttaccatgaataaaatttcactcagcttctattatactcccggtgaaaactgggaaaacaccaggcatttccggtacatccgtatctttaaactcctcgttcccgaattggccctgggtaaaagcacggcggaaatttcccgcttcctcggcacggtgcttaaccccgatttggacaagacggttcgcaaggattatccgaccccgtcaaatacgataaaaaagatcatgacggattttgcaacgctaaagctggtaagctgtatcagcggtgaaggaggcaatgagggtgatgagatatgggaaattacccagcatgggaaagatatattttctgcatatcgcataacacagcttgagaaggctatggagaaaaaagctgaagagggaaccggttcctaa

SEQ ID NO: 47356 - protein, 259 aa, Unknown
  Obtained from environmental sample
  misc_feature (1)..(259): Xaa is any amino acid
MRAKKGIPVLALIIDDKARWKPVKKETDIALIRKLNNLKTKLREGAVETWLNTPDLCQKALALLAQEFTVNPQPGWVREDRTIDPQVANELSRLCSENSFLRRHYGHEDHEVLTKIQNEEKHILKLLTMNKISLSFYYTPGENWENTRHFRYIRIFKLLVPELALGKSTAEISRFLGTVLNPDLDKTVRKDYPTPSNTIKKIMTDFATLKLVSCISGEGGNEGDEIWEITQHGKDIFSAYRITQLEKAMEKKAEEGTGS

SEQ ID NO: 47357 - DNA, 858 bp, Unknown
  Obtained from environmental sample
  misc_feature (1)..(858): n is a, c, g, or t
atggggggtaaatatggcgacagaaaacgatttgacaaactgcggatgtgcagggacattctttcgcaaaaaatcaaactggaacatgagattcaggagatacccaagcagcttgggaatcttgaggaagcgcataacaggacccggaaggcgtttatcgacaaaaatctggaatacgaaaaaatcaaaagcgccgaagaagaagccagggcaagtttgagggaagctgaagccgcaagggaaaaagcggagcgtaccatttccgagatcaacacccagcgggaatacgaggcgcttgacaaagaacgcaacgccgcggaaaaaaacgagcagcaattcggcaaagaagtgcagatgaaagaaaaagcgctcatggatcttgacgaacagataaagcagcacgccgcccttattgagcagcaggaaaaggaactggcggaaaaacgggcggggattgacgctgaaatctccgttaagaaaaaacagatagaaaacctgttaaagaaggaaaaaaccctggccggtgatctggatcaggaggttgtgttcaaatttgaacgtatcctcaggaataaaatgggcctggggattgtcgcgataaaaggcaatgtatgccagggctgccacatgattcttccggcgcaattttccaacaatgtccgtcttggcgaagaatttattttttgcccttattgctcgcgcatactttactatgaagagtcagccgaaggcgaggatgttttctttgacagcgatgacgccggagcgctggaagaacctgacgaaatagaggaagatgaattcgaggaggacgacaaagaggaagaaaaggtcaatatagactttgaagatatttaa

SEQ ID NO: 47358 - protein, 285 aa, Unknown
  Obtained from environmental sample
  DOMAIN (7)...(240): Uncharacterized ACR, COG1579
  misc_feature (1)..(285): Xaa is any amino acid
MGGKYGDRKRFDKLRMCRDILSQKIKLEHEIQEIPKQLGNLEEAHNRTRKAFIDKNLEYEKIKSAEEEARASLREAEAAREKAERTISEINTQREYEALDKERNAAEKNEQQFGKEVQMKEKALMDLDEQIKQHAALIEQQEKELAEKRAGIDAEISVKKKQIENLLKKEKTLAGDLDQEVVFKFERILRNKMGLGIVAIKGNVCQGCHMILPAQFSNNVRLGEEFIFCPYCSRILYYEESAEGEDVFFDSDDAGALEEPDEIEEDEFEEDDKEEEKVNIDFEDI

SEQ ID NO: 47359 - DNA, 1614 bp, Unknown
  Obtained from environmental sample
  misc_feature (1)..(1614): n is a, c, g, or t
atggacgacggccgagtttggagcgaacatgtgcagatcaccgtggatgacggctcgaatgaagaagatgtcgacgcggagggcggaaaaagaacggaaacaggcaagaagcgctccgcgaacagcgataaagaatcgtccctggtggatgacccgatcagaatgtacctgcgcgagattgggcgcgaaagccttcttacggcggaacaggaaatagagctttcccggcagatggaggaaggcgaaaatattatcaagaacgttatcaaaaaatcgggaatgattattccggagtataaccgcatagccgaggaagcgttttccaaaaaggaccttcgtgaacttagtctgacaaaaaaagaaaccaccgagcgaatggccgagcgccggcgcttaagcgcgttttacagggattccctgcgcacgattcaaggggacttaaagaattacatcgatataaaacagcgggtgatagacaggggaggggattaccaggatgacaaggatctcgcgaatctgcgcaaacggattggccggtccatcaaaaacgcggcgatacacccggatgaaatactccagttctccgaaaaatttatccaggcttccaagaagatcaagaaatacaaaaaagagcaggagcgcatagaaaagcatctcaaggtaagctccctgaaagaccttcgcacgcttggccgcaatcttaccataaaggaagaacgggagaggcttgagcaggaactggggctttcatccgacgagatcaaggagaagatcaggcttatccaggtaatggagaaaaagctcaggtcaatggagtatgagtttgaggagtcgattgataatatcaatctgatggcaaaagagatactgcacggcagagttcagatgaaaaacgccaaggaccggctgataaaagccaacctcaggctggttgtctccatcgcgaaaaaatacaccaaccggggcctgcattttttcgacctggtgcaggaagggaatatcggcctgattaaggcggttgagaaattcgagtaccagaaaggcttcaagttctccacctacgcgacatggtggatacggcaggcgataacgcgttcaatttccgatcaggcccggacgatccgcgtccccgtgcacatgatagagcagatcaataaagtggtgcgggaatcgcgccagctcatgcagacgcttgggcgggaaccgaccgatgaggaaatagccgagcgcctgggctggccggctttaagagtaaagtcggtcaagaaagttgccagggagccgatcagccttgagacgcccataggcgaggaagaggattcccttttgggtgattttatcgaagacaaggacgtggagaatcccgcaaccctcaccgcccataccttgctgcaggaggaagtcgccggcgtgctttccaccctgcctgagcgggagcaggaagtactgaaaatgcgcttcggcctgggcgacggttattctcttacactggaagaagtagggctgcttttcaaggtgacgagggagcgtataaggcagattgaggcaaaagcgctacgccgcctcaggcatccaaggcgaagcatcaaactgaaggattttttggatcattaa

SEQ ID NO: 47360 - protein, 537 aa, Unknown
  Obtained from environmental sample
  DOMAIN (50)...(86): Sigma-70 factor, region 1.2
  misc_feature (1)..(537): Xaa is any amino acid
MDDGRVWSEHVQITVDDGSNEEDVDAEGGKRTETGKKRSANSDKESSLVDDPIRMYLREIGRESLLTAEQEIELSRQMEEGENIIKNVIKKSGMIIPEYNRIAEEAFSKKDLRELSLTKKETTERMAERRRLSAFYRDSLRTIQGDLKNYIDIKQRVIDRGGDYQDDKDLANLRKRIGRSIKNAAIHPDEILQFSEKFIQASKKIKKYKKEQERIEKHLKVSSLKDLRTLGRNLTIKEERERLEQELGLSSDEIKEKIRLIQVMEKKLRSMEYEFEESIDNINLMAKEILHGRVQMKNAKDRLIKANLRLVVSIAKKYTNRGLHFFDLVQEGNIGLIKAVEKFEYQKGFKFSTYATWWIRQAITRSISDQARTIRVPVHMIEQINKVVRESRQLMQTLGREPTDEEIAERLGWPALRVKSVKKVAREPISLETPIGEEEDSLLGDFIEDKDVENPATLTAHTLLQEEVAGVLSTLPEREQEVLKMRFGLGDGYSLTLEEVGLLFKVTRERIRQIEAKALRRLRHPRRSIKLKDFLDH

SEQ ID NO: 47361 - DNA, 1044 bp, Unknown
  Obtained from environmental sample
  misc_feature (1)..(1044): n is a, c, g, or t
gtgcgagatggtgtcgtactcaacgcgattatggcttctgacgagcagacttttgcgcaaaatctctctccgtacatggatttcgaccactttctgcgatacatggcggtggacgtggccattaacaactgggacggcataaggtcatggtacagcgaccaaacggcgcggcagtgggcggtcaaccataattattatttttacgaggaagagaacgccggcggaaaaatctggcttgtcccctgggacatggacaatactttttgggaagtcgacccctactttgaaacagccaaagtaccgcaatggaacgaaacccctacgcactgcggcggacacccaacttggaacggtgaatttatcaggccgcccaactgcgacaaactgaccaagctcacggcttccgttttttgggatcgtttcgtaaaattcggcgaacggtttctgagagacctgttcgtaaaccaacgcctaattgacaagataaacactcacagagagttgatctcggagtcaatacagcgggatccgaccatcaacggcacatcttgggcaagcgacgtcaacacgctcatattgtatatgccaaacttagtcacaaagttttcaaaccatatacattcgataaaatcggatggaaactcttatcggtatctaaaccctgtacaaccgaataactttgagtttacgctcgcctccgacaatatgtactggatacagaagtatttctccgaaaacagcgaaggctccgtaacccataacaagataaacccgctctccgacgcggcggatatgcgcttcgattttactttcagagagacgaactatccacacgcttgggacgtttggggtaatttccagccggaatttgaactagcggcaaacatgacgaacctcagcggaattcgtgtcatcctgcgcggcgacnagaccagaaattggagatttctattggcaattgggacgtgtaccaagaacacggcgcgagtagcgattacggttgggagattcaggcgacgacggaaccgcagacggttaccctga

SEQ ID NO: 47362 - protein, 347 aa, Unknown
  Obtained from environmental sample
  misc_feature (1)..(347): Xaa is any amino acid
MRDGVVLNAIMASDEQTFAQNLSPYMDFDHFLRYMAVDVAINNWDGIRSWYSDQTARQWAVNHNYYFYEEENAGGKIWLVPWDMDNTFWEVDPYFETAKVPQWNETPTHCGGHPTWNGEFIRPPNCDKLTKLTASVFWDRFVKFGERFLRDLFVNQRLIDKINTHRELISESIQRDPTINGTSWASDVNTLILYMPNLVTKFSNHIHSIKSDGNSYRYLNPVQPNNFEFTLASDNMYWIQKYFSENSEGSVTHNKINPLSDAADMRFDFTFRETNYPHAWDVWGNFQPEFELAANMTNLSGIRVILRGDXTRNWRFLLAIGTCTKNTARVAITVGRFRRRRNRRRLP

SEQ ID NO: 47363 - DNA, 1134 bp, Unknown
  Obtained from environmental sample
  misc_feature (1)..(1134): n is a, c, g, or t
ttgggcaagatactcgaagccgtaaactgcgccgattggctgcgaaatttaattatagacggcattgtggcgggcgtgggcgcggtgcttggcttcgtgccgcagatgtttatactcttcatgttcctcgccttcttggaagcctgcggctacatggcccgtatcgccttcatcatggacaggattttccgcaacttcggtctgtccggcaaatccttcatacccattttgataggcaccggctgcagcgttccgggcattatggcttcacgcacgattgagaacgagcgcgaccgcaagatgaccgttatgaccacctccttcatcccctgctcggccaagctgccgatcatcgcgcttatcgccggggcgctcttcgacggggcgtggtgggtggcccccagcgcctacttcgcgggggtcgcggccatcatctgctccggtgtaatattgaagaagacaaaggtgttcgccggggaggtcgccccgtttgtcatggaactccccccataccattggccgaccgccgtcagcattttgcgcagtatgtgggagcgcggctggtcgttcatcaagaaggccggaaccgtagtcctcttggcgacgatatgcgtctggttcgcctccgacttcggatgggggaaggacgggttcggcatggtcggcatgggcgagagcattttggcgaanatcggcggcgccgtcgccccgatcttcgcgccgctcggctggggcagctggcaggccgccgtagccgccatcaacggcctcgtcgccaaagaaaacttggtgggcacattcgccatcctctacagcgccgaggacggcgccgaagtctggagcgccctgcgcggcagcttcagcgggctggccgcttactcgttcctgatgttcaacctactatgcgccccgtgcgtcgccgctatgggcgctatccggcgggagatgaacaacgccaaatggttcttcgcggccatcggatatcagtgcggtcttgcatatatcgtgtcgctctgcgtctatcaattcggaacgctgttttcttcgggccgcttcggggtaggaacggtcgcggcgtttctgctgaccggcgggacgctgtacctgctgtttcgtccggcggcgcggaaatag

SEQ ID NO: 47364 - protein, 377 aa, Unknown
  Obtained from environmental sample
  DOMAIN (132)...(186): Ferrous iron transport protein B C terminus
  misc_feature (1)..(377): Xaa is any amino acid
MGKILEAVNCADWLRNLIIDGIVAGVGAVLGFVPQMFILFMFLAFLEACGYMARIAFIMDRIFRNFGLSGKSFIPILIGTGCSVPGIMASRTIENERDRKMTVMTTSFIPCSAKLPIIALIAGALFDGAWWVAPSAYFAGVAAIICSGVILKKTKVFAGEVAPFVMELPPYHWPTAVSILRSMWERGWSFIKKAGTVVLLATICVWFASDFGWGKDGFGMVGMGESILAXIGGAVAPIFAPLGWGSWQAAVAAINGLVAKENLVGTFAILYSAEDGAEVWSALRGSFSGLAAYSFLMFNLLCAPCVAAMGAIRREMNNAKWFFAAIGYQCGLAYIVSLCVYQFGTLFSSGRFGVGTVAAFLLTGGTLYLLFRPAARK

SEQ ID NO: 47365 - DNA, 1092 bp, Unknown
  Obtained from environmental sample
  misc_feature (1)..(1092): n is a, c, g, or t
atgaaaatgacaatgcgctggttcggacccggctacgatcccgtaactttagacaagatacggcaggttcccggcattagcggagtaatcacaacactgtatggcgttccgcccggcgaggaatggaaaaaagaagaactgtcagcgctaaaaaaacaagttgaggataacgggcttgtaatcgcggggatagagagcgtcaatgttcatgacgcgataaaaaccgccggcaaagagcgcgatatgtatatcgaaaaatatatcaacacgctgaaaataatcgcgcaggctgatatacaccttgtttgttacaacttcatggcggtctttgactggacgcgctccgatttagcgaaaccccgtcccgacggcgcttttgtgatggcgtatcaacaaaaacttatagacgaagttaaccccgataatatgtttgacgtgatgaacgccaaagcgcaggggcacttgcttcccggctgggaacctgaaagaatggctaaaacccgcgaactatttgagctttacagtaatattgatgaaaacacgttatttgcaaacttgacatattttcttaaagcgattatgccaacctgcgaacaatacggaattaaaatggcaattcaccccgatgatccgtcatggtcggtattcggtcttccgcgaataatgaaaaacaaagaagacttactgcgtcttgttaaagccgtagacaatccctgcaacggcataactctttgtaccggaagtttaggaagcagtcccgccaacgacatacccgccattatccgcagcttgaaaggacgcatacatttcgcccatgttcgtaacgtaaaacacaacgctcccggcgattttgaagaatccgcccacctttcaagcgacggctctcttgatatgtacgccatcatgagagcattatacgacacaggatttgacggaccgataagaccggatcacggaagaagcatctggggtgaagtctcaatgcctgggtacgggctttacgaccgttctatcgggctaagttatttatccggtctttgggaagccattcagaaggggcaaaattcccctgaatggctaaattcggactaa

SEQ ID NO: 47366 - protein, 363 aa, Unknown
  Obtained from environmental sample
  DOMAIN (1)...(352): D-mannonate dehydratase (UxuA)
  misc_feature (1)..(363): Xaa is any amino acid
MKMTMRWFGPGYDPVTLDKIRQVPGISGVITTLYGVPPGEEWKKEELSALKKQVEDNGLVIAGIESVNVHDAIKTAGKERDMYIEKYINTLKIIAQADIHLVCYNFMAVFDWTRSDLAKPRPDGAFVMAYQQKLIDEVNPDNMFDVMNAKAQGHLLPGWEPERMAKTRELFELYSNIDENTLFANLTYFLKAIMPTCEQYGIKMAIHPDDPSWSVFGLPRIMKNKEDLLRLVKAVDNPCNGITLCTGSLGSSPANDIPAIIRSLKGRIHFAHVRNVKHNAPGDFEESAHLSSDGSLDMYAIMRALYDTGFDGPIRPDHGRSIWGEVSMPGYGLYDRSIGLSYLSGLWEAIQKGQNSPEWLNSD

SEQ ID NO: 47367 - DNA, 393 bp, Unknown
  Obtained from environmental sample
  misc_feature (1)..(393): n is a, c, g, or t
ttgttttcggccgggacaatgaattcggtgatgccttcctcaaggccgcctgcgattgccgccagaacgccgcgcaccgggcgtatatttccggaaagctccagttctcccatcacaagaatacccggaggcaccggggcaagtcccgccgccgccattaccgccagcgcaatcggcaaatccagttccgccccgtctttccgcaatcccgccggcgccaggttgattagaatcctgtccagcgggaaagtaaacccggaattcctgaacgccgcccttaccctttccttggcttcccgaaccgccccctcggcaagcccgctaatatcaatacccgggataccccggcgtatatccgcttccacccggattatcaccccacccgcgccataa

SEQ ID NO: 47368 - protein, 130 aa, Unknown
  Obtained from environmental sample
  misc_feature (1)..(130): Xaa is any amino acid
MFSAGTMNSVMPSSRPPAIAARTPRTGRIFPESSSSPITRIPGGTGASPAAAITASAIGKSSSAPSFRNPAGARLIRILSSGKVNPEFLNAALTLSLASRTAPSASPLISIPGIPRRISASTRIITPPAP

SEQ ID NO: 47369 - DNA, 729 bp, Unknown
  Obtained from environmental sample
  misc_feature (1)..(729): n is a, c, g, or t
atgcaggcaaagaagaaagccgcgaaaaagacctataagccgtcggtcaagaaaaagaccgttccgagcctcaaacggatgacgcttgaggagtacatcgcttttagggccgaggctgacgccaaaatggacgcgcgtcaagccaaaactgaggcggcgattgatcgcctatcagccgaaaaccggaagtctcgcgaagagacggagatcgcgttcaaagaactatctgccgaattttggaaaacctacgttctcgtccgagatttgagcagaaatatgggcggattgaataacagtttcggacttctcgtcgaggtcgtcgtcatacccaaaatacgcgccgacataaacgctgtcggcaagcatacgtttaacagggtgctggtagacaagaaaatcagcgctattgccgccggcgaaaagaagactatcggcgaaatagatatgtttttattcagtgacgccgacgccgaagcgatggtggtcgaaataaaggcgcaactcagtatgaaccaagtgaaagagcgtttggagcggttacagaaattccgcgaatacgaagaagaggccgagatcaaaggcaaaaaacttttcggagcggtggccgccatatacattgatccgagcgtcaaagctttcgctttagaaaacggtttgtacgtcgtagaaatccgcgaggaagaggatagattagatatagaaaaacctgagatttgccgcacgtggtaa

SEQ ID NO: 47370 - protein, 242 aa, Unknown
  Obtained from environmental sample
  misc_feature (1)..(242): Xaa is any amino acid
MQAKKKAAKKTYKPSVKKKTVPSLKRMTLEEYIAFRAEADAKMDARQAKTEAAIDRLSAENRKSREETEIAFKELSAEFWKTYVLVRDLSRNMGGLNNSFGLLVEVVVIPKIRADINAVGKHTFNRVLVDKKISAIAAGEKKTIGEIDMFLFSDADAEAMVVEIKAQLSMNQVKERLERLQKFREYEEEAEIKGKKLFGAVAAIYIDPSVKAFALENGLYVVEIREEEDRLDIEKPEICRTW

SEQ ID NO: 47371 - DNA, 1056 bp, Unknown
  Obtained from environmental sample
  misc_feature (1)..(1056): n is a, c, g, or t
atggtgactatgaaagtaaaagtcttggtagtagacgattccgctgttgtgcggcagatattgactcgcgagttctccaaggacagggacatcgaggttgtgggtaccgcccccgatccgtacgtcgcacgtgacaagattgttcagctcaaacccgacgtcataacgctcgacgttgagatgccgcgtatggacggcgttactttcctgcgcaagctgatgaaacatcacccgattccggtcatcatcgtatcctcgctaaccgtcgccggaagcgaattagccatggaggcgctccagtacggcgccatcgacgtaatgtgcaaaccgggtaccgcctacagcgtgggcgacatgtctgaaatactgatacagaagataaaggccgccgcgatggtcgacatgagaaagcgcgctgaaatgataagggagcgggcagccacggcctccgaacctcccaagcgccttgccatgaccaaaacgaccaacaaaattatagccataggcgcttccacaggcggcaccgaggccataaaagatgtgctcgtctctttcccggccggcgctcccggtacggtgatcgtccagcacatgccggagtactttaccaagtctttcgccgaaaggctcaacagcacctgcgagataaacgtcaaggaagccgagaacggcgaccgcgttatacccggcagggcgcttctagcccccggcaacaaacacatggtgctcaaaagatccggcgcgcagtacttggtcgaacttaaagacggtccgctcgtcttccaccagcgccccgccgtcgaagtgctcttcaactccgtggcccagtacgccggcgcgaacgcggtcggcatgatcctgacaggcatgggcaaagacggtgccaaaggactgctcgccatgaaagaggccggcgcgtacacgatagtgcaagacgaagcctcaagcgtcgtgtggggcatgcccggcgaagctttcaaattaggcgccgccacgatagtcctccccctcaaaaagatcgcggcggaggctataaagagggcggagtcggagtaa

SEQ ID NO: 47372 - protein, 351 aa, Unknown
  Obtained from environmental sample
  DOMAIN (6)...(124): Response regulator receiver domain
  misc_feature (1)..(351): Xaa is any amino acid
MVTMKVKVLVVDDSAVVRQILTREFSKDRDIEVVGTAPDPYVARDKIVQLKPDVITLDVEMPRMDGVTFLRKLMKHHPIPVIIVSSLTVAGSELAMEALQYGAIDVMCKPGTAYSVGDMSEILIQKIKAAAMVDMRKRAEMIRERAATASEPPKRLAMTKTTNKIIAIGASTGGTEAIKDVLVSFPAGAPGTVIVQHMPEYFTKSFAERLNSTCEINVKEAENGDRVIPGRALLAPGNKHMVLKRSGAQYLVELKDGPLVFHQRPAVEVLFNSVAQYAGANAVGMILTGMGKDGAKGLLAMKEAGAYTIVQDEASSVVWGMPGEAFKLGAATIVLPLKKIAAEAIKRAESE

SEQ ID NO: 47373 - DNA, 648 bp, Unknown
  Obtained from environmental sample
  misc_feature (1)..(648): n is a, c, g, or t
ttggccgagatgcctttttatttttaccaggaggatcttccctcctgggtaccgcccacacccgaagaatcggtcaggcttagagagcagacccgcaaccgcaacgcaaatcagctaaagcgatctactcattttaccgacgccctgtggagaagcaggagcagggacgaggcatgggagcacataaagcaaatccgctttttgggaatgccagtacaggttcattattccatacttgttcaattaagcgtcgttgaggaacaaattctaaggctgtcaaaaaccaatagcaccgtaagacagtggatcaatagtctcggttctgctgatggctgggcatggagaaacatcgcttccagcgagaatcgcagttaccacgcttacggagccgccatcgatcttatgccaaaatcttcttccggtcttgaagtttattggctctggacttccggaaaaaatattgattggtggaacgttccttattctagacgcctgcacccccctaacgaagtaataaaaatcttcgagtcatttggcttcatttggggcggaaaatggcgctactacgacaccatccattttgagtaccgcccggaaatacttattttaagcgggatagcaataacggatttaagggatctacgctga

SEQ ID NO: 47374 - protein, 215 aa, Unknown
  Obtained from environmental sample
  misc_feature (1)..(215): Xaa is any amino acid
MAEMPFYFYQEDLPSWVPPTPEESVRLREQTRNRNANQLKRSTHFTDALWRSRSRDEAWEHIKQIRFLGMPVQVHYSILVQLSVVEEQILRLSKTNSTVRQWINSLGSADGWAWRNIASSENRSYHAYGAAIDLMPKSSSGLEVYWLWTSGKNIDWWNVPYSRRLHPPNEVIKIFESFGFIWGGKWRYYDTIHFEYRPEILILSGIAITDLRDLR

SEQ ID NO: 47375 - DNA, 981 bp, Unknown
  Obtained from environmental sample
  misc_feature (1)..(981): n is a, c, g, or t
atgaaaaatatagccgttttatcggttttagtcattatattaagcctaaattcttatgcagatgaatcggaagttccttccgcagaagttccctctgcggaagttccttccgccgaaaggaactattgtttttcattagggcctcagtttggctttgtctttgggcaggcgcttgaaattgtctattcattgccggaagaaacaaaaaacgaattcttaagcgaacttatttgggacatgaaacctgttttttatttcggcatacaggcgcaatttaaccgggttgacctgatgaaaaagcccggttttttttcttccatttctttcaaagccggaattcccgccgattcaggcattatggaagaccgcgactggatgtggccgcaaaacagcgatcttacacgtttttccagccataccaacaaaaccgacgtatttattcaattagatgccgcagccggcgcttcatttccaaccaataataatttatttaaactgtttatcggcggttcatggatgcgttttttatttaccggaagggacggatacggaatttataatgacctttataccaaagagcagaatttttcaggggatacggttatcagttaccaacaagactggttgcttttggctataggattttctgccggtacaaatattttttatcctttttcctttgatatttcttttcagataagtccgctcacatattgcgcggcaattgataatcatcttttgggagatactattttccgcgattttaccgaatttgggcttttttttgaaccttctttcaatatgtcatttgtaataaaacatgcggaattatcacttggattgaattacaggtatataggcagaactaagggagagtcatacacaaataaaaaagacaaaggttattaccttgaaacaaataaagcgggagcgggtctttcaatgctggactcgcgctttcttgtaagtatccgcttgtaa

SEQ ID NO: 47376 - protein, 326 aa, Unknown
  Obtained from environmental sample
  SIGNAL (1)...(20)
  DOMAIN (38)...(320): Omptin family
  misc_feature (1)..(326): Xaa is any amino acid
MKNIAVLSVLVIILSLNSYADESEVPSAEVPSAEVPSAERNYCFSLGPQFGFVFGQALEIVYSLPEETKNEFLSELIWDMKPVFYFGIQAQFNRVDLMKKPGFFSSISFKAGIPADSGIMEDRDWMWPQNSDLTRFSSHTNKTDVFIQLDAAAGASFPTNNNLFKLFIGGSWMRFLFTGRDGYGIYNDLYTKEQNFSGDTVISYQQDWLLLAIGFSAGTNIFYPFSFDISFQISPLTYCAAIDNHLLGDTIFRDFTEFGLFFEPSFNMSFVIKHAELSLGLNYRYIGRTKGESYTNKKDKGYYLETNKAGAGLSMLDSRFLVSIRL

SEQ ID NO: 47377 - DNA, 606 bp, Unknown
  Obtained from environmental sample
  misc_feature (1)..(606): n is a, c, g, or t
atgccccctaccgctttttcacttgtacttatgaatttgtccgtttccttgaccagggtcttgcccgattctgccatgtcaagagatccctttttgaccgatgctgttatgtccctaaggcggcttatggagtccagtatttgttttccgcctgtttcctgttcttccatcgcgttaagaatattttgctcatgctctgaaactgttttcacacctgagtcaatggcgccaaaacgagccagcacctcatcggaagattgggtgatgttatctatggatgcttttatttttttgagcatcgtcgcggtggtctttgactgctgccccgatgactcggcgagtttgcggatttcatctgctacaaccgcaaaacccttgccagcttctcccgcatgtgccgcctcaatcgcggcattcatcgcaagcaaattggtctggcttgcgatagtgttcattaacgagtttatttccaaaagcccctcggaatcatgggctatttcccgtatctcctgggcaaccaactggagtcctgttttgccattctcagacgcttcggttaatgagccgacgtttttgctgttttccgccgagtgtctgggttactga

SEQ ID NO: 47378 - protein, 201 aa, Unknown
  Obtained from environmental sample
  misc_feature (1)..(201): Xaa is any amino acid
MPPTAFSLVLMNLSVSLTRVLPDSAMSRDPFLTDAVMSLRRLMESSICFPPVSCSSIALRIFCSCSETVFTPESMAPKRASTSSEDWVMLSMDAFIFLSIVAVVFDCCPDDSASLRISSATTAKPLPASPACAASIAAFIASKLVWLAIVFINEFISKSPSESWAISRISWATNWSPVLPFSDASVNEPTFLLFSAECLGY

SEQ ID NO: 47379 - DNA, 1035 bp, Unknown
  Obtained from environmental sample
  misc_feature (1)..(1035): n is a, c, g, or t
ttggttgcccaggagatacgggaaatagcccatgattccgaggggcttttggaaataaactcgttaatgaacactatcgcaagccagaccaatttgcttgcgatgaatgccgcgattgaggcggcacatgcgggagaagctggcaagggttttgcggttgtagcagatgaaatccgcaaactcgccgagtcatcggggcagcagtcaaagaccaccgcgacgatgctcaaaaaaataaaagcatccatagataacatcacccaatcttccgatgaggtgctggctcgttttggcgccattgactcaggtgtgaaaacagtttcagagcatgagcaaaatattcttaacgcgatggaagaacaggaaacaggcggaaaacaaatactggactccataagccgccttagggacataacagcatcggtcaaaaagggatctcttgacatggcagaatcgggcaagaccctggtcaaggaaacggacaaattcataagtacaagtgaaaaagcggtagggggcatgaacgaaatactgaagggcgttaatcaaataaatgtttcggtgagccatgtgaacgatatgagtcaggaaaacaatcgtaacttcgaatccttaaagcaggaaacagaaaaattcaatattactgtcggcaacgagaagcaaaagctcctcgtagtggatgacgacgctatctttctaaacatggtggaanaaacattagagaatgattttgatgtaattaccgctaaatcgggtaaagaagctctgggtttgttctatcagggtttggttccgcaattaatattattggacttgataatgcccggaatagacggatggaatacttatgacagaataaaagcgatgagcggcttgcacgataccccaatagcgttcttcacggcttcaaacgatcagaaagacaaacaacacgcgcgggaaatgggcgcggttgattatttcaagaaaccttatgataaagacgatttattacgcagagtcgcaaaagctctgaataaaggagaaatgaaatga

SEQ ID NO: 47380 - protein, 344 aa, Unknown
  Obtained from environmental sample
  DOMAIN (2)...(166): Methyl-accepting chemotaxis protein (MCP) signaling domain
  misc_feature (1)..(344): Xaa is any amino acid
MVAQEIREIAHDSEGLLEINSLMNTIASQTNLLAMNAAIEAAHAGEAGKGFAVVADEIRKLAESSGQQSKTTATMLKKIKASIDNITQSSDEVLARFGAIDSGVKTVSEHEQNILNAMEEQETGGKQILDSISRLRDITASVKKGSLDMAESGKTLVKETDKFISTSEKAVGGMNEILKGVNQINVSVSHVNDMSQENNRNFESLKQETEKFNITVGNEKQKLLVVDDDAIFLNMVEXTLENDFDVITAKSGKEALGLFYQGLVPQLILLDLIMPGIDGWNTYDRIKAMSGLHDTPIAFFTASNDQKDKQHAREMGAVDYFKKPYDKDDLLRRVAKALNKGEMK

SEQ ID NO: 47381 - DNA, 357 bp, Unknown
  Obtained from environmental sample
  misc_feature (1)..(357): n is a, c, g, or t
gtggatattaaccgcgaaattgtaataggtttgcttgaaccgacacagttggagatagactgcgcggaaaacggtgtagaagcggtacgtatgtttaccgaagctccggataaatacgacttgattttcatggatatacaaatgccggaaatggacggctatgaagcgacacagcgtatcagggctttggatgttccgagggcaaaaaccgtcccgattgtggcaatgacagcgaatgtatttcgcgaggatgttgaaaaatgcctcaatgcaggtatggacggacatgtcagtaaaccagttgattttgaggaagtcttgaaccgcctttactcatatttgggagtaaggaaatga

SEQ ID NO: 47382 - protein, 118 aa, Unknown
  Obtained from environmental sample
  DOMAIN (2)...(111): Response regulator receiver domain
  misc_feature (1)..(118): Xaa is any amino acid
MDINREIVIGLLEPTQLEIDCAENGVEAVRMFTEAPDKYDLIFMDIQMPEMDGYEATQRIRALDVPRAKTVPIVAMTANVFREDVEKCLNAGMDGHVSKPVDFEEVLNRLYSYLGVRK

SEQ ID NO: 47383 - DNA, 1806 bp, Unknown
  Obtained from environmental sample
  misc_feature (1)..(1806): n is a, c, g, or t
atggcctttgtccagttttctaaagtttccctggcgtttggcgaccgtgatattctgaaagacgtcagcctgcatttggcggcgggttcgcgggcgtgccttgccggagcgaacggatcggggaagtccacgctgatgaaggtgcttgcgggggagctgctccccgattccggcgacagggcggtacagcgtggcacgcggatttcctacctgccccagtcggggattgtgcaccggggaaaaagcctgagggacgaggcggaaacggcgtttgcgcacattcatgaattaatcgataaggcggaaaaaatcgccgccgcgctgcaggacgccaaaagcgacgacgcttcgtcaaaagcccttctggaagaccatcaccggctgcaggaacagattgaaaattccgggtactacagccgaagcgcggagatctcttccgtgctggcgggttttggtttttcacctaacgatctggacagggacacgggcgaattttccggcggctggcagatgaggatagctctggcgaaggccctgcttgagcggcctgacattctgcttcttgacgagccgaccaactatctggacatagaggcccgcggctggcttgaaaactggctggcgaaattccccggcggctgtctgctggtttcgcatgaccgctactttcttgacgttaccgtcaacgaggtatacgagatttttcagggcaatcttaaacgttacgcgggcaactacagcgcctacgaaaaaacgcgtcagcaggagcttgccgggctaatgaaacgctacacggaacagcaggaggaaatcgccaaaaccgaggctttgatccgccgtttccgttacaaggcgagcaaggcggctttcgcgcaggagcttatcaaacggctggaaaagatggagcgcattgaaatcccggaaaacctgaaaaggataaatataacttttccgccgccgccccattcgccgcgggtggcgtttactgttgaagggcttggcaagagctacggcgcgaagagggtgcttgatggcctggatctgtccattgattcaggcgagaggctggtggttgccgggccaaacggggcaggcaaaacgacactgctaagaatacttgcgggcaatgacaatgattttgaaggctctgttaaatttggatcaggtgtttgcgccggttatttttcgcaggacgccgccgaggcgctgaacggaagcgaacaggtgatcgaattcatggaagccaatgcccccatgcaactcatccccaaaatacgggatatgcttggggcgtttctctttcgcggcgatgatgtatacaagcctgtctcggtgctttccggcggggagaaaagccgcctcgccctgctgtacatgctccttaagcccctgaacctcctgattttagacgagcctaccaaccaccttgacctccattcaaaggacgtgctgctggaaaccctcaatcaattcaaggggacgattattttcgtttcgcacgatcgcgccttcatggaagccctgtccaccaagacactggaactttctcccggtgagggcgcttcgtcgtcccgcgcgcggcttttttacgggaactacgggtactacctggaaaagacaatgagcgggtttttaggtgatctgtcaccgtctggtggcgatagggagcaaaaaatagcggttgtaagtgacagtcacctaaaaacctgcgcgatggaacagagggcgcagaacaagcagcgtcagacggagatacggaggctccagcggcaggaagccgagctgctaacgccattgaggggctga

SEQ ID NO: 47384 - protein, 601 aa, Unknown
  Obtained from environmental sample
  DOMAIN (353)...(518): ABC transporter
  misc_feature (1)..(601): Xaa is any amino acid
MAFVQFSKVSLAFGDRDILKDVSLHLAAGSRACLAGANGSGKSTLMKVLAGELLPDSGDRAVQRGTRISYLPQSGIVHRGKSLRDEAETAFAHIHELIDKAEKIAAALQDAKSDDASSKALLEDHHRLQEQIENSGYYSRSAEISSVLAGFGFSPNDLDRDTGEFSGGWQMRIALAKALLERPDILLLDEPTNYLDIEARGWLENWLAKFPGGCLLVSHDRYFLDVTVNEVYEIFQGNLKRYAGNYSAYEKTRQQELAGLMKRYTEQQEEIAKTEALIRRFRYKASKAAFAQELIKRLEKMERIEIPENLKRINITFPPPPHSPRVAFTVEGLGKSYGAKRVLDGLDLSIDSGERLVVAGPNGAGKTTLLRILAGNDNDFEGSVKFGSGVCAGYFSQDAAEALNGSEQVIEFMEANAPMQLIPKIRDMLGAFLFRGDDVYKPVSVLSGGEKSRLALLYMLLKPLNLLILDEPTNHLDLHSKDVLLETLNQFKGTIIFVSHDRAFMEALSTKTLELSPGEGASSSRARLFYGNYGYYLEKTMSGFLGDLSPSGGDREQKIAVVSDSHLKTCAMEQRAQNKQRQTEIRRLQRQEAELLTPLRG

SEQ ID NO: 47385 - DNA, 1035 bp, Unknown
  Obtained from environmental sample
  misc_feature (1)..(1035): n is a, c, g, or t
atgtttacgcgttttcatttcgtgccgcttagggcggttgtgctttttttcctcacaagtttatgcgggtatgcgacgcctgttgtctcattggaaaccggaggcagttacgagtctgcatggaaaggcaagggagggtatttccccaggatttactttacggaagtaattgaggcggccagaaaggccgaggacgcgagtccgtactgggcgaatacgcaggcggaacaggaagccatagaccgcattaccaccgattacacctccctgattctgaataatgacatactcgcgttttacggccacccccgttccacggttatgggcattcttggccgtttcccgatagaagaacttgataaaaaactcaccgctcttgccaatgattacaaagccgcaagcggcggcagaaatattataaaagcgttttatatcatttatggcacagtatggcccgagggcgagattggcgttatcaactcggaacttcttaccaactggattgaatacgcccgtaagcgggatatgcttgtttttatcgatcaccagattggccgttacgatcctgtcgcttcactcaggcggatgctgccatggcttaaatatcccaatgtccacctggcccttgaccccgaatggcgcacattaaaacctatggtagaaatagggactatcaccgcggaagagattaacaccgcccagcaggttatggaagaatacatgataaaaaacaacattcccggcgagcgtatgcttgtaatacaccaattcaattataaaatgatagaaaaccgaagagcggtaaaagccaatttcaacaaggtgcgtcttgtccactgcgccgacggcttcggaggcccgggaacgaagcgcgacacttacgcctttaacgcgcttgcgagcaacatgccggttaaagggtttaaattgttttataattttaatattcccggcgcgggatacgacgaccctattatgacgccgaaacaggtttatgaattaaatccgcggccttatttgattatgtatcagtag

SEQ ID NO: 47386 - protein, 344 aa, Unknown
  Obtained from environmental sample
  SIGNAL (1)...(25)
  misc_feature (1)..(344): Xaa is any amino acid
MFTRFHFVPLRAVVLFFLTSLCGYATPVVSLETGGSYESAWKGKGGYFPRIYFTEVIEAARKAEDASPYWANTQAEQEAIDRITTDYTSLILNNDILAFYGHPRSTVMGILGRFPIEELDKKLTALANDYKAASGGRNIIKAFYIIYGTVWPEGEIGVINSELLTNWIEYARKRDMLVFIDHQIGRYDPVASLRRMLPWLKYPNVHLALDPEWRTLKPMVEIGTITAEEINTAQQVMEEYMIKNNIPGERMLVIHQFNYKMIENRRAVKANFNKVRLVHCADGFGGPGTKRDTYAFNALASNMPVKGFKLFYNFNIPGAGYDDPIMTPKQVYELNPRPYLIMYQ

SEQ ID NO: 47387 - DNA, 564 bp, Unknown
  Obtained from environmental sample
  misc_feature (1)..(564): n is a, c, g, or t
atgcgaaacgagagtagaccggttgacggcatagttattgattttttatttgccgtacgccccatgtcactggaactctgcgaaggagacctcaacgcgctgattaccgggcttggcgaatttatacgggcagaactggagcagtccaatatacggctcctgattgagctggatgacaagcttccccccgtgcttttcgacgagcgttatatgaaacaggttttacttaatctgataaagaacgcgcaggccgccatgccaaagggggggctcttgaccattgccacgctgggaagggacagcgagatacggataagtgtatgcgacacgggcacggggattagccgggagaaccttaaaaaaatatttgaaccttattttacgacaaaaagcagcggcacgggtcttgggctgacccttgtatataaaattataagggagcatcagggcgaaatgtcggttgattcgagggaaggggaggggacggatttcgagatcatcctccccgtctatcagaaaaaacagaatctgatcaattattcaggggcaaaaaatgaaatttaa

SEQ ID NO: 47388 - protein, 187 aa, Unknown
  Obtained from environmental sample
  DOMAIN (66)...(171): Histidine kinase-, DNA gyrase B-, and HSP90-like ATPase
  misc_feature (1)..(187): Xaa is any amino acid
MRNESRPVDGIVIDFLFAVRPMSLELCEGDLNALITGLGEFIRAELEQSNIRLLIELDDKLPPVLFDERYMKQVLLNLIKNAQAAMPKGGLLTIATLGRDSEIRISVCDTGTGISRENLKKIFEPYFTTKSSGTGLGLTLVYKIIREHQGEMSVDSREGEGTDFEIILPVYQKKQNLINYSGAKNEI

SEQ ID NO: 47389 - DNA, 465 bp, Unknown
  Obtained from environmental sample
  misc_feature (1)..(465): n is a, c, g, or t
atgaaatttaaactccttgttgttgatgatgaaaaaaacatccgggaggggcttgccgcttctcttgaaatggacggctacagcgccgtctgcgccgcaagcggcgacgaagcgtgggatctctattgcaagggcgacatagaccttgtcatcaccgacctgcgtatgcccggcatggacggcgaagaacttatgcgccgcatactggcgggaaactcccggcctgccggttatcatactcaccgggcacggaaccatagaaaacgcagtcagcgcaatgcacgacggggcatgggattttcttaccaagcctgtcaatttggatcacctcggaatgctggtaaagcgggctctggaaaacagggaactcgtgctgcgtcaccgggaactgcaagccgatctggagcggagccgtctctcatccagcatgatcggcaagtcatccgttatgcgaaaagtctttga

SEQ ID NO: 47390 - protein, 154 aa, Unknown
  Obtained from environmental sample
  DOMAIN (3)...(100): Response regulator receiver domain
  misc_feature (1)..(154): Xaa is any amino acid
MKFKLLVVDDEKNIREGLAASLEMDGYSAVCAASGDEAWDLYCKGDIDLVITDLRMPGMDGEELMRRILAGNSRPAGYHTHRARNHRKRSQRNARRGMGFSYQACQFGSPRNAGKAGSGKQGTRAASPGTASRSGAEPSLIQHDRQVIRYAKSL

SEQ ID NO: 47391 - DNA, 492 bp, Unknown
  Obtained from environmental sample
  misc_feature (1)..(492): n is a, c, g, or t
atggatgctcacaacattaaggcggaaataaaggtcttcgcggaaattgcctttttctatttcggctttgaggtctttgttggtcgcggcgacaatgcggacatcggtttcaagggtttcttccccgccgacgcgctcaaactggcgttcctgcaaaacacgcagaagttttatctgaatattctggtctatctcgcctatctcgtcgagaaaaagcgtccccccgttcgcaagctcaaaacgcccccgccgcctggaaaccgcgccggtgaacgcccctttttcatggccaaacaactcgctttccaaaaggttcgccgcaagcgcggcgcagtgcactttaaccagaggcttgcccttgcggggagaaagctcgtggattgcatcggcgacaagttctttgccgacgccggattcccccgtgatcagaaccgaggctttggtaggcgcgacgcggtttatcgtgtcaaagacttttcgcataacggatga

SEQ ID NO: 47392 - protein, 163 aa, Unknown
  Obtained from environmental sample
  misc_feature (1)..(163): Xaa is any amino acid
MDAHNIKAEIKVFAEIAFFYFGFEVFVGRGDNADIGFKGFFPADALKLAFLQNTQKFYLNILVYLAYLVEKKRPPVRKLKTPPPPGNRAGERPFFMAKQLAFQKVRRKRGAVHFNQRLALAGRKLVDCIGDKFFADAGFPRDQNRGFGRRDAVYRVKDFSHNG

SEQ ID NO: 47393 - DNA, 648 bp, Unknown
  Obtained from environmental sample
  misc_feature (1)..(648): n is a, c, g, or t
gtgatgcatgtcggaattataatggacgggaacggccgctgggcgcagcaacgcggtcttgcccgtacccagggacaccttgagggattacaggcggcaaaacgtattgttaaggccgccagcgacaggggaatacagtaccttaccctgtacgcgttttcaacggagaactggaaacgcgccgccgaggaaacagggtttatcatgggcctggtaaaacagtatctgcgcagcgagatgaatttttaccgggataaccgtatacgggtgcgctatgccggcgatccggcgggtctgccgcctgatattgcggcggaaattgccgcggcgatggcggacaccagggaatttgacggtatgcaggtgattgtcgccctgaattacggcggcagggatgagttagtgcgggcggtaagacggcttgccgcccaaaagtttaccgaatgtcaggatatggcggctgtaaccgaaaaggacattgccgcctgccctggacatcccgatgtgcccgatcccgatctgatcatccgcagcgcgggcgagtaccggctcagcaattttttgctgtgggaaggggcttacgcggaactgtatgtttcggcaagttttggcctgactgacccggtgatgatcttgccgaggcgttag

SEQ ID NO: 47394 - protein, 215 aa, Unknown
  Obtained from environmental sample
  DOMAIN (7)...(215): Putative undecaprenyl diphosphate synthase
  misc_feature (1)..(215): Xaa is any amino acid
MMHVGIIMDGNGRWAQQRGLARTQGHLEGLQAAKRIVKAASDRGIQYLTLYAFSTENWKRAAEETGFIMGLVKQYLRSEMNFYRDNRIRVRYAGDPAGLPPDIAAEIAAAMADTREFDGMQVIVALNYGGRDELVRAVRRLAAQKFTECQDMAAVTEKDIAACPGHPDVPDPDLIIRSAGEYRLSNFLLWEGAYAELYVSASFGLTDPVMILPRR

SEQ ID NO: 47395 - DNA, 387 bp, Unknown
  Obtained from environmental sample
  misc_feature (1)..(387): n is a, c, g, or t
ttggtttatggcgaggccggctcattgtattcagccctgggacaaagccttatgggtgaaattgaaaaggcgatccggtcttcggaattgtcgctgaacccctccaatgacgggaaagttatccgcatcgccattcctccccttaccgaagaacggcgcaaagagctggtaaagcttgccaaaaatcaggcggaacagtttcgcgtaacgatacgcaacctgcgccgcgacgggatcgatgaacttaaaaagatgctgaaagacgcttctattaccgaagacgacgagagcaaaggctccgccgatttgcaaaaactcaccgacagttatatagacaaggtgaatcatgttcttgaggaaaaagaaaaagaaattatggaagtgtga

SEQ ID NO: 47396 - protein, 128 aa, Unknown
  Obtained from environmental sample
  DOMAIN (2)...(126): Ribosome recycling factor
  misc_feature (1)..(128): Xaa is any amino acid
MVYGEAGSLYSALGQSLMGEIEKAIRSSELSLNPSNDGKVIRIAIPPLTEERRKELVKLAKNQAEQFRVTIRNLRRDGIDELKKMLKDASITEDDESKGSADLQKLTDSYIDKVNHVLEEKEKEIMEV

SEQ ID NO: 47397 - DNA, 306 bp, Unknown
  Obtained from environmental sample
  misc_feature (1)..(306): n is a, c, g, or t
atgacaataataaatgaaggacttgcggaattgattaagaggggaggcctttatcagggtttacggggaactaacccaaaagaagttctggaggcctttataggagccttgtctcctatcccttcggttaagccggatgaattgctgacggcattgttagagagggaagccttaatgtcaaccggcgttggcggcggcatcgctcttcctcacccaaggaaccctcttgtgatgaaagacagcgaacaatttgtggcgctggcttttttggaaactgccggtggactggaattctctggacggtga

SEQ ID NO: 47398 - protein, 101 aa, Unknown
  Obtained from environmental sample
  misc_feature (1)..(101): Xaa is any amino acid
MTIINEGLAELIKRGGLYQGLRGTNPKEVLEAFIGALSPIPSVKPDELLTALLEREALMSTGVGGGIALPHPRNPLVMKDSEQFVALAFLETAGGLEFSGR

SEQ ID NO: 47399 - DNA, 690 bp, Unknown
  Obtained from environmental sample
  misc_feature (1)..(690): n is a, c, g, or t
atgcacacggcaggcgtaatggaagaccttgcttcaagtgatactccatccgaggcagagcttgaagccctggacaattcccttgacagcatgattgaaacttatgaggaggttaaggagcttatcgaagaagctttggaaagcttcaggcgcaacagaattgcggtgatacactcggggagcgaagtgataaccgagaggcttcttcagttgagtattggcggtacggatacatggcggcgcattattgtccctgaatactgcgcccttggggagctccacaggatcatccaggctgtttttggctggagcgatgcggaagcatacatgttcaacgccgaaaaccggcttgatccaaaaaccacaataaaagagctggaagaggcaaacattgttgaactgctctatgaatatggaacaaaatggaacgtaagggttatcattctttccaggcaggacacgcccggcccaaaacccgtgcgctgtgtagcgggtgcgggggccgctcctccggaattcatcccaggccctgtaaaatacagacggctcctttacgcgcttgaaagcgggaacgacgcggagcgccatggcgcaagacaggaagtaggaccggattttgttccgggggaatttgatttggatgcctgtaacaagcttcttgcttcgattattttattaaaaggcaattaa

SEQ ID NO: 47400 - protein, 229 aa, Unknown
  Obtained from environmental sample
  DOMAIN (65)...(217): Plasmid pRiA4b ORF-3-like protein
  misc_feature (1)..(229): Xaa is any amino acid
MHTAGVMEDLASSDTPSEAELEALDNSLDSMIETYEEVKELIEEALESFRRNRIAVIHSGSEVITERLLQLSIGGTDTWRRIIVPEYCALGELHRIIQAVFGWSDAEAYMFNAENRLDPKTTIKELEEANIVELLYEYGTKWNVRVIILSRQDTPGPKPVRCVAGAGAAPPEFIPGPVKYRRLLYALESGNDAERHGARQEVGPDFVPGEFDLDACNKLLASIILLKGN

SEQ ID NO: 47401 - DNA, 762 bp, Unknown
  Obtained from environmental sample
  misc_feature (1)..(762): n is a, c, g, or t
atggaggccgccgccgccagagggctcgcggctatctccataaccgaccacgactgcacgggcgcgtacccgcaggcgttggacatgggcactgctatgggcgtcgaggtcattccaggggtcgagctctccagcgagatccaggggatcgatatccatattctcgggtactatgtagacttcaataacgccgcgtttatagccaaacttcaagagatgaaggaggctcgttatttgcgcgctcaaaaaatagtctcgaacctgaacaaacagggcatagacctgcgtttcgacaccgttctgagcatcgccggggagggttccataggccgcccccacatagccaccgccatgctcaaagaggagttcgtcttctctttccgcgaggcattcgacaagttcatagggtacgactccccggcctacgtagagaagctccagatgtcgcccaaggaggtcttcgacctcataaagagcgcgggcggcgtgccggtgctggcgcatccgggggtgactaaggtggacgagcgcatccaggagttcatccgcgacgggttgcagggcatcgaggtcagccacgccgagcacccggacgccgcaatcaggcactaccttaaaatatgcaaaaaaaacggcctcgctttcaccgggggctccgatttccacagcagcggcaggagtaagttcgaacttggcttcccgccggttcagtacgccgccgtcgaaagcctaaaggaaaagctatgcaaacggtcccggtga

SEQ ID NO: 47402 - protein, 253 aa, Unknown
  Obtained from environmental sample
  DOMAIN (1)...(225): PHP domain
  misc_feature (1)..(253): Xaa is any amino acid
MEAAAARGLAAISITDHDCTGAYPQALDMGTAMGVEVIPGVELSSEIQGIDIHILGYYVDFNNAAFIAKLQEMKEARYLRAQKIVSNLNKQGIDLRFDTVLSIAGEGSIGRPHIATAMLKEEFVFSFREAFDKFIGYDSPAYVEKLQMSPKEVFDLIKSAGGVPVLAHPGVTKVDERIQEFIRDGLQGIEVSHAEHPDAAIRHYLKICKKNGLAFTGGSDFHSSGRSKFELGFPPVQYAAVESLKEKLCKRSR

SEQ ID NO: 47403 - DNA, 558 bp, Unknown
  Obtained from environmental sample
  misc_feature (1)..(558): n is a, c, g, or t
gtggagaagccgaacgccggcgacgcggccgttttcatggaatcaggcgggttcctctggaacagcgggatgttcgtgtggaaggcctccgccattttagaggcgttcaaaaaatatatgcccgatctgcacggccaggccttagccgccgcggacaaaggcttcacggcggaggcgataagcgagttctattccgtatgccccaaggagtcgatagactacgggatcatggaaagagcggagggcgtcagcgccgtctgcggcgagttctcgtgggacgatcttgggtcgtgggaggccctgagccgcctgctggggagcgacggcgcggggacgacggtaggcggggcggcggcgtaccatagcggctgcgccggttcgctgataatcaacaagtcgtcgggcggcctcgctttggccgcgataggtttgaaagacgtggccttaatagccgtggacgacgccgttttggcgatagaccgctcgcgtctgccggatttaaaaaaatatctggcggatatcaaaaacagcgggaagtttccggccgatctgttttaa

SEQ ID NO: 47404 - protein, 185 aa, Unknown
  Obtained from environmental sample
  misc_feature (1)..(185): Xaa is any amino acid
MEKPNAGDAAVFMESGGFLWNSGMFVWKASAILEAFKKYMPDLHGQALAAADKGFTAEAISEFYSVCPKESIDYGIMERAEGVSAVCGEFSWDDLGSWEALSRLLGSDGAGTTVGGAAAYHSGCAGSLIINKSSGGLALAAIGLKDVALIAVDDAVLAIDRSRLPDLKKYLADIKNSGKFPADLF

SEQ ID NO: 47405 - DNA, 1803 bp, Unknown
  Obtained from environmental sample
  misc_feature (1)..(1803): n is a, c, g, or t
atgacctggggtagggataccggtacggttgaagtaaagcctaacctcgtccttaatgaagttaatgaatggatgaacggtcccaacgcgctcaagacccgagtcgaaaatcccacgccttttcagaatcacggagaagacacttttattatcagaataggggttcccataaccagaggcacaaccaacgaagtagtcggacacttatgtgttcttgtggacatcacgccgatacaggccggaatagaaaaaacccttaatgattacgaagaaatatcccagatgtctatttactcaggcaacggatgtattatgggaaacctaaatgctgaccgggtaggaaagatgctgctcgaagtggaaagattatacggcgttcatcagaaagacgcctatcaggctgttctggacggcaaaccatttagctgctcaagctattcgtccgtgttgaaatcaaacatgaaaattgaaatagtgtcttttcagataggcaattcaaacagcacctggagcgtaatgcttggatcgacggaatcctatattttgcaagatgtcagcaatattaccaaatttaccattatcctcgcgatagcggctattataatcgccgtggtaattgtgtacctcgcgctcaacagcacgacaaaaccaatcgtcaaagtggcggacacgctcaaggatatttccgaaggcgaaggcgacctgactcgaagcattgccgtcagttccaaagatgaaataggcgaccttgccctgtacttcaacaaaacagttgataaaatcaaaaatatggttgttactatcaagaaagaggcggtggatctccaaaacatcgggagcgacctttccagcaacatgaccgaaaccgcctcggcgatcaacgaaatcaccgccaacatccggagcatcaagggccgtgttattaaccagagcgccagcgttacccaaaccaacgcgaccatggaacaggttatcgccaacatcaacaaactcaacggccatgtggaaaatcaggctgacacaatatcaaaacggtccgccttcattcaggcaatggtaaataacatcaattcggtaaatcagactctgcgcatgaatctggagaatgtgcaaaccctcaaagaagcctctgaaataggccgcaacggattgcaggaagtggccaccgacatccaggagatagcccgcgagtccgagggcctgctggagataaacgccgtaatggaaaacatagccagccagaccaacctgctttcaatgaacgcggcgattgaagcggcgcacgccggagaggcgggcaaaggtttcgcggtagtcgccgatgaaatccgcaaactggcggaaagctccagcgaacagtcaaagaccatcggtacggtactgaaaaaaatcgcggaatcaatcaaaaaaattacagtctccaccgacaatgtgctgaaaagattcgaggcgattgacaccggcgtgaagacggtggcggaccaggaagaaaacatccgcaacgcgatggaggagcagggcgaggggagcaagcaggtgcttaaaagcgccggtgagttgaacgatcttacccggcaggtaaagagcggttcggaagagatgcttgaaggcagcaaggaagtaatgaatgagagccggaaccttgaaagggtaacgcaggagataaccggcggcatgaacgagatggcgtcgggcgcggatcaggttaacgtggcggtacacagggttaacgaaataagcgtcaagaaccgcgaaagcattgagaacctgataaaggaagtcgcaaggtttaaggttgaataa

SEQ ID NO: 47406 - protein, 600 aa, Unknown
  Obtained from environmental sample
  DOMAIN (336)...(556): Methyl-accepting chemotaxis protein (MCP) signaling domain
  misc_feature (1)..(600): Xaa is any amino acid
MTWGRDTGTVEVKPNLVLNEVNEWMNGPNALKTRVENPTPFQNHGEDTFIIRIGVPITRGTTNEVVGHLCVLVDITPIQAGIEKTLNDYEEISQMSIYSGNGCIMGNLNADRVGKMLLEVERLYGVHQKDAYQAVLDGKPFSCSSYSSVLKSNMKIEIVSFQIGNSNSTWSVMLGSTESYILQDVSNITKFTIILAIAAIIIAVVIVYLALNSTTKPIVKVADTLKDISEGEGDLTRSIAVSSKDEIGDLALYFNKTVDKIKNMVVTIKKEAVDLQNIGSDLSSNMTETASAINEITANIRSIKGRVINQSASVTQTNATMEQVIANINKLNGHVENQADTISKRSAFIQAMVNNINSVNQTLRMNLENVQTLKEASEIGRNGLQEVATDIQEIARESEGLLEINAVMENIASQTNLLSMNAAIEAAHAGEAGKGFAVVADEIRKLAESSSEQSKTIGTVLKKIAESIKKITVSTDNVLKRFEAIDTGVKTVADQEENIRNAMEEQGEGSKQVLKSAGELNDLTRQVKSGSEEMLEGSKEVMNESRNLERVTQEITGGMNEMASGADQVNVAVHRVNEISVKNRESIENLIKEVARFKVE

SEQ ID NO: 47407 - DNA, 597 bp, Unknown
  Obtained from environmental sample
  misc_feature (1)..(597): n is a, c, g, or t
atgccgccggttatctcctgcgttaccctttcaaggttccggctctcattcattacttccttgctgccttcaagcatctcttccgaaccgctctttacctgccgggtaagatcgttcaactcaccggcgcttttaagcacctgcttgctcccctcgccctgctcctccatcgcgttgcggatgttttcttcctggtccgccaccgtcttcacgccggtgtcaatcgcctcgaatcttttcagcacattgtcggtggagactgtaatttttttgattgattccgcgatttttttcagtaccgtaccgatggtctttgactgttcgctggagctttccgccagtttgcggatttcatcggcgactaccgcgaaacctttgcccgcctctccggcgtgcgccgcttcaatcgccgcgttcattgaaagcaggttggtctggctggctatgttttccattacggcgtttatctccagcaggccctcggactcgcgggctatctcctggatgtcggtggccacttcctgcaatccgttgcggcctatttcagaggcttctttgagggtttgcacattctccagattcatgcgcagagtctga

SEQ ID NO: 47408 - protein, 198 aa, Unknown
  Obtained from environmental sample
  misc_feature (1)..(198): Xaa is any amino acid
MPPVISCVTLSRFRLSFITSLLPSSISSEPLFTCRVRSFNSPALLSTCLLPSPCSSIALRMFSSWSATVFTPVSIASNLFSTLSVETVIFLIDSAIFFSTVPMVFDCSLELSASLRISSATTAKPLPASPACAASIAAFIESRLVWLAMFSITAFISSRPSDSRAISWMSVATSCNPLRPISEASLRVCTFSRFMRRV

SEQ ID NO: 47409 - DNA, 570 bp, Unknown
  Obtained from environmental sample
  misc_feature (1)..(570): n is a, c, g, or t
atgggacaagatagcatcgggttaatgaaagaagcggcggcaaaagccgctgtagaccaaacagtaaaaagcggcatgaagctcggcttagggacgggttctaccgccattcacgcggttcgcagagtaggagaacttttatcgcaggggacgttacgggacatttgcgccttcgctacaagttttcaaacggaaattgaatgtgaaaaactgcggattcctttttttacgttaaattcgcgcgagttttcgtccggattggatttaacgattgacggagccgacgaagtagacccgcaaaaccgtcttattaaaggaggcggatgcgcgcatttaatcgagaaattagccgcttatgcttccgcggaatttgtgataactgtggacgaatctaaactgacggaacaactaggagtcggttttccagttcccgtggaggttgtccccgaagcgagatcgcaggctgcaaagagccttgaaaaattaggcgcaaatgtcatgattagggaagcggtgagaaaagccggacctataatcaccgaacacggaaataaattctggtctccataa

SEQ ID NO: 47410 - protein, 189 aa, Unknown
  Obtained from environmental sample
  DOMAIN (55)...(189): Ribose 5-phosphate isomerase A (phosphoriboisomerase A)
  misc_feature (1)..(189): Xaa is any amino acid
MGQDSIGLMKEAAAKAAVDQTVKSGMKLGLGTGSTAIHAVRRVGELLSQGTLRDICAFATSFQTEIECEKLRIPFFTLNSREFSSGLDLTIDGADEVDPQNRLIKGGGCAHLIEKLAAYASAEFVITVDESKLTEQLGVGFPVPVEVVPEARSQAAKSLEKLGANVMIREAVRKAGPIITEHGNKFWSP

SEQ ID NO: 47411 - DNA, 351 bp, Unknown
  Obtained from environmental sample
  misc_feature (1)..(351): n is a, c, g, or t
ttgtggggaggattagataatcagggcgtagaacttatgtccaaatacaatgacgtaataattcaaactacttccgccggcatggaagggcatgatgaatcagacccgattgagctttacaattttactgggaaagaagcggtaatggatttgatttacgctcctcctcaaacgccgtttttaaaaagagcggcggcggcaggatgcaggacgcttaacggttacgatatggtaatacgccaagcctgccttcaatatgtaaatttctttggaagagaaataccaaaaaaacatttaacacacatagactcattaggaggaaacaaatgggacaagatagcatcgggttaa

SEQ ID NO: 47412 - protein, 116 aa, Unknown
  Obtained from environmental sample
  misc_feature (1)..(116): Xaa is any amino acid
MWGGLDNQGVELMSKYNDVIIQTTSAGMEGHDESDPIELYNFTGKEAVMDLIYAPPQTPFLKRAAAAGCRTLNGYDMVIRQACLQYVNFFGREIPKKHLTHIDSLGGNKWDKIASG

SEQ ID NO: 47413 - DNA, 1500 bp, Unknown
  Obtained from environmental sample
  misc_feature (1)..(1500): n is a, c, g, or t
atgaaaatattgatggtatcaagcgaagctgtcccctgggctaaaaccggcggacttgccgatatggtttcggccctttcgattagtctcgcaaaactcggccacgatgtaagaattgtaattccgcgctactactccatcgacaggggcgcattaacacagcttccaggagccatgggaacgccgatgggcggaggcattgaagaatggagcgctatttattccaccgatatgccgggaacaacaaagaaaaatcctgtaaaggtttactttatcgatcatgaaatatttttcggcagagacggcatttacggaagtcccacggaaacggatttttccgacaattcaagaaggttcatgtttttttgccgcgcggtttttcagctttgccgcaagataaaatggttccccgacgttcttcacgcccatgactggccggcggcagtcgctcccgtatatttaaaatttgcagagaggatcaagggaagcgcgggcggttttgaaaaaacagtttccattcttacaattcataatttaggctatcagggaatttacagtaaggacaattttaattacgcgggtctcggctgggatgttttttacaacggcggttttgaagactggaatatgcttaatatgcttaaagccggtctttacagcgccgataaaatcaacactgtttctcccaactatgccgaagaaacaaagactcaggaaaacggtttcaggctggacggcgttcttcggtacagaaacgccgattattgcggcattcttaacgggatagacacaaatgtctggaacccggcaaaagacaagttaataccgcaaacatactcgattaaagacatggaaggaaaagcgctcgcgaaaaaaacccttcaaaaagaatttgatctgccgcaaaacgccgacgtgccggttatcggcatggttacgcgccttacggatcaaaaaggagtcggcgatttattcgggccaacccacggctgcgcgtggtcaatatgcagggacatggacatacagttggtgcttcttggctccggagagcattggtgcgaaagcgaaatatataaccttacatcccgcctttccaactttaaggcaaaaatcggctataacgaaaaaataagccaccttgtcgaagcgggttcggactttttcctgatgcccagccgctacgaaccgtgcggccttaaccagatgtattcccttatttacggaacccttcccatcgtgcgagcgacgggcggacttgtagacaccgtggaaaatttcaacgaagaaacgggagccggcaccggctttatgttcaattatttaagcccgtcgtcaatttacgacaccgtaggatgggccgtatacgcgtggtataacagaagaaaagacattgaaaaaatgcggaagcgcggaatggcgatggatttttcatgggagctttcggcaaagaaatatatcgggctttacgaagatacccgcaaagcccaaaacatgatttaa

SEQ ID NO: 47414 - protein, 499 aa, Unknown
  Obtained from environmental sample
  DOMAIN (2)...(250): Starch synthase catalytic domain
  misc_feature (1)..(499): Xaa is any amino acid
MKILMVSSEAVPWAKTGGLADMVSALSISLAKLGHDVRIVIPRYYSIDRGALTQLPGAMGTPMGGGIEEWSAIYSTDMPGTTKKNPVKVYFIDHEIFFGRDGIYGSPTETDFSDNSRRFMFFCRAVFQLCRKIKWFPDVLHAHDWPAAVAPVYLKFAERIKGSAGGFEKTVSILTIHNLGYQGIYSKDNFNYAGLGWDVFYNGGFEDWNMLNMLKAGLYSADKINTVSPNYAEETKTQENGFRLDGVLRYRNADYCGILNGIDTNVWNPAKDKLIPQTYSIKDMEGKALAKKTLQKEFDLPQNADVPVIGMVTRLTDQKGVGDLFGPTHGCAWSICRDMDIQLVLLGSGEHWCESEIYNLTSRLSNFKAKIGYNEKISHLVEAGSDFFLMPSRYEPCGLNQMYSLIYGTLPIVRATGGLVDTVENFNEETGAGTGFMFNYLSPSSIYDTVGWAVYAWYNRRKDIEKMRKRGMAMDFSWELSAKKYIGLYEDTRKAQNMI

SEQ ID NO: 47415 - DNA, 360 bp, Unknown
  Obtained from environmental sample
  misc_feature (1)..(360): n is a, c, g, or t
atgtancaagaccctcgcgggcgaaggataaactttagggcgatcagcattgccgatactgcggacttcggaattttacgccttattgtagacaaaaccgataaggcggtcgaaacattgacccaggctggatttaccactcggctgacagatgtcgtagcggtggagatcgaggacgtaccgggaagccttgccaagctgatggaactcttccagctttcgcagatcaacattgagtacctttacgcctcgcttgaaggacaggcgggaaaagccgttgtgattttcaaagtgaaggatcacgaaaagggacagcaaatattaaccgaaaaaggttttaaaatggcggaaaacttttaa

SEQ ID NO: 47416 - protein, 119 aa, Unknown
  Obtained from environmental sample
  misc_feature (1)..(119): Xaa is any amino acid
MXQDPRGRRINFRAISIADTADFGILRLIVDKTDKAVETLTQAGFTTRLTDVVAVEIEDVPGSLAKLMELFQLSQINIEYLYASLEGQAGKAVVIFKVKDHEKGQQILTEKGFKMAENF

SEQ ID NO: 47417 - DNA, 402 bp, Unknown
  Obtained from environmental sample
  misc_feature (1)..(402): n is a, c, g, or t
atggttatcggcggaaaacatttcgggcaatatacttatgagcattggtttgacgatgagtatgagaaaacaaagataacaggcgtttttttaaaacccgaagaggaaaaagactataactccgttgaaaatttaacccgggaagcgttttggaatgtttacaaaccaggatgcgacgagcatttgctgatccataacatgagaaaggcaaaagaatttattaaagaacttgattatgtggcaatttataacgatgagattataggcaatatcgtatacgcaaaaacaaaaattatagatacaaataaagaacatgatgtaataacattcggccctgtcagcgtactacccgcgtatcaaaagaaaggaataggaaaaaaattaattgaacatacaatttaa

SEQ ID NO: 47418 - protein, 133 aa, Unknown
  Obtained from environmental sample
  misc_feature (1)..(133): Xaa is any amino acid
MVIGGKHFGQYTYEHWFDDEYEKTKITGVFLKPEEEKDYNSVENLTREAFWNVYKPGCDEHLLIHNMRKAKEFIKELDYVAIYNDEIIGNIVYAKTKIIDTNKEHDVITFGPVSVLPAYQKKGIGKKLIEHTI

SEQ ID NO: 47419 - DNA, 300 bp, Unknown
  Obtained from environmental sample
  misc_feature (1)..(300): n is a, c, g, or t
atgcgggaacaggaaacgggcggcaggcaaatattggaatccataggccgcctgcgggacataacccgctcggttaaaaacgggtccgatgacatggaggaatcgggcaaaactctggttaaggaaacggatgaattcataaaaataagtcaggaagcggtggaaggcatgaacgaaatattaaagggcgttaataagataagcagttcggtcagccatgtaaatgacatgataatagataacaaccatagctttgacgccttgaaaaaggaaactgaaaaatttaacgataccaactag

SEQ ID NO: 47420 - protein, 99 aa, Unknown
  Obtained from environmental sample
  misc_feature (1)..(99): Xaa is any amino acid
MREQETGGRQILESIGRLRDITRSVKNGSDDMEESGKTLVKETDEFIKISQEAVEGMNEILKGVNKISSSVSHVNDMIIDNNHSFDALKKETEKFNDTN

SEQ ID NO: 47421 - DNA, 393 bp, Unknown
  Obtained from environmental sample
  misc_feature (1)..(393): n is a, c, g, or t
atgatagaagaacagactgaaagtgtagacagatcttcttccgccatcgaggaaatgacagctaacattaattcagtaacaaagacgctggttgataacagcaaaaacgtcagcgctctgaccgaagcgtctgaaaacggcaaaacaggcgttcaaactgtcgcgcaggagatacaggaaatagcccatgattcagaaggattgcaggaaataaactcattaatgaataacattgcggctcagacaaacctgctttctatgaacgccgcaattgaggcggcgcacgccggagaagccggaaagggctttgctgtagtagccgatgaaatccgcaaacttgccgagtcatcaagccaacaatctaaaactaccgcggcaatgctgaaaaaataa

SEQ ID NO: 47422 - protein, 130 aa, Unknown
  Obtained from environmental sample
  DOMAIN (3)...(129): Methyl-accepting chemotaxis protein (MCP) signaling domain
  misc_feature (1)..(130): Xaa is any amino acid
MIEEQTESVDRSSSAIEEMTANINSVTKTLVDNSKNVSALTEASENGKTGVQTVAQEIQEIAHDSEGLQEINSLMNNIAAQTNLLSMNAAIEAAHAGEAGKGFAVVADEIRKLAESSSQQSKTTAAMLKK

SEQ ID NO: 47423 - DNA, 822 bp, Unknown
  Obtained from environmental sample
  misc_feature (1)..(822): n is a, c, g, or t
atgaacaggattgtcagcgacacgggagtcgatgcgaagttctatgtcaacaacgcctatacaacagccgttctttttgaggagccgtcgtcttttttgccgtttgccttgccgctgatactgatttttatttgtggctaccttttagtttataacatctaccatatttccgtcgtaaacgatgtgaaagcatacggattattaaaaacagtaggcacgacaggcaaccagcttaagaggattatttttatttcaacgaatatactatattttatcgcgcttcccgttggtttgctgcttggctatgcgattggatacctggcgttaactccgcttcttttgccgctgtccggtattgacgtagtaatgaaaacaagtccgttcccgtatatattcgccgccgtttttgtttatgtcacaatgataatcagtatcaggaagcctcaaaagatcgcagggagcgtcgcgcctgttgtcgccgtgcgctatacctcgccgtcagccgcgccgctgttgtcaaaacacaaagcgggaaaatcaaatataaggaatttagcatggcgcagtttactgcgaaacaaggggagaaccgcgttttccatattatcggttacattcagtataattatttttgcggttttatttaatattttttcaaacatcagctttgacgcgtttgtaaacaaatacttcggcggggattttaccgttaattatatatatccggaacagctattcccggataatgattcccggataaccgaaacgctcatagacagcgtcaggtcaataacnggcctcggccaatctgatcattgttaa

SEQ ID NO: 47424 - protein, 273 aa, Unknown
  Obtained from environmental sample
  DOMAIN (7)...(157): Predicted permease
  misc_feature (1)..(273): Xaa is any amino acid
MNRIVSDTGVDAKFYVNNAYTTAVLFEEPSSFLPFALPLILIFICGYLLVYNIYHISVVNDVKAYGLLKTVGTTGNQLKRIIFISTNILYFIALPVGLLLGYAIGYLALTPLLLPLSGIDVVMKTSPFPYIFAAVFVYVTMIISIRKPQKIAGSVAPVVAVRYTSPSAAPLLSKHKAGKSNIRNLAWRSLLRNKGRTAFSILSVTFSIIIFAVLFNIFSNISFDAFVNKYFGGDFTVNYIYPEQLFPDNDSRITETLIDSVRSITGLGQSDHC

SEQ ID NO: 47425 - DNA, 933 bp, Unknown
  Obtained from environmental sample
  misc_feature (1)..(933): n is a, c, g, or t
gtggtggcgacggagggtgcgatgcaccaatacgcgcacgccgagaggcaggttatgctcttctacgagcagatactgcccgcgtttcagatgaacgacttgtggcacggtttccccgcggtggtaatccccaccgaggattgggggacgttggccttttcgatgaacttcatcaatatgggcgacaacgagcagtgggacgaattggaagcatatttgggcaaggcgaggtcgtgggagggtgttttcggcctctcctacggttttccggtaaaggaggatctgtcgctgggtttgaacgcaaagtatgtgtacagcgtgttggattcgaagacgggcggcattgggcagaccttcgcgatagacgccggcgttctcaagaggaattttctcgttgacaagctggattttggattcatgttgcagaacatggggccgagcatctactacatgacgccggaggaggccgacccgattccgttttcccttaggctcgggttggcgtaccgccctatccgtacccctttccacgaactgacgctggtctttgacgcctacagagaggtggtaaaaaattactacgacaaggggcccgacccgttttgggtggcgctttggaccggtatgctgaacaacaaggagacgaattttgcggaggagatgcaggagataaacgtcagcctcggaatggagtacctctacgccgacttcatggcgctgcgtctcgggttcttgggcgattatctgggtgaacgtttcgagttgtcaatggggcttggcgttaagtacgcgaacatgaacgtcgatttctcctacatatactcgccgcccgggttcatgggcggtgtggtcagagccatggacaagaataagacgggcgcgagcggggtgcgcgacgggcagtggaggctttcgttcctattcgggctgtag

SEQ ID NO: 47426 - protein, 310 aa, Unknown
  Obtained from environmental sample
  misc_feature (1)..(310): Xaa is any amino acid
MVATEGAMHQYAHAERQVMLFYEQILPAFQMNDLWHGFPAVVIPTEDWGTLAFSMNFINMGDNEQWDELEAYLGKARSWEGVFGLSYGFPVKEDLSLGLNAKYVYSVLDSKTGGIGQTFAIDAGVLKRNFLVDKLDFGFMLQNMGPSIYYMTPEEADPIPFSLRLGLAYRPIRTPFHELTLVFDAYREVVKNYYDKGPDPFWVALWTGMLNNKETNFAEEMQEINVSLGMEYLYADFMALRLGFLGDYLGERFELSMGLGVKYANMNVDFSYIYSPPGFMGGVVRAMDKNKTGASGVRDGQWRLSFLFGL

SEQ ID NO: 47427 - DNA, 564 bp, Unknown
  Obtained from environmental sample
  misc_feature (1)..(564): n is a, c, g, or t
gtgtatgtatacagtggaacttttacgatgaatggcggagaaatcattgataatattgcttcctttggtggtggggtgtatctatccaacggctcttttaccatgaaaggagggaaaataaaggggaataatgcacgtggtggtggtatttttatgaatggtggtacttttacattaattggtggaacaatcagtgggaataatagcaattcacaaggtggtggtatcgaagttggtaatggaaatttaataatgtatggtggaataattaatgggaataatgctagtaattatggcggtggtatttttgttgggtctggaatattcaaaaaatttcctctcagtagcgaacaaaacagcggcattatttatggatctgaagcaattggagttgatgcagacgggatattattgaaaaacagtactaactacagccactatcatgctgtttattattcctcatcataccgatatcgcgataccacagcagatcaaacagaccagatcgacaccacaacaggcaaggggttgagttcaaacgggagtccgccgtatgggcaatag

SEQ ID NO: 47428 - protein, 187 aa, Unknown
  Obtained from environmental sample
  misc_feature (1)..(187): Xaa is any amino acid
MYVYSGTFTMNGGEIIDNIASFGGGVYLSNGSFTMKGGKIKGNNARGGGIFMNGGTFTLIGGTISGNNSNSQGGGIEVGNGNLIMYGGIINGNNASNYGGGIFVGSGIFKKFPLSSEQNSGIIYGSEAIGVDADGILLKNSTNYSHYHAVYYSSSYRYRDTTADQTDQIDTTTGKGLSSNGSPPYGQ

SEQ ID NO: 47429 - DNA, 591 bp, Unknown
  Obtained from environmental sample
  misc_feature (1)..(591): n is a, c, g, or t
gtggcgttgcctgtggattttcccgtaaacctgcttaatgattccaagaaactcaaacccaaacaacgcgaagaagtcagacgcgtaattattgaaaaagcccttgcgtggggagtgggctgggcgacccacattgagattgattcgattaatatcctgcgggcgagccttttggcgatgcggcgggcctttgagtaccttgtaacatccatccccaaaacaggggcggggcaatggcctgacaagctggaaagagaaatccctttcggtttgccttttcacaaggcagctatccctgttggacttacggcggtggtagacggcatacacgcgcccgatctgcccgttccctgcaagacgctggtaaaagcggacgccacagtccacgaggtaatggcagcttcaattctcgctaaaaccgcaagggatcagattatggatttttacagccagctttatccccaatacggctatgacaggcataagggctatcccactgccgaacaccggaaattagtcctgaaattcggcccttcgccgattcaacggaagagcttccgtgtacgtctgtcaacgggaaaaaaccgctaa

SEQ ID NO: 47430 - protein, 196 aa, Unknown
  Obtained from environmental sample
  DOMAIN (2)...(189): Ribonuclease HII
  misc_feature (1)..(196): Xaa is any amino acid
MALPVDFPVNLLNDSKKLKPKQREEVRRVIIEKALAWGVGWATHIEIDSINILRASLLAMRRAFEYLVTSIPKTGAGQWPDKLEREIPFGLPFHKAAIPVGLTAVVDGIHAPDLPVPCKTLVKADATVHEVMAASILAKTARDQIMDFYSQLYPQYGYDRHKGYPTAEHRKLVLKFGPSPIQRKSFRVRLSTGKNR

SEQ ID NO: 47431 - DNA, 684 bp, Unknown
  Obtained from environmental sample
  misc_feature (1)..(684): n is a, c, g, or t
atgttcgaaaagtccgggccggttttactgatagacagccatcatgacggcgatgtcataacgcggcgcccctatatttccggcaggactttatatatccttcccgaagaagagccctccgaagaggacgccgagggagccgccgcgggggctgcgcccgcaacgccggcgcctgccgtcgctgaggccgaggctcctccaatggatgaaaaggcccgcaaagccgctgaaaaagccgccgaaaaagccgcgcgtgaggctgaaaaagccgcccgcgaagcccagaaaaacgctcccaaagttcatagagtagaggtgagccttgataacggacgcagttataaatcagcgaaaggcggagaaaaatggaaattccgtctggaaaccggcgagttaactccggggcccctgcctatcgttgttaaggcgacttttagcgatgaaactgtcgccgtccgccgtatcattctgaccgtagatacccgtccgccggtcgtcaatgtcatggcccctccggagaatagttcccaccgtgacacggtgctgacctatggttccgccaaagatgactatgatatggatacggtggaagtcagtctgcgtcccggtgacaaggccttttacgcgngtaccgggttttattcagggcctgtacctggacggaaatattctgggcggacttaa

SEQ ID NO: 47432 - protein, 227 aa, Unknown
  Obtained from environmental sample
  misc_feature (1)..(227): Xaa is any amino acid
MFEKSGPVLLIDSHHDGDVITRRPYISGRTLYILPEEEPSEEDAEGAAAGAAPATPAPAVAEAEAPPMDEKARKAAEKAAEKAAREAEKAAREAQKNAPKVHRVEVSLDNGRSYKSAKGGEKWKFRLETGELTPGPLPIVVKATFSDETVAVRRIILTVDTRPPVVNVMAPPENSSHRDTVLTYGSAKDDYDMDTVEVSLRPGDKAFYAXTGFYSGPVPGRKYSGRT

SEQ ID NO: 47433 - DNA, 573 bp, Unknown
  Obtained from environmental sample
  misc_feature (1)..(573): n is a, c, g, or t
atggttccgccaaagatgactatgatatggatacggtggaagtcagtctgcgtcccggtgacaaggccttttacgcgngtaccgggttttattcagggcctgtacctggacggaaatattctgggcggacttaaatacatgggtggtctgggcctgaccttctttgacgataatgtcaaagttcaggccaattttgcccaggcgactcccggcacccggtattccggatgggcttttggcgggaaggtgcttgccaatgtctataccaagaatctgggcgaatcgcttggtccggactgggaattttacaccaccagcgttgccataggcgcccatttctcctattttatgatggaagaaggtgaagttcccctgtggatgggccaactccttgcccaatgggagatgataaaggcggatatggctttcttcttccccaaatggaagtattttaagactctttcgctgtacacggaaccaggcatttggttcgccccgtcggatgtaactaccagtcaggcgtggcgtaccaaatttaccattgcttttggcgggcggatcagcctgttctag

SEQ ID NO: 47434 - protein, 190 aa, Unknown
  Obtained from environmental sample
  misc_feature (1)..(190): Xaa is any amino acid
MVPPKMTMIWIRWKSVCVPVTRPFTRVPGFIQGLYLDGNILGGLKYMGGLGLTFFDDNVKVQANFAQATPGTRYSGWAFGGKVLANVYTKNLGESLGPDWEFYTTSVAIGAHFSYFMMEEGEVPLWMGQLLAQWEMIKADMAFFFPKWKYFKTLSLYTEPGIWFAPSDVTTSQAWRTKFTIAFGGRISLF

SEQ ID NO: 47435 - DNA, 1146 bp, Unknown
  Obtained from environmental sample
  misc_feature (1)..(1146): n is a, c, g, or t
atgaaatttaccatgagaacaaccctgaataccatccgcttccgccgcctgattgtttcctgtatcttgtttgctttgtgcgtatcggcgctgtgggccggagggcggaaagacaagatcgagacggtgaccgcggaaggcggtgaaatatggcagaacgattttgatgttaccgcccgtaaaaagggcctgtataactatattgtatatgcccgtgaccgcgcgggaaatgaggcgatttcaggcgctttttatgtcagaatagatcctatggccggtcttcccaccgcgcgggtagtgtatcctcaaaataacatggtagtccggcagaatatcaatgttctgggcgttgccgcgggccgttatggcgtacagcgggtgatagcgcgcatggatgacagtgattttaccaatgttaccggaacggagtattggaaccagcagattgatttttcatccgtccccgacggcagacatactctgtatgtccaggcttatgattccaaagatgttcccggtccgataggggcggttgattttattctcgatacagccccgccggaaatagaactcagttctcataatattggcgatattatcaccggctccattaccctcaaggggacggcgagcgatccaaacggcataaaaaccatagaatacagcgtagacggcgaaaaatatctccccctggccggaaaaggaaaaaatcttgcttctctggatttttccttgccgatagacaccagaaaaataccggacggccctctggtttattatctgcggacggtggacatgaccggcgttacaacggttaaaccttatttgttttttgtaaccaacagcgggccggagcttgaagtgtacagcccggcagcgggtgaggatgtttttagtacgttcttcctttccggccgcgcttatgagaagaccggcctttcagcattgtattatgaatggggcgctgtcaaggaagatattgaaatgcgccccggcgacccctattggtgcgtcgcgctggtggccactgccggtaaagacgcgcccaaaagcattnaaggtacggcnatagacaaagcgggcaattccanggagcgtacgtgtaaactggaggaccgccgtaaaataaagttcccgttctggtaa

SEQ ID NO: 47436 - protein, 381 aa, Unknown
  Obtained from environmental sample
  misc_feature (1)..(381): Xaa is any amino acid
MKFTMRTTLNTIRFRRLIVSCILFALCVSALWAGGRKDKIETVTAEGGEIWQNDFDVTARKKGLYNYIVYARDRAGNEAISGAFYVRIDPMAGLPTARVVYPQNNMVVRQNINVLGVAAGRYGVQRVIARMDDSDFTNVTGTEYWNQQIDFSSVPDGRHTLYVQAYDSKDVPGPIGAVDFILDTAPPEIELSSHNIGDIITGSITLKGTASDPNGIKTIEYSVDGEKYLPLAGKGKNLASLDFSLPIDTRKIPDGPLVYYLRTVDMTGVTTVKPYLFFVTNSGPELEVYSPAAGEDVFSTFFLSGRAYEKTGLSALYYEWGAVKEDIEMRPGDPYWCVALVATAGKDAPKSIXGTAIDKAGNSXERTCKLEDRRKIKFPFW

SEQ ID NO: 47437 - DNA, 327 bp, Unknown
  Obtained from environmental sample
  misc_feature (1)..(327): n is a, c, g, or t
atggaaatcaatccttttgacatattaaagaacgcccaaaaaatacaggaacaaatgggctctttccaggaaaaactcgcggcaatcagcgcgacaggttcttcaggcggcggcatggtggagatcgatcttaacggcaaatttgaagtgacggcggtacgtatttccccgacgcttatggaaagcggcgacacggaaatgcttcaagacctgataatcgcggcattctcaaatggccatgacaatattcgggaaacgctgagccgggaaatcggagcgctggcaggcggctttgaattccaggtcttccggctcggccgattctga

SEQ ID NO: 47438 - protein, 108 aa, Unknown
  Obtained from environmental sample
  DOMAIN (9)...(101): Uncharacterised BCR, YbaB family COG0718
  misc_feature (1)..(108): Xaa is any amino acid
MEINPFDILKNAQKIQEQMGSFQEKLAAISATGSSGGGMVEIDLNGKFEVTAVRISPTLMESGDTEMLQDLIIAAFSNGHDNIRETLSREIGALAGGFEFQVFRLGRF

SEQ ID NO: 47439 - DNA, 666 bp, Unknown
  Obtained from environmental sample
  misc_feature (1)..(666): n is a, c, g, or t
atggaagaaatgctgcaagttgaaatctggactgtcgcgcaaaccactgagggcaatgtagtattgctgcgccccatggataaaaacatagtcatacccgtctttgtaggccagttggaaatccagtcaatattaatcggtatggaggaaataaaactgccccgtccccttacccatgacctttttctttccctgcttgataccatgggcctcgcgctggatcgcgtggaaatccgggaactcaatggaaacacatttcacgcgaatcttgtgataagcggcggcaaatataccattgacaagcccttaatcctggacagccgcccctcggacgcccttggtcttgcgacacgccgtanatgtcccatcatggtttccccggatatagtaaagcagaccggcataggcacggagcttttcatggagatgttaggcgaagataaaaaagccggtactgcccgtgttcctcaaccgagcccgcagggcgtcgaaccagaggttcgcggttcccctcttgatgatgatgaacctatatggaggaccggcgcgcttaacagcgcggcgcaaaacaacacagcgcaagcgtccgcggccaatgaatctacaggcgccgaaacgcaggtagatcgggtaattagattaattcccggtactattgtgaattaa

SEQ ID NO: 47440 - protein, 221 aa, Unknown
  Obtained from environmental sample
  DOMAIN (1)...(138): Uncharacterised ACR, COG1259
  misc_feature (1)..(221): Xaa is any amino acid
MEEMLQVEIWTVAQTTEGNVVLLRPMDKNIVIPVFVGQLEIQSILIGMEEIKLPRPLTHDLFLSLLDTMGLALDRVEIRELNGNTFHANLVISGGKYTIDKPLILDSRPSDALGLATRRXCPIMVSPDIVKQTGIGTELFMEMLGEDKKAGTARVPQPSPQGVEPEVRGSPLDDDEPIWRTGALNSAAQNNTAQASAANESTGAETQVDRVIRLIPGTIVN

SEQ ID NO: 47441 - DNA, 312 bp, Unknown
  Obtained from environmental sample
  misc_feature (1)..(312): n is a, c, g, or t
gtgaagaacctcaccacaggcatacccggcaagaaacgaggcgatgacattgtcgaagggaaaaagagcctgcctgtgcttttgttcctgaaacggcagcctgaaaaaaaggaaatggtctgccgctgttttgcggcttcaagggcgaacggagtgagcgcgcctgaaacagaggagctaatacaggcgcttgcggcttgcggcgttattaaagaagccgaggagcagggccttgcccttatcgccggggcgcggaaggtttttgagaaaaccagcgcgccgcttgccggccttttggacctgataagctga

SEQ ID NO: 47442 - protein, 103 aa, Unknown
  Obtained from environmental sample
  misc_feature (1)..(103): Xaa is any amino acid
MKNLTTGIPGKKRGDDIVEGKKSLPVLLFLKRQPEKKEMVCRCFAASRANGVSAPETEELIQALAACGVIKEAEEQGLALIAGARKVFEKTSAPLAGLLDLIS

SEQ ID NO: 47443 - DNA, 396 bp, Unknown
  Obtained from environmental sample
  misc_feature (1)..(396): n is a, c, g, or t
atgaaaacagaatgttctttaacggtaagaagttatgaatgcgacggctacaatcatgtaaataacgcaaattatcttaattatcttgaatacgctcgttatgaatttctaaaagatattggttttgattttgtaaaagcgaccaaagccggttacgggctttacattgcccgaatagaagtagattacaaaaaacccgcctttaccgacgacatattgattattaaatcacgtcccataaaacaaggagcggtaagcggcactatagcgcaggaaatttggcgcggcgaagatttattgatagaagcgaaagtaacatgggcgtttgtcgattcaaaaggaatgcctgcaaaaataccgccagagtttaatgtgccggggcttaaaccggattaa

SEQ ID NO: 47444 - protein, 131 aa, Unknown
  Obtained from environmental sample
  DOMAIN (17)...(102): Thioesterase superfamily
  misc_feature (1)..(131): Xaa is any amino acid
MKTECSLTVRSYECDGYNHVNNANYLNYLEYARYEFLKDIGFDFVKATKAGYGLYIARIEVDYKKPAFTDDILIIKSRPIKQGAVSGTIAQEIWRGEDLLIEAKVTWAFVDSKGMPAKIPPEFNVPGLKPD

SEQ ID NO: 47445 - DNA, 552 bp, Unknown
  Obtained from environmental sample
  misc_feature (1)..(552): n is a, c, g, or t
atgttcaatttttgtccgtcatgcgcttcaaaaaagctcacctttaacgaggggaagtattttcgctgttcagactgcggtcttgtctattatcacaatgtcgccgccgcaacaggctgtattatcacagtaccgtatgaaaacacggagcggcttgtatttcttgtccgaggcaaagaaccaggtatcggcaagctggatcttcccggcggctttgtagaccccggcgaaggcgttcttgacggactctaccgtgagttaaaagaagaaattaactggacgccgcctatcccaaacggcgcaaaattatccgatgtcttcaaattattcgcatctttttccaatgtgtacaaatacaagggaatagattacaacacctgcgatatgtacttttcaatccaggcccccgctctaaaacctgaagacctgcgccgtcaggaagccgaaatctcggatattttattcttaaaacccgaagaaattgatttttcccggttcgcttttccttctaccgtgaaagctgtaaaaacatatcttaacatccttgactaa

SEQ ID NO: 47446 - protein, 183 aa, Unknown
  Obtained from environmental sample
  DOMAIN (33)...(181): NUDIX domain
  misc_feature (1)..(183): Xaa is any amino acid
MFNFCPSCASKKLTFNEGKYFRCSDCGLVYYHNVAAATGCIITVPYENTERLVFLVRGKEPGIGKLDLPGGFVDPGEGVLDGLYRELKEEINWTPPIPNGAKLSDVFKLFASFSNVYKYKGIDYNTCDMYFSIQAPALKPEDLRRQEAEISDILFLKPEEIDFSRFAFPSTVKAVKTYLNILD

SEQ ID NO: 47447 - DNA, 768 bp, Unknown
  Obtained from environmental sample
  misc_feature (1)..(768): n is a, c, g, or t
ttgagggtctgcctagagctggaatggtgggcatccatagtcaactcggagcggaagcgcatagaggaaggcattgccaagctgcggagtggcggtgtagtgtgcagcgactacggggataggttcattgagcatgaccccaccgtggcgatggatgcgatgctgcacttcacggagtggcagtccgaggcggacgcaccgcccgaagtccagcccgcgcacgagttcaaggggcgcttgggggaactgaccgaacacatacatcaggcggtcatcacgggtgaccgcgtgttccttgccggcagcacagcaggcatgcgcgacaggttcaacgaaattatccgcgactacgaactgccttcggctacggggactgacccaggctgccgcgcactggcgctgaacctgtcgggtggtgtccacctaaagggacacaaactgcttgtgctgacggaacttgaggtgttcggacggcgcgcactgccccccgcgagaccacagaagagccgcgtcagcgcgttcctctccgacctgcgcgacctgaagcccggggacagggtggttcacttggaccacggcataggggagttcttgggcttcggctcgctcaccgtcgggggggaagagcaggacgtgatacagctgggctacgcggacggcggcaagctctgcgtttcgctggagcgcgccgaccttgtccaacgctacgtcagccccgacggggtcaagccgccccttgacaagctgggcggtgcgtcctgggcctag

SEQ ID NO: 47448 - protein, 255 aa, Unknown
  Obtained from environmental sample
  DOMAIN (180)...(255): CarD-like/TRCF domain
  misc_feature (1)..(255): Xaa is any amino acid
MRVCLELEWWASIVNSERKRIEEGIAKLRSGGVVCSDYGDRFIEHDPTVAMDAMLHFTEWQSEADAPPEVQPAHEFKGRLGELTEHIHQAVITGDRVFLAGSTAGMRDRFNEIIRDYELPSATGTDPGCRALALNLSGGVHLKGHKLLVLTELEVFGRRALPPARPQKSRVSAFLSDLRDLKPGDRVVHLDHGIGEFLGFGSLTVGGEEQDVIQLGYADGGKLCVSLERADLVQRYVSPDGVKPPLDKLGGASWA

SEQ ID NO: 47449 - DNA, 756 bp, Unknown
  Obtained from environmental sample
  misc_feature (1)..(756): n is a, c, g, or t
ttggtaaagctgcgagaggccgaatgcgtccgccctgtttactatcagtgtgttcgcgttgggtacgtccagaccgttctcaactatcgttgtggcgacaagcacgtcgaggcggccctccatgaagctgaccataacccgttccagagcctcgtcggagagctgcgcgtggcccacgcccaccctagcgtccggcacaagcccgcgtatgcgctcggccacgctcagaatggactccacgcggttatgcaccacatagacctgcccgctgcggcgcagctcgaactggatggccgaagccaccagctcgtcggaccagggggccacaacggtctctatggccaggcggttcttgggtggggtctctatcaggctgatctcgcgcaggccggtgagcgacatgtgcagtgtgcgcggtatgggcgtggcgctcatggccagtgcatcaacgttggccctcagttttttcagcttttctttgtgtcccacgccgaagcgctgctcctcgtctatcacaacaaggccaaggtcggcaaagctgacgcgctggcccagcagttggtgtgtgcctatgactatctccaccttgccgtcggccaaatcgcgctgaatctgctttgcctttgctgggtcaacgaagcggttgagcatctctatccgcacggggaagccggcgaagcggtcggtgaacgtgcggaaatgctggaaacacagcacggtggtggggcacagcacggccacctgcttgccgtctag

SEQ ID NO: 47450 - protein, 251 aa, Unknown
  Obtained from environmental sample
  misc_feature (1)..(251): Xaa is any amino acid
MVKLREAECVRPVYYQCVRVGYVQTVLNYRCGDKHVEAALHEADHNPFQSLVGELRVAHAHPSVRHKPAYALGHAQNGLHAVMHHIDLPAAAQLELDGRSHQLVGPGGHNGLYGQAVLGWGLYQADLAQAGERHVQCARYGRGAHGQCINVGPQFFQLFFVSHAEALLLVYHNKAKVGKADALAQQLVCAYDYLHLAVGQIALNLLCLCWVNEAVEHLYPHGEAGEAVGERAEMLETQHGGGAQHGHLLAV

SEQ ID NO: 47451 - DNA, 372 bp, Unknown
  Obtained from environmental sample
  misc_feature (1)..(372): n is a, c, g, or t
atgaaggtgattcagacaaacgccgctccggcggccatagggccatattcacaggccgttgtttcgggtaacctggtttttacatccggtcagatacctctgtcgccgaaggacggccaggttacaggttcgacaattaccgaacagacagagcaggttatcagaaacctcggggcggttctggaagcggcgggctcatccttcgccaaagtggtaaaaaccacctgcttcctcgcggacatgaacgactttgccgcctttaacgaagtttacgcgaaatactttaccggcaagccggcccgttccacggtggctgtcaaacagcttcccaaaaatgtgttagttgaaattgaggcaactgctgaaatatga

SEQ ID NO: 47452 - protein, 123 aa, Unknown
  Obtained from environmental sample
  SIGNAL (1)...(19)
  DOMAIN (6)...(123): Endoribonuclease L-PSP
  misc_feature (1)..(123): Xaa is any amino acid
MKVIQTNAAPAAIGPYSQAVVSGNLVFTSGQIPLSPKDGQVTGSTITEQTEQVIRNLGAVLEAAGSSFAKVVKTTCFLADMNDFAAFNEVYAKYFTGKPARSTVAVKQLPKNVLVEIEATAEI

SEQ ID NO: 47453 - DNA, 1764 bp, Unknown
  Obtained from environmental sample
  misc_feature (1)..(1764): n is a, c, g, or t
ttgaaattgaggcaactgctgaaatatgaggaagccatgagtgagatcatgaggcccattccttttcctgagttgatacgccgggtgacaggcgaatataaaaaccacggttcggttttcggcatacgggaagaaaaatttttccgtaccgtgaattcagacggcgttgagctgtttggaataagaataaaatctccaatcggccccgccgcgggtccccattcgcagcttgcccaaaacatcctcgccgcgtttctcgcgggcgcgcgttttatggaactcaagaccgtgcagaccatggacggcgaagaactgcgcaaacgcgtggcgcggccctgcatcagcgccgttgacgaangctacaacgtggaatgttcaaccgagctgaccgcgcgacaggcgcgtgaggaatacgtcaaagcgtggtttttatgccatatattcgccaaagaatttgagataaatgataatgttatcttcaacatgagcgtcggttacagctatgacggaataaagtcggaaaaaatcgattcgtacattgaggggatgagaaacgccaaaaacacggaaacatggaagcgctgttacgattacatcgcggctaacatcaatttgtttaaacgtttcacaaaaaatgatctggacgcggtttcgccggttgtttcgaacagcataaccctttcaacacttcacggctgcccaaaggaagaaatagaaaaaatcgccgcatatcttattactcaaaaaggcctgcatacctacattaaatgcaatcctacactgctgggttatgaaagagcccgaagactgttggacgaaatgggttacggctatatatcctttgacgatcatcatttcaaaaacgatcttcaatttaacgacgcggtggatatgctgaagcgtttacaggcccaggcaatggaacgtaatctgggctttggaataaagataaccaacacctttcctgtggagatcaagcggaaagaactgcccggaagcgagatgtacatgtcgggacgctcgctttttccattgtcgatcaatgtggcgaaaaaattatcgctggcctttaacggagaaattcccatttcatactcggggggcgcggactacttcaacctgaaagatatactcgaaacgggcataaggccggtaacggtggcaacaactatcctgaaaccaggcggctatgagagactgctccagcttgccgaactggcggaagaaacggtgagcgacatatgtgtcgccgcgcccattaatgtaaaggccctgtgtgtttttgcggaatccctgcctacaaaaagcaggtaccgcaaagagtaccgacagattggtttaagaaaaaccgaaaccgctttgcccctgttcgactgcgccaaggcgccctgcatggatggaggatgccccattcaccaaagaatacccgaatacctcgccgccgtcgccgaaggcaattataacgaggctttcaagatcatcgccattgacaatacagccccttcgattaccgggacgatatgcgatcaccagtgccagtacaggtgtacgcgccttgattacgaggatcctttgcaaataagaaaagccaagctcattgccgctgaaaaagcgcagaaagcgtttaccgcttctctgcaaagtccgaaaataaaaacagataaatcggcggctgttatcggcgcgggcccggctggtatcgccgcggcagttttcctaaggagagccggcgtgcctgtgaccgtgtacgaaaagncgggataa

SEQ ID NO: 47454 - protein, 587 aa, Unknown
  Obtained from environmental sample
  misc_feature (1)..(587): Xaa is any amino acid
MKLRQLLKYEEAMSEIMRPIPFPELIRRVTGEYKNHGSVFGIREEKFFRTVNSDGVELFGIRIKSPIGPAAGPHSQLAQNILAAFLAGARFMELKTVQTMDGEELRKRVARPCISAVDEXYNVECSTELTARQAREEYVKAWFLCHIFAKEFEINDNVIFNMSVGYSYDGIKSEKIDSYIEGMRNAKNTETWKRCYDYIAANINLFKRFTKNDLDAVSPVVSNSITLSTLHGCPKEEIEKIAAYLITQKGLHTYIKCNPTLLGYERARRLLDEMGYGYISFDDHHFKNDLQFNDAVDMLKRLQAQAMERNLGFGIKITNTFPVEIKRKELPGSEMYMSGRSLFPLSINVAKKLSLAFNGEIPISYSGGADYFNLKDILETGIRPVTVATTILKPGGYERLLQLAELAEETVSDICVAAPINVKALCVFAESLPTKSRYRKEYRQIGLRKTETALPLFDCAKAPCMDGGCPIHQRIPEYLAAVAEGNYNEAFKIIAIDNTAPSITGTICDHQCQYRCTRLDYEDPLQIRKAKLIAAEKAQKAFTASLQSPKIKTDKSAAVIGAGPAGIAAAVFLRRAGVPVTVYEKXG

SEQ ID NO: 47455 - DNA, 1290 bp, Unknown
  Obtained from environmental sample
  misc_feature (1)..(1290): n is a, c, g, or t
ttggaaaatatgctcgtgtacttgtcagaaacagtccgtttaatgatattgcatgacgaagattacgaaacggtatcaaaatatataactggtatgaacgattatatatttgccaatgagaaattgaaaaagtactccactgggatatatggcttttttgacgtatttggtggtaagtttcacgatggcacaggctgggtaccaccgagtgactatacacccgttgcccgcccgtggtacagagcggcgatagaagcaaatggaaaaaccgcagtcaccgaaccgtatatgggagtggcaatggacgtatataccctgacattcgcgcgccgcatatttggcaaagatggcaagccgcttggcataatttgccttgacataatactggacatggttagggaacttaccgttaatacgcgttttgcgcataatggctacgggatactgctaaacagtaacttagaaatacttgcccaccccgacaaaaaaatgtatggcaaaaaaatggtggacattaacatcagtttattgcctatagtgaaagatttggaacggggaataccagttttagaacacagagtaaaaaattacaaaggagaaccgtccgtcttatttttccgtcagatcgaaaacggctggtacatcgctgttatgatatcagaagccgcctatttcaaggaaatgagaataatgagactggcagttatagcactgggagcaatactaacggtgttatttatcggtatggtaaaaaaacttaccattacaaatgaaaaattggaagcgttatcaacaacagatgaattgacaaaactgaataacaggcgttcatttttagagtatgtaaatttgatatggaaacaaaatcggcgtttaaatcttcctgtaacaatattgatgatagacattgattattttaaaaaatacaatgattctttagggcatttagaaggtgacaaggctcttatcgctatagccaaatgtttaaaagatagcataaaaagagaaactgattttgttgcaagatttggtggtgaagaatttgtttgcgttttaccatttattgaaaaggctgaagcgtttgaatttacaaaaacaatggtacaaagcgttgaagatatgaagataccccatcccatgaatttatgttcaaaatatttaacaatcagcgtgggtatggcaagtgccgtgccaaatagcgacagttctcatgtacaattattggatgaagcggataaagcattatattcagcaaaagcatcaggaagaaatagagttgtaatgagttaa

SEQ ID NO: 47456 - protein, 429 aa, Unknown
  Obtained from environmental sample
  DOMAIN (92)...(172): Cache domain
  misc_feature (1)..(429): Xaa is any amino acid
MENMLVYLSETVRLMILHDEDYETVSKYITGMNDYIFANEKLKKYSTGIYGFFDVFGGKFHDGTGWVPPSDYTPVARPWYRAAIEANGKTAVTEPYMGVAMDVYTLTFARRIFGKDGKPLGIICLDIILDMVRELTVNTRFAHNGYGILLNSNLEILAHPDKKMYGKKMVDINISLLPIVKDLERGIPVLEHRVKNYKGEPSVLFFRQIENGWYIAVMISEAAYFKEMRIMRLAVIALGAILTVLFIGMVKKLTITNEKLEALSTTDELTKLNNRRSFLEYVNLIWKQNRRLNLPVTILMIDIDYFKKYNDSLGHLEGDKALIAIAKCLKDSIKRETDFVARFGGEEFVCVLPFIEKAEAFEFTKTMVQSVEDMKIPHPMNLCSKYLTISVGMASAVPNSDSSHVQLLDEADKALYSAKASGRNRVVMS

SEQ ID NO: 47457 - DNA, 738 bp, Unknown
  Obtained from environmental sample
  misc_feature (1)..(738): n is a, c, g, or t
ttgctggccggaaagagcccgctctactttgtgtccggtctgggcgcgtttacggccgttctgatgctgatattcaaggatccgctgctcgggcttgtggccggcgtgcagttgtccactatggaccttgtccgccggggggattggatcgagatccccaagcatggggcggacggcgaggtgatcgacatatcgctcacgaccatccgggtgcagaactgggacaagacaatcgtctccgtcccggcctacgagttcgtctcatcctcgtttaaaaactggcgcggcatgagcgaaagcggcggcaggcgtataaagcgctccatgcgcttcaagataagcaccgttcacttcctctccgatgaggagacagaacgtttgcgcaagataaagttattggagccgtacatagacgaaaaactggcggagatggacaaattcaaccaagaggagttctccggcagcgacatgtctatattggcgaacgggcagcggctgacgaatatcggcacgtttagggcgtactgcgacgcgtacctgcacaagcacccgggcataaatcagaaaatgacgataatagtaaggcacttggagcccacggagaccggcttgcctctggagctctacgtgttcacgagcgacacgcggtgggaggagtacgagaaagtgcaggcggacatattcgaccacctgctgtcgcttgttccggagtttgggttggagatttatcagaggtaa

SEQ ID NO: 47458 - protein, 245 aa, Unknown
  Obtained from environmental sample
  DOMAIN (2)...(243): Mechanosensitive ion channel
  misc_feature (1)..(245): Xaa is any amino acid
MLAGKSPLYFVSGLGAFTAVLMLIFKDPLLGLVAGVQLSTMDLVRRGDWIEIPKHGADGEVIDISLTTIRVQNWDKTIVSVPAYEFVSSSFKNWRGMSESGGRRIKRSMRFKISTVHFLSDEETERLRKIKLLEPYIDEKLAEMDKFNQEEFSGSDMSILANGQRLTNIGTFRAYCDAYLHKHPGINQKMTIIVRHLEPTETGLPLELYVFTSDTRWEEYEKVQADIFDHLLSLVPEFGLEIYQR

SEQ ID NO: 47459 - DNA, 552 bp, Unknown
  Obtained from environmental sample
  misc_feature (1)..(552): n is a, c, g, or t
atggacggtattacatcatcgatagcaacgatgtgggagggcgacgatgtctttgttcgaggggtttttattcccgcctacaccataaagttggcgctgttgttgcttgtcgcgtttgttgtgcatgagatcgtcgtaaggttattgttgccggtatttcggaatcttgccaaaagaacggccacgcaattggacgacatcatttttgataggtatctgctgcatcgcgccgcgcatatgattccggcgcttatcatatacacctatttgccgcgggttttggcgccggagacggaggtatactctctgctccataaggcggtggatctctactttgtgcttgtgagtttagcggtgttcgacgcgttgctcagcgctgtccgcgatgtctatgatatgcacaacaaatctgggaaagtcagcatcaacggagtaatccaagcgctcaaggtgatagggacgtttgtcgccatcattttgcgatcagtttgctggccggaaagagcccgctctactttgtgtccggtctgggcgcgtttacggccgttctga

SEQ ID NO: 47460 - protein, 183 aa, Unknown
  Obtained from environmental sample
  misc_feature (1)..(183): Xaa is any amino acid
MDGITSSIATMWEGDDVFVRGVFIPAYTIKLALLLLVAFVVHEIVVRLLLPVFRNLAKRTATQLDDIIFDRYLLHRAAHMIPALIIYTYLPRVLAPETEVYSLLHKAVDLYFVLVSLAVFDALLSAVRDVYDMHNKSGKVSINGVIQALKVIGTFVAIILRSVCWPERARSTLCPVWARLRPF

SEQ ID NO: 47461 - DNA, 1131 bp, Unknown
  Obtained from environmental sample
  misc_feature (1)..(1131): n is a, c, g, or t
gtgcgggtaatgtttgacgtttttacagcgctcggcggagaagttacgaatcttcagcctaatgtttacagcctttcgcttcaaaacataaaatcttcggaaataccgcccgaacaggcaaaaaaaataagggcgtccatcctgtttgccggccctcttctggcgagaaccggaaaggtcatccttcccccgcccggcggcgacgttataggaagaaggcggcttgacacccactttctggtgctcaccgagcttggctccaaagttaaaataagcgacaaatttacttttaccgcgaagacgcttacaggcgcggatatttttcttgatgaggcttcggttacggcgacggaaaacgcgatcatggcggcggcgctggcgaaaggcaaaacaattctgactaacgccgcaagcgagcctcatgttcaggatctttgcaatatgctggttaaaatgggcgcgaaaatagagggaatcggctccaatatccttgtcattaacggcgtaaaaaaactttccggctgtgattttgaaataggccccgattttatggaagtaggctcttttatcggacttgcttcggtaacaggcggggatcttcatattgaaggcgcgcgcgtaagcgatatgcgccccgcgaaaatttcgttcggcaagctgggaattgtctggggtcacgaggaaaacattattcatgtgcccaaaaaccaaagcatggaagtaaatcacgatctgggcggaatgatcccaaaaatagacgacgctccctggccaggattcccgcccgatcttgtcagtattgtaatggtagtagcaacgcaggtaaaaggaacggttttaattcacgaaaaaatgtacgagtcgcgtatgttctttgtagacaaattgattggaatgggcgcgagaatcgtgctgtgcgacccgcaccgcgccgttgtttcaggcccgtccagactgcacggctccgaactgataagccccgacgtgcgcgccggaatggctatgcttatcgccgccctttgcgccgaaggcaagagcgttatacgcaacgtctaccagattgagcgcggctacgaacaccttgccgaaaggcttgcgtccctgggcgcaagaatatcaaggacagagtaa

SEQ ID NO: 47462 - protein, 376 aa, Unknown
  Obtained from environmental sample
  DOMAIN (3)...(365): EPSP synthase (3-phosphoshikimate 1-carboxyvinyltransferase)
  misc_feature (1)..(376): Xaa is any amino acid
MRVMFDVFTALGGEVTNLQPNVYSLSLQNIKSSEIPPEQAKKIRASILFAGPLLARTGKVILPPPGGDVIGRRRLDTHFLVLTELGSKVKISDKFTFTAKTLTGADIFLDEASVTATENAIMAAALAKGKTILTNAASEPHVQDLCNMLVKMGAKIEGIGSNILVINGVKKLSGCDFEIGPDFMEVGSFIGLASVTGGDLHIEGARVSDMRPAKISFGKLGIVWGHEENIIHVPKNQSMEVNHDLGGMIPKIDDAPWPGFPPDLVSIVMVVATQVKGTVLIHEKMYESRMFFVDKLIGMGARIVLCDPHRAVVSGPSRLHGSELISPDVRAGMAMLIAALCAEGKSVIRNVYQIERGYEHLAERLASLGARISRTE

SEQ ID NO: 47463 - DNA, 1197 bp, Unknown
  Obtained from environmental sample
  misc_feature (1)..(1197): n is a, c, g, or t
atgagcggcaacaccatgacagttacattgggagataaagaatttaaacttatagggaccgcccatgtttcaaaagaaagcatagaagaagtaaaaaatttaattaacgatgaaaaaccggacatggtctgcgtggaacttgacgaaggcaggtataacgcgataacgcagggcaaccaatgggaaaaattaaatttatcccaggttttcagggaaggcaaaggttttttggtaattgtcaatttggttctcgcgagttttcaaagacggcttggcagcgagctgggggtaaagcccggcgaagaaatgaaagtagcgattgagacggcgaaagagcacggtattccgcacagcctttgcgaccgtgaggtgcataccactttgcgcagggcgtgggcgcgctgcggcttgtggagcaaggtaaaactgctggcgtctcttatggcaagcgcttttactaccgaaaaactcagcgaagaggaaatagaaaatcttaagaacagcaatgagcttgacggaatgatgggcgaacttgcgaattatctgcccagcgttaaagaaacattaatagacgaaagggaccgttatcttgcctccaaaatatggacatcttcgctctccgccgaaacgggaaacaaaaaaatagccgcggtaatcggcgcggggcacatgaagggaatagccgcccatcttgaaaaactttccgccggcgaagaaagcgccgatgtcagcgagttaaatgtaattcccccctcgtccgtcttttcaaaaacagctaaatttattattcctgccgccattgtcgcccttgtcgccgccggctttctccgcgccggaacagcgaccggattttcaatggtcttaaagtgggtattatggaacggctccctcgcggcgattggagcctgtctcgcgcttgcccatccattggctattctggtctcatttctgggagcgccgataacgtctcttaacccctttatcggagtggggattctttccggtcttgttcaggtaacgctgttaaaaccgcgggtatcggacgttcaaaacattatggaagacgccaacggcctaaaaggctggtaccgcaacaggatcacaagggctctgctggtatttttcctttccagtcttggaagctcaatagggacatttgtttcaattccggcaatagcgggcttgcttgcgggttga

SEQ ID NO: 47464 - protein, 398 aa, Unknown
  Obtained from environmental sample
  DOMAIN (10)...(240): TraB family
  misc_feature (1)..(398): Xaa is any amino acid
MSGNTMTVTLGDKEFKLIGTAHVSKESIEEVKNLINDEKPDMVCVELDEGRYNAITQGNQWEKLNLSQVFREGKGFLVIVNLVLASFQRRLGSELGVKPGEEMKVAIETAKEHGIPHSLCDREVHTTLRRAWARCGLWSKVKLLASLMASAFTTEKLSEEEIENLKNSNELDGMMGELANYLPSVKETLIDERDRYLASKIWTSSLSAETGNKKIAAVIGAGHMKGIAAHLEKLSAGEESADVSELNVIPPSSVFSKTAKFIIPAAIVALVAAGFLRAGTATGFSMVLKWVLWNGSLAAIGACLALAHPLAILVSFLGAPITSLNPFIGVGILSGLVQVTLLKPRVSDVQNIMEDANGLKGWYRNRITRALLVFFLSSLGSSIGTFVSIPAIAGLLAG

SEQ ID NO: 47465 - DNA, 945 bp, Unknown
  Obtained from environmental sample
  misc_feature (1)..(945): n is a, c, g, or t
atggatgacagcgtaacaatagtacttgactcaaccgacctactgtcggggatttgcggggccaatgatggaaacctcaaggttattgaggaatcccttggcggacgaatcgccgccaggggcaatgagattcggctggacggagtagatcaggccggggtactgcgtttcaaaaccatgatggataaccttatatccattgttaaagagggcgaaattccctcgcctgagtatgtttcgacccttgcgggtacgattaacccgccggacgattcgccttcaaataccgttatacagataccccacggaatccgcaggatttatcccaggggcaaggggcaggcggcgtatattcggggaatgagggcctgcgaaatcagtttctgcatagggcccgcggggacgggcaaaacctacctggccgtcgcagaggcgctgcggctggtcctgtcaaaaaacctccgcaaactggtgctgacgcggcccgtggtcgaggccggtgaaaaccttggattccttcccggcgaccttgcccagaaaataagcccgtatctgcgccccctgtacgacgctatggaatcccttgtcccctacgaaatcatacacagaatggaagaatcgcgggctatagaaatcgcgccccttgcctatatgcggggccgcagcctgaacgactgcatggttattttggacgaggctcagaataccacaagggaacagatganaatgttcctgacacgaatcggatccggcgcccgggcggtcattaccggggacataacccagatagacctgcccccaagagtcgaatcgggtctaactcacgcctcggaaattctgaaggatgtcgacgggcttcatttttcatacctccataccgccgacgtcgtgcgtaacccgctgataaaaaaaataatacaggcttacgatgaaaaaaacacctaa

SEQ ID NO: 47466 - protein, 314 aa, Unknown
  Obtained from environmental sample
  DOMAIN (106)...(310): PhoH-like protein
  misc_feature (1)..(314): Xaa is any amino acid
MDDSVTIVLDSTDLLSGICGANDGNLKVIEESLGGRIAARGNEIRLDGVDQAGVLRFKTMMDNLISIVKEGEIPSPEYVSTLAGTINPPDDSPSNTVIQIPHGIRRIYPRGKGQAAYIRGMRACEISFCIGPAGTGKTYLAVAEALRLVLSKNLRKLVLTRPVVEAGENLGFLPGDLAQKISPYLRPLYDAMESLVPYEIIHRMEESRAIEIAPLAYMRGRSLNDCMVILDEAQNTTREQMXMFLTRIGSGARAVITGDITQIDLPPRVESGLTHASEILKDVDGLHFSYLHTADVVRNPLIKKIIQAYDEKNT

SEQ ID NO: 47467 - DNA, 699 bp, Unknown
  Obtained from environmental sample
  misc_feature (1)..(699): n is a, c, g, or t
ttgagtaccctcgttttcttttgcagaccggcaacggttttttcaattgcctcgtcaaagtcatgctgtattaccattttacgtccggccctgacagccagaagcgcggcttcgtttacaatattggcaagatctgcccccgaaaagccggatgtaattcttgcgacaacctcaagattaatattggagatgccaattatattctttgaatggattttcaggattgcttctctgccctttacatcgggtttgtcaacaagcacctgcctgtcaaagcggcctgggcgaagaagagccggatcaagcacgtcaggacggtttgtggcagccagtatgataaggccgcttgtaccgtcaaagccgtccatttcaacaagaagctggttcagcgtttgttcgcgttcgtcattaccgcccgcaatgttgttgatacggcttttgccgatagcgtcaagttcgtcaataaaaataatacagggcgctttagttcttgcctgcttgaataaatcccttacgcgggcggctccgacaccgacaaacatttctacaaagtccgcgccgctcatgcggaagaaagaaactcttgcctctcccgctaccgcccgcgcgagcagggtttttcctgttcccggcggccccacaagaagtacgcctttgggtattttaccgccgatttccttgtactttgggggctcttaa

SEQ ID NO: 47468 - protein, 232 aa, Unknown
  Obtained from environmental sample
  misc_feature (1)..(232): Xaa is any amino acid
MSTLVFFCRPATVFSIASSKSCCITILRPALTARSAASFTILARSAPEKPDVILATTSRLILEMPIIFFEWIFRIASLPFTSGLSTSTCLSKRPGRRRAGSSTSGRFVAASMIRPLVPSKPSISTRSWFSVCSRSSLPPAMLLIRLLPIASSSSIKIIQGALVLACLNKSLTRAAPTPTNISTKSAPLMRKKETLASPATARASRVFPVPGGPTRSTPLGILPPISLYFGGS

SEQ ID NO: 47469 - DNA, 885 bp, Unknown
  Obtained from environmental sample
  misc_feature (1)..(885): n is a, c, g, or t
ttggccgagtttttgcctccagctggtttttaccccaacgaaaaaccgctgacggaaagcgagttaatcccgctgatttcaggctgcgacggctgtatcgcggggcttgatttctatacagccggggtaattgggagcgccgaaaaactaaaggtaatttccaggtacggcgtcggggtggatcgggtagacctggctgcggcaaaggcaaagaacgtcgttgtctgcaacacgccgcgcgcgaatacccaggcggtcgccgacctcaccatcggcatgctaatttgccttgcccgcaagatacctgtgcttgatcggcaaacaagggaaggccagtggccgcgttccaccggcattgaattattcggtaaaaccatcggtatcctgggtctgggcgcggtaggcaaggcggtagcgaaacgggcctcgggcttttccatgagggtactcgcccgcgatccggtcatcgacagggagtatgtcgaatcgaacggcatcgttccggtcgatttcaatacgcttgttcgtgaggctgattttctctgccttcacctgcccctaacaaacgagaccagaaacatcatttcggcgtatgcgctaaagtccatgaaaaagggcgctatccttgtgaacacggcgcgcggcggccttgttgacgaagccgcggcctatgaactccttgtttccgggcatttgggcggaatgggactggacgtttatgaaaccgaacctcccaaaaaatcgcccttatttgaactggaaaacgtggtattaaccccccacaccgccgcccacaccgccgaagccaccgaggctatggccgaaatttcagtgcagaacttaattgatgtgctttcatgcaaaaagtgtccgaatgtcgtgtga

SEQ ID NO: 47470 - protein, 294 aa, Unknown
  Obtained from environmental sample
  DOMAIN (2)...(294): D-isomer specific 2-hydroxyacid dehydrogenase, catalytic domain
  misc_feature (1)..(294): Xaa is any amino acid
MAEFLPPAGFYPNEKPLTESELIPLISGCDGCIAGLDFYTAGVIGSAEKLKVISRYGVGVDRVDLAAAKAKNVVVCNTPRANTQAVADLTIGMLICLARKIPVLDRQTREGQWPRSTGIELFGKTIGILGLGAVGKAVAKRASGFSMRVLARDPVIDREYVESNGIVPVDFNTLVREADFLCLHLPLTNETRNIISAYALKSMKKGAILVNTARGGLVDEAAAYELLVSGHLGGMGLDVYETEPPKKSPLFELENVVLTPHTAAHTAEATEAMAEISVQNLIDVLSCKKCPNVV

SEQ ID NO: 47471 - DNA, 402 bp, Unknown
  Obtained from environmental sample
  misc_feature (1)..(402): n is a, c, g, or t
ttgaaatcgaccggaacgatgccgttcgattcgacatactccctgtcgatgaccggatcgcgggcgagtaccctcatggaaaagcccgaggcccgtttcgctaccgccttgcctaccgcgcccagacccaggataccgatggttttaccgaataattcaatgccggtggaacgcggccactggccttcccttgtttgccgatcaagcacaggtatcttgcgggcaaggcaaattagcatgccgatggtgaggtcggcgaccgcctgggtattcgcgcgcggcgtgttgcagacaacgacgttctttgcctttgccgcagccaggtctacccgatccaccccgacgccgtacctggaaattacctttagtttttcggcgctcccaattaccccggctgtatag

SEQ ID NO: 47472 - protein, 133 aa, Unknown
  Obtained from environmental sample
  misc_feature (1)..(133): Xaa is any amino acid
MKSTGTMPFDSTYSLSMTGSRASTLMEKPEARFATALPTAPRPRIPMVLPNNSMPVERGHWPSLVCRSSTGILRARQISMPMVRSATAWVFARGVLQTTTFFAFAAARSTRSTPTPYLEITFSFSALPITPAV

SEQ ID NO: 47473 - DNA, 393 bp, Unknown
  Obtained from environmental sample
  misc_feature (1)..(393): n is a, c, g, or t
atgcgtgaattaacctgtattgtgtgtcccattgggtgttccatttcggtaaaagaggggccgaaacctgagggtttgtcttctttgaccattactgggaaccgctgcaatcggggggcggcatacgcagaggaagagatccgcgctcctaagcgcgtagtaaccgctacctgcggcattgcctttaagcccgaagaaccagattctgtcggccttaccgcgccccggcgaattccggttaaatccagcgcaccctgtcccaaggaaaagatacttgagcttcttgaggatatttattccctcaaaccgagcctgcctgtcaaagccggggacaggctcattacagactggaaaggctcaggtattgatgtcgttgcagtcagaagcctttaa

SEQ ID NO: 47474 - protein, 130 aa, Unknown
  Obtained from environmental sample
  DOMAIN (2)...(128): Protein of unknown function (DUF1667)
  misc_feature (1)..(130): Xaa is any amino acid
MRELTCIVCPIGCSISVKEGPKPEGLSSLTITGNRCNRGAAYAEEEIRAPKRVVTATCGIAFKPEEPDSVGLTAPRRIPVKSSAPCPKEKILELLEDIYSLKPSLPVKAGDRLITDWKGSGIDVVAVRSL

SEQ ID NO: 47475 - DNA, 936 bp, Unknown
  Obtained from environmental sample
  misc_feature (1)..(936): n is a, c, g, or t
gtgctgcatataaacagccgggccgtggtactggccatgggttgcagggaaaagaaccgggggaatgtacgtatcccaggctcccggcccgcaggggtttataccgcaggcctcgcccagcggctggtaaatatcgacggctacgtccctggcaaggatgtggtaatcataggttccggggacatcggccttatcatggcccggcgcatgagctggataggctgcaaagtgaaggccgtggtggagattatgccgtacccgtcgggacttacccgaaatatagtccagtgccttggggattttgatattcccctttacctttcgtgtcaaaccaccagcattttcggcaacgacagggtcgaaggggtagaagtggctccaatggagaatgggatcatcgttccggaaaagaaattcaggattgactgcgacacggtgcttttgtccgtcgggctggtaccggaaaacgagctttctagggaagccggagtggaactgaacgcaaccaccggcggcccccaggtggactcaagccttatgaccaatgtggaaggggtctttgcctgcggcaatgtgctccatgtgcatgacctggtggactgggtagcccaggaagcccggagggcgggcattcaggctgcggcctggctcaaaggcatacgccccgcaacccagatacgcataaaggcgggttccaatgtgcgctacgtaaacccgggaaagctcaatccacagggagaaaacaagctcttccttagatcaatgatcgtaaagaacgacgcggttctggagctaaagctggataaccagatcttaaaaaccatcaagcagaaccatgtccagccttcggagatgatcagtgtaacgataaaccccaaagatatggaaaagatacgatttagtaccgagtcggtaatggaagcgagtattgtttag

SEQ ID NO: 47476 - protein, 311 aa, Unknown
  Obtained from environmental sample
  misc_feature (1)..(311): Xaa is any amino acid
MLHINSRAVVLAMGCREKNRGNVRIPGSRPAGVYTAGLAQRLVNIDGYVPGKDVVIIGSGDIGLIMARRMSWIGCKVKAVVEIMPYPSGLTRNIVQCLGDFDIPLYLSCQTTSIFGNDRVEGVEVAPMENGIIVPEKKFRIDCDTVLLSVGLVPENELSREAGVELNATTGGPQVDSSLMTNVEGVFACGNVLHVHDLVDWVAQEARRAGIQAAAWLKGIRPATQIRIKAGSNVRYVNPGKLNPQGENKLFLRSMIVKNDAVLELKLDNQILKTIKQNHVQPSEMISVTINPKDMEKIRFSTESVMEASIV

SEQ ID NO: 47477 - DNA, 1392 bp, Unknown
  Obtained from environmental sample
  misc_feature (1)..(1392): n is a, c, g, or t
ttgtttgccgaggaaccggaagcgaatgaggataaaacggaagagggagaaccgcaaacggtcaggtcgttcaagcggaagaaagccgggcggaaaccgttaagcgcgaaccttgaacgcagggagaaaataatagacttgcctgaaaacgaaaaaacatgcgcctgcggggctaaattgacgcgaataggcgaagaaacaagtgaaaaactgataataattcaacctcagatatatgttgaaaaaacagtcaggcccaaatacgcatgccgcagttgtgaagggacggaagacgaagaggagccgacagtccgcattgcgcctgtggaaccggcgattattcccaagagcatggcgagcccaagtcttttaagcaccataatcacgcaaaagtttgaaatgcatctgccgtattacaggcaggagaaacagtttgagcagataggggctgaaataagcaggcaggacatggccaactggcagcagcaggcatacatgaggcttgaacctttatttgcgttacttgaaaaagcggttaaggacggtcccgtaatacagatggacgagactccggtacaggtcatatcggacgtaaagtccggggacgtaaagtccgaagaggctgacgggaaaaacacgcgtgaaagccgcatgtggcttgcccgcggcggatccgtcgggaagaaagtgacatggtatgaataccacccgacccgcgccgcatatcacgcgaaagagtttttggaaggatattcgggatatctgcaaacggacgggtatatagggtatgacagcgcgttaaaagacatgcccgatattattcatgttggatgtttcgcccatgccagacggaagttttttgaagcggaaaaagtaaacaagaattccaaatccgcgcatgaagggataaagcacattcgtaaactgtacgagattgagaatgagttacgggataagattgcggataacaacgacatattcctgtcagaacggaaagtccgcgccgggcctgtgctggaaaagttcagagcgtggcttgagaaacgaaaagaagaagtgcctccaagcctgctcttggggaaagctataaattacagtcttactcagtgggacaagatgacatcgtatcttgaaagcccttatcttacacctgacaacaacgcttgtgaaaacgcgatacggccgtttgtgttaggccggaagaactggctgttttgtcaaagtataggcggggttgaaagttcctgcggtatgtacactcttattgaaacggccaaacaaaacggtcttattcctttcaattatttgatgactgtttttgaaaaagcgccgcttgcttcttcacccgatgactgggaaaaactgcttccttggaacattttcactgcttaa

SEQ ID NO: 47478 - protein, 463 aa, Unknown
  Obtained from environmental sample
  DOMAIN (60)...(274): Transposase IS66 family
  misc_feature (1)..(463): Xaa is any amino acid
MFAEEPEANEDKTEEGEPQTVRSFKRKKAGRKPLSANLERREKIIDLPENEKTCACGAKLTRIGEETSEKLIIIQPQIYVEKTVRPKYACRSCEGTEDEEEPTVRIAPVEPAIIPKSMASPSLLSTIITQKFEMHLPYYRQEKQFEQIGAEISRQDMANWQQQAYMRLEPLFALLEKAVKDGPVIQMDETPVQVISDVKSGDVKSEEADGKNTRESRMWLARGGSVGKKVTWYEYHPTRAAYHAKEFLEGYSGYLQTDGYIGYDSALKDMPDIIHVGCFAHARRKFFEAEKVNKNSKSAHEGIKHIRKLYEIENELRDKIADNNDIFLSERKVRAGPVLEKFRAWLEKRKEEVPPSLLLGKAINYSLTQWDKMTSYLESPYLTPDNNACENAIRPFVLGRKNWLFCQSIGGVESSCGMYTLIETAKQNGLIPFNYLMTVFEKAPLASSPDDWEKLLPWNIFTA

SEQ ID NO: 47479 - DNA, 795 bp, Unknown
  Obtained from environmental sample
  misc_feature (1)..(795): n is a, c, g, or t
ttgcctaaaattttgtataattataatatgattaaccctgtcacgcctgttaaaaaagcattttataatctgggtttttttgccagaactctgaaaggagccgtcaattttatccggtattcgcgggcttcttttaagattcttataatgcagattctttttacgtttgtttacgctatgggaattacgacccttcttgccctggcaatcggcgcggctgtgaatattatcggcgtgccgtttcttaccatgcttaatcagcagcagcttatttatacgcttttaattataattattacaagggaattgggtcctcttttaacggcttttatcgttattgcgcgttcggcgaccgctatagcgacggaaatcgccggaatggttatttcccatgaagttgaagcgtatatttcagtcggcgttgaccctatagagcatcttgcggttccccgtttccttggagttacaatttcgctcgttttgttgaatgtttatttttccgtttttgggctggcgggctcttttttggtcgcgcagcttttcggttccatgccggtaggccattatttttcaaaccttttgcaaagcttaaatttacgcgatattttattaaccatgataaaaagcattatgtttggggcgattatttccacagtcgcggtaattcaggggttttccgttcaaagggcaagcaccgaggttccggtagcaggccttaacgcggtcagcggtgcatttgcgctatgtatagtagtaaatgttttattatcggctttatattatatgttggtataa

SEQ ID NO: 47480 - protein, 264 aa, Unknown
  Obtained from environmental sample
  DOMAIN (17)...(261): Domain of unknown function DUF140
  misc_feature (1)..(264): Xaa is any amino acid
MPKILYNYNMINPVTPVKKAFYNLGFFARTLKGAVNFIRYSRASFKILIMQILFTFVYAMGITTLLALAIGAAVNIIGVPFLTMLNQQQLIYTLLIIIITRELGPLLTAFIVIARSATAIATEIAGMVISHEVEAYISVGVDPIEHLAVPRFLGVTISLVLLNVYFSVFGLAGSFLVAQLFGSMPVGHYFSNLLQSLNLRDILLTMIKSIMFGAIISTVAVIQGFSVQRASTEVPVAGLNAVSGAFALCIVVNVLLSALYYMLV

SEQ ID NO: 47481 - DNA, 2328 bp, Unknown
  Obtained from environmental sample
  misc_feature (1)..(2328): n is a, c, g, or t
gtgtgcctgtatcggctgcgccatggttttacccngcttgattattacaataaatatgaagggaaatgggagggaattgcattcgacgtacttgacgaagttacaaaccttaccgggcttgcctttgagcttgtcaattccccggacgcgtcctgggcggaggtgtttcaaatatttaatgacggtaaggctgccatatgtcttgatctgattccttccccggaacggttaaaccgttatttatggtcaaagtacatatacatgtcggaaaattatgcgctcgtgtccaaacataattttccaaacataaacatcggcgaaattcagtacgcaaaaatcggccttataaaaagtacggcctgggctgatttgtttcagaactggtttcctgaagccgcaaatgtaaccatgtatggttcccaggatgacgctttcatggccttggatcacgacgaagtcgatctgattatggttggcactaacgcactttccagcgtgactcattattatgaattatcaaattataaagccaattacatatttaacagtactatagattatgtcatcgcttataataaaaatgaacatattctttggtctctcattgacaaggcgctggcctacgttgatatagaaataataacgaaacgctgggaaaataaaacttttgattatcaggcaaaactaatgcgggcgcagcgcccctggctgatcggggcaatctgcctgtccctgggcgtgcttgtcctgattctcgtattttttcaaaaaaaccgcctgatgaaaaaacagcttgaagttatattgggcggcgttgaaagcggcattgccataatcgatgcagatacccgcaaaataattgatataaacccggttgttacccgcatgtatggcggcgacagggaaaaaattctcgggcagaattgcgaaacgtttttcagcgaaagcaaggactgtccggtaatggataaaggtcagactatgacccagaccgagcttcaatttaaaaatgcggccggtgaaattattccgatattaaaatccgtatcaaaaatcaattatgacggacatccggcgctgttggaaaattttactgacatttcgcatttaaaaaaggctgaggaagcaaaaagcgcatcggaggcaaagagccgattcatcgcaaacatgagccacgaaatgcgtacaccgatgaatgtgattgtggggcttacagatttgatgctggaagaaaacgaaccggtcaacgtgaaggaaaatctaagaaagatcaatatagcaggaaacactttgctgggattaataagcgatgttctggatatttcaaagattgaatccggcaaacttgaacttacgccagtgcaatatgatgtagcaagcctcttaaacgatattataaccctcaacatgatccgtttggaagaaagaccaataacattcaatctggacatcactgaggaactgccgagcgccctttacggagatgatttgcgcgtaaagcaaatagtcaataacctcttaagcaacgcctttaaatacacgcgaaagggaaccgtcacgctggggatgagctgtacacgcacagagcgggatgacatattgacatctttctatgtaagtgacacaggtatcggcatacgcccggatgaccttggtaaactcttttcggattataaccagttggataccagagcgaaccgcaatgtcggaggtaccggtctgggactcagcataacgaaaaaacttgtggagctcatggacggtgaaatttcggtagaaagcgaatatggcgcaggcaccacgttccgtttgcatataaaacagcgtttcgtcaacgacaagacaatcggcgcggaaacggtgaataacctttgcagtttcaactacacagacaacaggaaaaaagcctcagaaaagtttgtacgccccgatntgagttacgcgaaagtactggtagtcgatgatatgcagtctaacctggacgtggcggcgagtatgctgcgcaagtacaaaatatatgtagactgcgtcctgagcggccaggcagctattgataaaataaagcttgaagaaccagtttatgacgccatttttatggatcacatgatgccggaaatggacggcgtggaaacaacagccaatatccgcgcccttggaaccaaatatgcgcaaacagtacccattatcgcactgacagccaatgcaatagcgggaaacgagcaaatgttcctggaaaacggttttcaggcatttttgccaaagcccattaacataaaatctctggacttggctgtcagaagatgggtcagggacaaatccagggaataa

SEQ ID NO: 47482 - protein, 775 aa, Unknown
  Obtained from environmental sample
  DOMAIN (11)...(221): Bacterial extracellular solute-binding proteins, family 3
  misc_feature (1)..(775): Xaa is any amino acid
MCLYRLRHGFTXLDYYNKYEGKWEGIAFDVLDEVTNLTGLAFELVNSPDASWAEVFQIFNDGKAAICLDLIPSPERLNRYLWSKYIYMSENYALVSKHNFPNINIGEIQYAKIGLIKSTAWADLFQNWFPEAANVTMYGSQDDAFMALDHDEVDLIMVGTNALSSVTHYYELSNYKANYIFNSTIDYVIAYNKNEHILWSLIDKALAYVDIEIITKRWENKTFDYQAKLMRAQRPWLIGAICLSLGVLVLILVFFQKNRLMKKQLEVILGGVESGIAIIDADTRKIIDINPVVTRMYGGDREKILGQNCETFFSESKDCPVMDKGQTMTQTELQFKNAAGEIIPILKSVSKINYDGHPALLENFTDISHLKKAEEAKSASEAKSRFIANMSHEMRTPMNVIVGLTDLMLEENEPVNVKENLRKINIAGNTLLGLISDVLDISKIESGKLELTPVQYDVASLLNDIITLNMIRLEERPITFNLDITEELPSALYGDDLRVKQIVNNLLSNAFKYTRKGTVTLGMSCTRTERDDILTSFYVSDTGIGIRPDDLGKLFSDYNQLDTRANRNVGGTGLGLSITKKLVELMDGEISVESEYGAGTTFRLHIKQRFVNDKTIGAETVNNLCSFNYTDNRKKASEKFVRPDXSYAKVLVVDDMQSNLDVAASMLRKYKIYVDCVLSGQAAIDKIKLEEPVYDAIFMDHMMPEMDGVETTANIRALGTKYAQTVPIIALTANAIAGNEQMFLENGFQAFLPKPINIKSLDLAVRRWVRDKSRE

SEQ ID NO: 47483 - DNA, 1053 bp, Unknown
  Obtained from environmental sample
  misc_feature (1)..(1053): n is a, c, g, or t
atgctaatattcacggctattattacgctggcgcttatagtcgttttctccctgtatattagaactttgcatataaaaaaacattttgagaatcaggcaatcaccctttccgccatataccagactattcctgacttgctgtattgcatggacacggacttaagatttacaaactgtaaccgcgtttatgaggaatttacagggtttcgggaaaaagacatactcggaaaaacagatcttgagatttacgcggatatacgcgatcacgccacggcgcagggctttatggaagtaaacaaaagggtgatcgatgaaaaaataaccgtaacgaccgaagaaacccagattcgcccggataataccaggatttatgtcaggtcaacaaagactccgctgatacaaaacggaaaaatcatagggctgctgggaatttccagggatgttacggaatacagggcggcggaggaagcggcaaaagcggcgtcccgggcaaaaagcggctttctcgcgaaaatgagccatgagatacgcactcccatgaacgcgataataggcatggcggaacttgccctgcgcgcgaatgatttaaatacggcccgcgaacacataattaccattaaacaggcgggatcaaacctcatttcaatcattaatgatatcctggatttttcaaaaatcgaaaccggaaaactggaaattattccggtggattatttgttttcatccctgattaacgatgtgatcaacattataagaatgagagtcgttgatacgcagattcgtttcctggttaatattgacagcaaaattcccgacgcgctgacaggcgatgaaatacgcatccgccaggttttgctcaatattctgggtaatgccgtcaaatatacggagaagggttttgtgacccttacggtatacggggaaccgacgggtgagaataccgttaatttaattatggaagtaatggactccggaaaaggcataaagcaggaagatttaaagaatcttttcgtcgaatacaggcagcttgatcaggaacacacaggggaatag

SEQ ID NO: 47484 - protein, 350 aa, Unknown
  Obtained from environmental sample
  DOMAIN (34)...(148): PAS fold
  misc_feature (1)..(350): Xaa is any amino acid
MLIFTAIITLALIVVFSLYIRTLHIKKHFENQAITLSAIYQTIPDLLYCMDTDLRFTNCNRVYEEFTGFREKDILGKTDLEIYADIRDHATAQGFMEVNKRVIDEKITVTTEETQIRPDNTRIYVRSTKTPLIQNGKIIGLLGISRDVTEYRAAEEAAKAASRAKSGFLAKMSHEIRTPMNAIIGMAELALRANDLNTAREHIITIKQAGSNLISIINDILDFSKIETGKLEIIPVDYLFSSLINDVINIIRMRVVDTQIRFLVNIDSKIPDALTGDEIRIRQVLLNILGNAVKYTEKGFVTLTVYGEPTGENTVNLIMEVMDSGKGIKQEDLKNLFVEYRQLDQEHTGE

SEQ ID NO: 47485 - DNA, 804 bp, Unknown
  Obtained from environmental sample
  misc_feature (1)..(804): n is a, c, g, or t
gtgataataggaattgacattggggcgacaacgacaaaggcggtttccattgaagacggggaactcgtccgcaaggttaaggtcaaagcctctgatgcggtgacagccgcgacaggcgcttttggcaaaatcgttcttgataacggaattgacatggacattatcaaggaaatcaggataaccggagccggagccgcaaaaataaagggcgacattttcggaatccccacggcaagaattggcgaaataaaggctatcggcaggggaggaatgttcctttccggtctggataatatcataatagccaacatcggaaccggaactgttattattgaggcaaacgaacacgtaatttcgcatttcggcggttccggcgtaggcggcggcacgatcaccgggctggcgaagaaacttctgccgaccgccgaattcaacgggattataaaccttgcccaaaccggcgacttgagccatgttgacctgttattggaagatataatggaaacggatttaagttttctgaacaaggaaaccacggtcgccaatttcgcgaaaatgtcggatcgcgccggcagcgaggacatagcgctggcaatcatcaacatggtgtaccaggttatcggggtgctttccgtttttgccgccaaagcaaaaggccttaagcgcgttattgtcaccggcaacggcagcgggaacaaactcgggcaaaaggttcttgccaatataacaggaatgtacggcgttgaatttatctatcccgcggacgccgaatacaccaccgcggtgggagccgggctggtttag

SEQ ID NO: 47486 - protein, 267 aa, Unknown
  Obtained from environmental sample
  DOMAIN (1)...(267): Fumble
  misc_feature (1)..(267): Xaa is any amino acid
MIIGIDIGATTTKAVSIEDGELVRKVKVKASDAVTAATGAFGKIVLDNGIDMDIIKEIRITGAGAAKIKGDIFGIPTARIGEIKAIGRGGMFLSGLDNIIIANIGTGTVIIEANEHVISHFGGSGVGGGTITGLAKKLLPTAEFNGIINLAQTGDLSHVDLLLEDIMETDLSFLNKETTVANFAKMSDRAGSEDIALAIINMVYQVIGVLSVFAAKAKGLKRVIVTGNGSGNKLGQKVLANITGMYGVEFIYPADAEYTTAVGAGLV

SEQ ID NO: 47487 - DNA, 696 bp, Unknown
  Obtained from environmental sample
  misc_feature (1)..(696): n is a, c, g, or t
atgccgaatttaacgaatgggatgatgaaacaaaagtttgatttcatttttatttcatttaaattgtatgtcaatcacaaagaagaaattctgaaatacgagtcgaattcacaaatagtcattcttaccgaattcggcgagacaattcccgacagtaacttgaatgtaatatccatgcccgcgcattcgatttccatcgccaatattctgaacggcaagattgacaagttttcctatgataacaacaatgagcttattgtaagttttacggcgcctcaggccaacatccttgttgttgacgatatcattaccaatttaaacgtggcaaaagggcttctttccccctatgaaacgcagataaccctgtgcaaaagcggcatgatggcgttaaacgccgtaaaaaacaaccgctatgacctgatatttatggatcacaggatgccgggaatggacggtattgaaacgacccgccatatcagggctatgggggatcaggatccctattataaaaacgtgccgattatagcgttaaccgccgatgccgtttccggcacaaaagaaatgtttttggaaaacggcttaaatgatttcttgtcaaaaccgattgatacgatcaaactaaactctgtactggaaaaatggatacccagagaaaaacagcatggttcggttgttaataccaggaaggaggtataa

SEQ ID NO: 47488 - protein, 231 aa, Unknown
  Obtained from environmental sample
  DOMAIN (94)...(212): Response regulator receiver domain
  misc_feature (1)..(231): Xaa is any amino acid
MPNLTNGMMKQKFDFIFISFKLYVNHKEEILKYESNSQIVILTEFGETIPDSNLNVISMPAHSISIANILNGKIDKFSYDNNNELIVSFTAPQANILVVDDIITNLNVAKGLLSPYETQITLCKSGMMALNAVKNNRYDLIFMDHRMPGMDGIETTRHIRAMGDQDPYYKNVPIIALTADAVSGTKEMFLENGLNDFLSKPIDTIKLNSVLEKWIPREKQHGSVVNTRKEV

SEQ ID NO: 47489 - DNA, 822 bp, Unknown
  Obtained from environmental sample
  misc_feature (1)..(822): n is a, c, g, or t
ttgtcagattggccgagacttttccgtccgtttcttgaggatacctggcggaaacttgctacgaggcagcctgctgcccatatgcctgaaaaattcatacttggtttggggattccttttcccggctgtcttgccggggcattggtctgcgcggaatcggcaaaggtgttttttggcgagaaggttgttactgttgcgggcggcggctatgttaataccgaattgaggtatcttgaagatgaaagagtctttgattactttgactatctttcctttgaccgcggctacggttccctgaatgccattgtggaacgtgaaacggcggatgttaaaatcagcgatgataccgcgctgtacaaaacaatgtaccgtaaccgtaaaggcagtatcattaaagataatggtattaccaaaaatgatataaaaaataatgtcggaatatccatagacgatgactctgccgtaacggtatttcccgattattcaggcgttgatttttcccgctatattcatccggcggatgatgagaattccatgcaccggctttggtcggacggccgctggctgaaagcatatctggcgcacggctgctattggcataactgcgctttttgcgataccagtctggactatatccgctgttaccagccggttgacgttgacgcgttgtttcatcatttgttggcgcaggtggaagcgacaggcatacgcggcgtacatctggtggacgaagcctgtccgcccgcctccctgctgcgccttgccctgctcaaccatgaggcggggctgcccctgggtgttctggggcaatatccgttttga

SEQ ID NO: 47490 - protein, 273 aa, Unknown
  Obtained from environmental sample
  misc_feature (1)..(273): Xaa is any amino acid
MSDWPRLFRPFLEDTWRKLATRQPAAHMPEKFILGLGIPFPGCLAGALVCAESAKVFFGEKVVTVAGGGYVNTELRYLEDERVFDYFDYLSFDRGYGSLNAIVERETADVKISDDTALYKTMYRNRKGSIIKDNGITKNDIKNNVGISIDDDSAVTVFPDYSGVDFSRYIHPADDENSMHRLWSDGRWLKAYLAHGCYWHNCAFCDTSLDYIRCYQPVDVDALFHHLLAQVEATGIRGVHLVDEACPPASLLRLALLNHEAGLPLGVLGQYPF

SEQ ID NO: 47491 - DNA, 780 bp, Unknown
  Obtained from environmental sample
  misc_feature (1)..(780): n is a, c, g, or t
atgaaggacgtttaccgctctttatatttgaatgaaactccctatatagaaaccaaccttgaatcggctgagatgattaagtacgcatccaacgcctttctcgcggtaaaaattacttttataaacgagatcgcaaacctttgcgaaaaaacgggcgcagacgtgcaggatgtcgcgagggcgatgggcaaagacttaaggattggttccaagtttttacatcccggtcccggttacggcggttcttgttttccaaaggatacaagcgcccttataaaaacaggcagggataataatgaggttctgcatattgtggaaacaacaatagaaacaaacgaaaaacaaaaattgcgcgccgcgaaaaaaatcgaatctgccctccacccgcttaaaaataaaacattgtgcattctgggcctttctttcaagccaaataccgacgacatacgtaaatccccgtctattacaatctgcgaataccttttgagcaaaggggcttttttacgcctgtatgatcccgcggcgatgaaagaaacgaaaagaaagtttaactcgcttgaaaaatcaatttattttgcttctgatgaatatgacgcggccctcagcgcggacgcgcttgttatagtaacggaatggaaccagttcagaaatcttgatcttttcaaaattaaaaaacttcttgcttccccgtttttctttgatctccgcaacatatacaagaaacaggaagcgcagtccgcaggccttatttattttggaatcggtaacggaaaagaatga

SEQ ID NO: 47492 - protein, 259 aa, Unknown
  Obtained from environmental sample
  DOMAIN (136)...(241): UDP-glucose/GDP-mannose dehydrogenase family, UDP binding domain
  misc_feature (1)..(259): Xaa is any amino acid
MKDVYRSLYLNETPYIETNLESAEMIKYASNAFLAVKITFINEIANLCEKTGADVQDVARAMGKDLRIGSKFLHPGPGYGGSCFPKDTSALIKTGRDNNEVLHIVETTIETNEKQKLRAAKKIESALHPLKNKTLCILGLSFKPNTDDIRKSPSITICEYLLSKGAFLRLYDPAAMKETKRKFNSLEKSIYFASDEYDAALSADALVIVTEWNQFRNLDLFKIKKLLASPFFFDLRNIYKKQEAQSAGLIYFGIGNGKE

SEQ ID NO: 47493 - DNA, 702 bp, Unknown
  Obtained from environmental sample
  misc_feature (1)..(702): n is a, c, g, or t
atgatgcatcttaacaaagtaaaagcgttattgtcagtgccgggcagtttgtaccgtctgcttaaccgaaaacaaaaaatttctttttttttactttttttcctgacagtcgtttattcaattatagaaaccgcaggtatttccgccattatgccgtttatttcgctggcttccgagccgggattgcttgtcacaggttggtataaaaaagcgtatgacataaccggttttaacggttttgaacaatttataatcgctttcggtttttttttgatttttttctattttttccgcgctgtttattcatctttgcttacatattttatagccggttattcgtttggaatatataaatatttatctaaaaatgttttaaaaaccatattatcaatttcctataaattatacgttcaaaaaaactcagctgaacaaatacgcgtgattaccgaagaagcaaacgatgtcggtaaaatagttttaagcgtattaaaaatgttatcggaaatatttccgatcctttttatttatattgttatcgtaatcttaaattggaaaattacccttgtaataacttttgtattattattactgttattatttttgcttccttatttaacaaaaaagaacaagaaacttggggaaatacggcttgaatcaggacaattgatttaccgtttattaaaagaatctttggaaatataa

SEQ ID NO: 47494 - protein, 233 aa, Unknown
  Obtained from environmental sample
  misc_feature (1)..(233): Xaa is any amino acid
MMHLNKVKALLSVPGSLYRLLNRKQKISFFLLFFLTVVYSIIETAGISAIMPFISLASEPGLLVTGWYKKAYDITGFNGFEQFIIAFGFFLIFFYFFRAVYSSLLTYFIAGYSFGIYKYLSKNVLKTILSISYKLYVQKNSAEQIRVITEEANDVGKIVLSVLKMLSEIFPILFIYIVIVILNWKITLVITFVLLLLLLFLLPYLTKKNKKLGEIRLESGQLIYRLLKESLEI

SEQ ID NO: 47495 - DNA, 1335 bp, Unknown
  Obtained from environmental sample
  misc_feature (1)..(1335): n is a, c, g, or t
atgttaatggcatcggctcggcttaaccttccgtctgtttttgtttcaggcggacccatgcttgccggacgcaaggacggaaaaccgctgacgcttaccacaatgtttgaggcggtaggcgctgtcgcagcggggaagatcagcgaatcggaacttgaggaacttgaaaaccttgcctgcccgggctgcggttcttgcgccggaatgtttacggcaaactcgatgaactgcgtaaccgaagcgttgggaatggctctgccgggcaacggaactatccctgccgtaatggcggaacgtatccgtctggcgaaaaaaacaggaatgttaattttagacgtactaaaaaaagacctgcgtcctaaaagcatactcacagaaaaagcgtttatgaacgccctcgccctcgatatggcgctcggctgttctacaaataccgcgcttcatcttcccgccattgcaggggaagcgggctttaaactcgatctggaacttcttaacaaggtaagcgcggttactcccaacctttgccgccttgcccctgcgggaaaagacgcaatcgaagacctgcacacggctggcggaattccggcggtcttaaaagaactttccaaaaagaaccttgtcgatctaaaagcagccacagtgtacggctgtctgggcgatgcccttggcggcgcccttggcggcgcctttagcgacgcattgggcaaggcggcaaactgcaaccccgatgtcataagaccgattgaaaatccctattcttcgacaggcggtcttgccgccttgaagggaaacatcgcgcaggacggctgtgtcgtaaagagaagcgcggtagcggcttccatgttgaagcaccaaggcccggcaagagtttttgattcagaggaaaccgcatttgaagccatcatgggaaagaaaattaaggcgggagatgttgtcgtcattcgttacgaaggacctaagggtggtccaggcatgaaagagatgctcgcgcccacggcggctctcgccggaatggggcttgatgacaaagtagccttgattacggacggacgtttttcaggagcttccaaaggcgcgtccatcggccacgtttcaccggaagcggctgttggcggaaacatcggcatcatcaatgaaggggacttaatagagattgacattgacgggctttcaataaacgtgaagataagcgaggaagaaattgcgcggcggcgtaaagattggaagcctctttccaagacaaacacaggttaccttgcccgttatagcgcccaggtcggttccgccgcgcagggagcggtctttaattcacagccgcgtgaaggaaattaa

SEQ ID NO: 47496 - protein, 444 aa, Unknown
  Obtained from environmental sample
  DOMAIN (1)...(437): Dehydratase family
  misc_feature (1)..(444): Xaa is any amino acid
MLMASARLNLPSVFVSGGPMLAGRKDGKPLTLTTMFEAVGAVAAGKISESELEELENLACPGCGSCAGMFTANSMNCVTEALGMALPGNGTIPAVMAERIRLAKKTGMLILDVLKKDLRPKSILTEKAFMNALALDMALGCSTNTALHLPAIAGEAGFKLDLELLNKVSAVTPNLCRLAPAGKDAIEDLHTAGGIPAVLKELSKKNLVDLKAATVYGCLGDALGGALGGAFSDALGKAANCNPDVIRPIENPYSSTGGLAALKGNIAQDGCVVKRSAVAASMLKHQGPARVFDSEETAFEAIMGKKIKAGDVVVIRYEGPKGGPGMKEMLAPTAALAGMGLDDKVALITDGRFSGASKGASIGHVSPEAAVGGNIGIINEGDLIEIDIDGLSINVKISEEEIARRRKDWKPLSKTNTGYLARYSAQVGSAAQGAVFNSQPREGN

SEQ ID NO: 47497 - DNA, 303 bp, Unknown
  Obtained from environmental sample
  misc_feature (1)..(303): n is a, c, g, or t
gtgtttgtcttggaaagaggcttccaatctttacgccgccgcgcaatttcttcctcgcttatcttcacgtttattgaaagcccgtcaatgtcaatctctattaagtccccttcattgatgatgccgatgtttccgccaacagccgcttccggtgaaacgtggccgatggacgcgcctttggaagctcctgaaaaacgtccgtccgtaatcaaggctactttgtcatcaagccccattccggcgagagccgccgtgggcgcgagcatctctttcatgcctggaccacccttaggtccttcgtaa

SEQ ID NO: 47498 - protein, 100 aa, Unknown
  Obtained from environmental sample
  misc_feature (1)..(100): Xaa is any amino acid
MFVLERGFQSLRRRAISSSLIFTFIESPSMSISIKSPSLMMPMFPPTAASGETWPMDAPLEAPEKRPSVIKATLSSSPIPARAAVGASISFMPGPPLGPS

SEQ ID NO: 47499 - DNA, 942 bp, Unknown
  Obtained from environmental sample
  misc_feature (1)..(942): n is a, c, g, or t
atgagccgcaacgatgagacacagacagggcttgccggcctttatcttgccggaagttacgcgctattgcaaaaaacatccgacgcttccgctattctgggaaaaatcaagagggcgatggtgaaagacaaaagtttccgttatgttgacgatcttatgtatcattcggtatacctcaatattatctcgcggcatttccctcaacgtttaagggatatatcggagtccttgttggttgacatggcgcagcaaatggaaaagcagtcatataccacattctcggccaatcacgcgctgatggcgattgacgcttacatgaaagtaattccaaccgcgcagacaggccgctttaccgtgcaggaagtttcaaaagacaaccagcgcaaagaattaaagccgctgggaaccactttgttcaacgctcccttctccgcggacgcggcaaaaatcgcccttgaaaacaaggacagccttaatttgttttatcagataacagccgccggttttgaccgcgaattgccctcaaaggaaataaaaaacggtattgaagtttacagggaatttcttgacagctccggaaaaacaatcagttctttcaaagtgggcgacgaggtaacggtaaaacttaacttccgcagcctttccaacgacgagtaccgtgatgtggctattgtcgatttatgccccgccggtcttgagacgcaaattgaatcggtgcgggatcaatcgtcccgtgacgattggaaagcggactatgttgatatccgcgaggacaggctggtaatttatggcactgtcggcagcaggatagcaagtttcagttaccgcgcgagggcgattaacgcgggcagttttacagttccgcccctcttcgccgaagcgttatacgataaatcagtgtgggcccttcgcccgcaggcttcgattaagattgttaaatga

SEQ ID NO: 47500 - protein, 313 aa, Unknown
  Obtained from environmental sample
  misc_feature (1)..(313): Xaa is any amino acid
MSRNDETQTGLAGLYLAGSYALLQKTSDASAILGKIKRAMVKDKSFRYVDDLMYHSVYLNIISRHFPQRLRDISESLLVDMAQQMEKQSYTTFSANHALMAIDAYMKVIPTAQTGRFTVQEVSKDNQRKELKPLGTTLFNAPFSADAAKIALENKDSLNLFYQITAAGFDRELPSKEIKNGIEVYREFLDSSGKTISSFKVGDEVTVKLNFRSLSNDEYRDVAIVDLCPAGLETQIESVRDQSSRDDWKADYVDIREDRLVIYGTVGSRIASFSYRARAINAGSFTVPPLFAEALYDKSVWALRPQASIKIVK

SEQ ID NO: 47501 - DNA, 885 bp, Unknown
  Obtained from environmental sample
  misc_feature (1)..(885): n is a, c, g, or t
atggcgaatttaagagacgttcgcctcaggatgcgggccataaggcaaaccctgcaggtaaccaaagcaatgaacttaatctcaaccgccaagctacgcaagggccgccgcatactactggatgttgagcctttctttaccagagtccaaaaatccatgtttgacatactcgcgggagcgccgcttgaaaaaagcaaatacctcgcgtcgtccggaaaagaaaatgaatcccacactgcggtaatcgcgataacaagcgacaagggccttgcaggcggttacaacgcgaatattttcaggcaggttaacctgctctgcgaanaggtaaataaccccatcctcattctggttggctcgnttggatacaggtacttcatacattcaccttggcttgttatggaaagtttttcttttaaatccaggctgccggagctggacgaggcaaaggaaatcgccgactacattatttctcaattccaatggggtatttttgacgaagtccatatcgtatatacccatatgtacagctccattaagcttgttccaagagaaaggcagattctgccccttaaccctgagagtatgcaggaagaatttgaaaggacaggcgggaagcgggagaagctccagtttgaatatgtaccttcgaaagaagaggtgtttgaggccctggttcccatgtatgtaaaagggctaatatacggctctcttgtggaggcctatgtgagcgaacaaagcgcccgaatgtccgcaatggacgaggccagcaaaaacgccgaagatatgctcgccaatttacagattaactacaaccgggcaaggcaggcgggcattacccaggagatgacagaaattgtcggcggtgccgaagcgctgagcgactaa

SEQ ID NO: 47502 - protein, 294 aa, Unknown
  Obtained from environmental sample
  DOMAIN (2)...(292): ATP synthase
  misc_feature (1)..(294): Xaa is any amino acid
MANLRDVRLRMRAIRQTLQVTKAMNLISTAKLRKGRRILLDVEPFFTRVQKSMFDILAGAPLEKSKYLASSGKENESHTAVIAITSDKGLAGGYNANIFRQVNLLCEXVNNPILILVGSXGYRYFIHSPWLVMESFSFKSRLPELDEAKEIADYIISQFQWGIFDEVHIVYTHMYSSIKLVPRERQILPLNPESMQEEFERTGGKREKLQFEYVPSKEEVFEALVPMYVKGLIYGSLVEAYVSEQSARMSAMDEASKNAEDMLANLQINYNRARQAGITQEMTEIVGGAEALSD

SEQ ID NO: 47503 - DNA, 324 bp, Unknown
  Obtained from environmental sample
  misc_feature (1)..(324): n is a, c, g, or t
gtgctctgtcgcgatgttgcggatcagctccatgatgagtaccgttttcccgacaccggcgcctccgaagagccctatcttgccgcccttggcgtatggggctataaggtcaatgacctttatgccggtttcaaaaacttcggtagccggcttctgatcggaaaagtccggggctttgcggtgaatggaggcgtattctttgacgctgaatggtcctttgtcatcgatagatttgcctgtaacgttgaacatccttccaaggatttcatcgcccaccggaacctgaatcgcgtgacctgtgtcgcttacttccataccgcgtga

SEQ ID NO: 47504 - protein, 107 aa, Unknown
  Obtained from environmental sample
  misc_feature (1)..(107): Xaa is any amino acid
MLCRDVADQLHDEYRFPDTGASEEPYLAALGVWGYKVNDLYAGFKNFGSRLLIGKVRGFAVNGGVFFDAEWSFVIDRFACNVEHPSKDFIAHRNLNRVTCVAYFHTA

SEQ ID NO: 47505 - DNA, 1095 bp, Unknown
  Obtained from environmental sample
  misc_feature (1)..(1095): n is a, c, g, or t
ttgtacaaaaaattaaaggctggcgaaggcgagtatgccggagccgatccggacgatcccaatgaataccgcgcggaaaatgtcttttatgtgccgcctcaggcccggtgggactatctgcaaggcagggcgaaactctccactaccggaaaagacatggacgacgcaatggatgctgatcgatacaatggtaaagcaaaggaaattgacaagctgtttgaaagcgttgtgtctatttatgggcaggaaagcaatcagactacatggcgattgtgcaagatgaaccttgccttacgcggtatcgacagttccaatgttaaatggaataacgaaggttctttccttaacgacgctcatcccgatcttaaagcagattttgttattgcaaatcccccattcaacgacagtgactggtcgggcgatatgctccgcacggacggccgctggcagtacagccgcgaaacgccgccgccttatggcaacgcgaactacgcatggatacagcacttcgtctatcatttgaatccgaaaggttccgccggatttgtacttgctaaaggctcgctttcatcaaagacgaatggtgaggataaaatccgcaaggctctaattgacgaggggcttgtggattgtattgttaatttgccgactaaactgtttctaaatacacagatacccgcttgtttatggtttctttgccgtgctaaggagagtgataagaaacactcaagacgcgataaaattctgtttatcgacgcgcggaatatgggctcacttatcagccgaaaaacacgcgaactaaccgaaaaggatatccgtacaatagcggacacttaccatacatggaaatccggcaagggttataaggatataccgggattttgcaagtctgcgcttgtcaccgaagttgccgctcttgattatgttctcacgccgggacggtatatcggtttacccgatgatgaagacgatttcgacttcgcggaacgggtgcaaactttgactgccgaattggaagcgcaaatgaaggaaagcgttttgcttgacaagcgcatccgcgataatctggcgaaagtggaagtcataaacaaatga

SEQ ID NO: 47506 - protein, 364 aa, Unknown
  Obtained from environmental sample
  DOMAIN (36)...(324): N-6 DNA Methylase
  misc_feature (1)..(364): Xaa is any amino acid
MYKKLKAGEGEYAGADPDDPNEYRAENVFYVPPQARWDYLQGRAKLSTTGKDMDDAMDADRYNGKAKEIDKLFESVVSIYGQESNQTTWRLCKMNLALRGIDSSNVKWNNEGSFLNDAHPDLKADFVIANPPFNDSDWSGDMLRTDGRWQYSRETPPPYGNANYAWIQHFVYHLNPKGSAGFVLAKGSLSSKTNGEDKIRKALIDEGLVDCIVNLPTKLFLNTQIPACLWFLCRAKESDKKHSRRDKILFIDARNMGSLISRKTRELTEKDIRTIADTYHTWKSGKGYKDIPGFCKSALVTEVAALDYVLTPGRYIGLPDDEDDFDFAERVQTLTAELEAQMKESVLLDKRIRDNLAKVEVINK

SEQ ID NO: 47507 - DNA, 669 bp, Unknown
  Obtained from environmental sample
  misc_feature (1)..(669): n is a, c, g, or t
ttgagagatttttcaccctcaaacccttgccaaaaacgcattttttttctaaattataggtgtatcaaaaaaggatccttttttgagaaacgccatttttcctatctttccccaatgatatacggctatgtaagggtatcaacaacccaccaaaatgttgaaaatggcaggtttgaagtggcaaatttcgctcaaaaacaggggtttcctattgaaaaatgggtaacagaacaaatttcctcgcaaaaagaccttaaaaaacgaaaattgagccttttgctcaaaaaggtacgcaaaggcgatgtgataatcgcaacggaaatttcacggctggggcgaaatatgctggaaataatgaatattttaagtatttgcctaaatagggaatgtcaagtttggactatcaaggagaattataaattgggtaccgatattccaagcaaagtattggcggttgtgtttgggcttgttgcagaatttgaaaggaatttaatttccgcaaggacaaaagaggctttgacgagaatcaaggctgaggggaaaaaaacttgggcgaccaaagggaacgcagaaatctatgcagaaattggatatgtcaaaggagaaactgcaggatatgcttggcaacgggactcgcaaaaaggaggctgccagaatgcttggagttag

SEQ ID NO: 47508 - protein, 222 aa, Unknown
  Obtained from environmental sample
  DOMAIN (40)...(182): Resolvase, N terminal domain
  misc_feature (1)..(222): Xaa is any amino acid
MRDFSPSNPCQKRIFFLNYRCIKKGSFFEKRHFSYLSPMIYGYVRVSTTHQNVENGRFEVANFAQKQGFPIEKWVTEQISSQKDLKKRKLSLLLKKVRKGDVIIATEISRLGRNMLEIMNILSICLNRECQVWTIKENYKLGTDIPSKVLAVVFGLVAEFERNLISARTKEALTRIKAEGKKTWATKGNAEIYAEIGYVKGETAGYAWQRDSQKGGCQNAWS

SEQ ID NO: 47509 - DNA, 1011 bp, Unknown
  Obtained from environmental sample
  misc_feature (1)..(1011): n is a, c, g, or t
atggcgagacctgcctcggacgatgtgaaaatccgcagaaaggcgtgtgctaagggtatcccgtgcttaacttccatagatactgcaaatgcgcttgcagacagcttgctttctgggtacagcgagataaataccgaacttgttgatataaataatttgagaaacgagcgtatgaaaattaaatttacaaaaatgcaaggttgtggcaacgattatatttacataaattgttttgatttagacataaattcaccagagtcgctctcggttcttttatccgacaggcattacggcataggcggcgatggcgtggttttgattatgcgctccgatgttgccgatgcaaaaatgaggatgttcaacctagatggtagcgaaggtaaaatgtgcggaaacgcaatccgctgtgttgcgaaatatttatacgacaataacattatcagaaaattgcaaatgagcatagaaacgctcagcggcataaagaaactttatttaatcactcaaaatgggtttgtttcgtctgttaaggttgatatggggcatgccgtgctggagccggaaaagataccggttaagttttctggtgaaaacgcggtggcaaaacaggtgaccattggcggcgaggcatatactatcacttgtgtttctatgggtaatccccacgcggttgtgttttgcgaagatgttgagaatttacgtgtttccgagataggtcctttgtttgaaaaagaccctttgttcccagacagggtgaataccgaattcgtagaggttatggatagaaatcatttgaaaatgcgagtttgggagcgtggtagcggtgaaacgcttgcttgcggaacgggagcctgcgcctcggtggtagctgccgttctaaacgggcattgcgacaaaggcacggacgtaaaagttcaacttctcggtggcgagcttataatcaactacacaggcgaaaccgtctttatgactggcaaatgcaaaaaagtgtttgacggggtggtggagatataa

SEQ ID NO: 47510 - protein, 336 aa, Unknown
  Obtained from environmental sample
  DOMAIN (62)...(185): Diaminopimelate epimerase
  misc_feature (1)..(336): Xaa is any amino acid
MARPASDDVKIRRKACAKGIPCLTSIDTANALADSLLSGYSEINTELVDINNLRNERMKIKFTKMQGCGNDYIYINCFDLDINSPESLSVLLSDRHYGIGGDGVVLIMRSDVADAKMRMFNLDGSEGKMCGNAIRCVAKYLYDNNIIRKLQMSIETLSGIKKLYLITQNGFVSSVKVDMGHAVLEPEKIPVKFSGENAVAKQVTIGGEAYTITCVSMGNPHAVVFCEDVENLRVSEIGPLFEKDPLFPDRVNTEFVEVMDRNHLKMRVWERGSGETLACGTGACASVVAAVLNGHCDKGTDVKVQLLGGELIINYTGETVFMTGKCKKVFDGVVEI

SEQ ID NO: 47511 - DNA, 762 bp, Unknown
  Obtained from environmental sample
  misc_feature (1)..(762): n is a, c, g, or t
gtgctgtggggctttctggaaaccggcgaacgcatcagcgccggccgctgggccgcgctggccggggaagccgtgcgcgcggccctggacgccggcagcctgcccattctgaccggcggcacaggcctgtacctgcgagccttgctggacggcatggccgacactccgcctgtgcccgaatccatccgcaacgccttgctgcgcgcctgccgagagcacggcccggcaatcatgcacgatcggctgcgcgctgtagatccgatctgcgccgcccgtctgcatcccaatgaccgccagcgcattctgcgcgctctggaagtgtacgaatcaacaggcaaagccctgtcctggtggcagaccaggcgcacagcatccggcgcgccctggcgcgtgttgcgccttggcctcggactgcccctgtccgaactgaccccgatcctcgcccgccgcattgagcacatgctggagggcggcgccgcagccgaagccgaagcggccttacgccgctgcccggacagatcagcgccgggctggtccggcatcggctgcgccgagctgtatgcacacctgtgcggagagttggacacagacgcactgcgccgccagtggctggcgcgcaccagggcctacgccaaacggcaactgacctggttccgggccgatgcgcgcctgaactggttcagaccgggcgaacacaaagccatggaagataaggtgcaggaatcacttgcactaaagccggctgcccgccaggcatgttga

SEQ ID NO: 47512 - protein, 253 aa, Unknown
  Obtained from environmental sample
  DOMAIN (2)...(230): IPP transferase
  misc_feature (1)..(253): Xaa is any amino acid
MLWGFLETGERISAGRWAALAGEAVRAALDAGSLPILTGGTGLYLRALLDGMADTPPVPESIRNALLRACREHGPAIMHDRLRAVDPICAARLHPNDRQRILRALEVYESTGKALSWWQTRRTASGAPWRVLRLGLGLPLSELTPILARRIEHMLEGGAAAEAEAALRRCPDRSAPGWSGIGCAELYAHLCGELDTDALRRQWLARTRAYAKRQLTWFRADARLNWFRPGEHKAMEDKVQESLALKPAARQAC

SEQ ID NO: 47513 - DNA, 657 bp, Unknown
  Obtained from environmental sample
  misc_feature (1)..(657): n is a, c, g, or t
atgaaagaaaatttgaatttcaaaaagatgctgcaaatagcggccgcctccgatttgcctgttttattaacaggtgaatctggcacgggcaaggagctcgcggcaagagaactgcacgctcttggcaaaagaaataatagggcttttgttgcggttaattgcggggctgtttctgcgggcattgccgagtctcttttttgcgggcacgttaaaggtgcttttaccggagcgagcagcgatagggtgggtttcgttagagcggcgagtggtggcactctttttttagacgaagtggcggaactctccccagacattcaaaaaactcttttgcgtactttgcaggaaaaaattgttatgcctgttggcagccaaaaagagataaaggtggattttaggcttatctgtgcaactcacagaaatttgccagctcttttggaaaaagggctttttaggcaggatttatattttaggctggcttctttaaccataaacattccccctttgagggagcggggcgatttgcgaagcattgcagaatctctttggaaaggcgatgagcctttgagcgagcgtaatttgagggctttgcaaaattattcgtggcccggcaatataaggcagttgaaaaatgttttggaactgctatgccctttttaa

SEQ ID NO: 47514 - protein, 218 aa, Unknown
  Obtained from environmental sample
  DOMAIN (20)...(168): ATPase family associated with various cellular activities (AAA)
  misc_feature (1)..(218): Xaa is any amino acid
MKENLNFKKMLQIAAASDLPVLLTGESGTGKELAARELHALGKRNNRAFVAVNCGAVSAGIAESLFCGHVKGAFTGASSDRVGFVRAASGGTLFLDEVAELSPDIQKTLLRTLQEKIVMPVGSQKEIKVDFRLICATHRNLPALLEKGLFRQDLYFRLASLTINIPPLRERGDLRSIAESLWKGDEPLSERNLRALQNYSWPGNIRQLKNVLELLCPF

SEQ ID NO: 47515 - DNA, 630 bp, Unknown
  Obtained from environmental sample
  misc_feature (1)..(630): n is a, c, g, or t
ttgtatatttcccttatgaaaaaagtcacagaacgtcagcacgccatatacagctacataaaggaatttattttattgaataaatttcccccaaccgttcgcgaaataggcgaagaatttggcataaaaagcaccaatggggttagagaagccttgatttcccttgaaaaaaagggtttgataaaaaaatcctcaaggcaggcccgcagcatagagctattgcaaagcactccctctattgccaccgccgcccacgtgccccttattgggcgaatagccgcaggcacgccaattctggcagaagagaacgtagaagacaccttggctgtggacaaagccctgctccctcgtagcagccagatttttgcccttagagtacaaggggattctatgaccggagacggaattttaaacggcgatttagcaatcattcgtatgcaaaaaaatgcggaacgcgggcaaataatagccgccataatagacggcgacgccacgctaaagcactactaccccacagaaaacagaattgagctaagagcttcaaaccaggcatactcgccaataatcatagatgaaggcgatagcttctccattgcgggaatcttggctggcgttatacgcaagtgttga

SEQ ID NO: 47516 - protein, 209 aa, Unknown
  Obtained from environmental sample
  DOMAIN (12)...(73): Bacterial regulatory proteins, gntR family
  misc_feature (1)..(209): Xaa is any amino acid
MYISLMKKVTERQHAIYSYIKEFILLNKFPPTVREIGEEFGIKSTNGVREALISLEKKGLIKKSSRQARSIELLQSTPSIATAAHVPLIGRIAAGTPILAEENVEDTLAVDKALLPRSSQIFALRVQGDSMTGDGILNGDLAIIRMQKNAERGQIIAAIIDGDATLKHYYPTENRIELRASNQAYSPIIIDEGDSFSIAGILAGVIRKC

SEQ ID NO: 47517 - DNA, 882 bp, Unknown
  Obtained from environmental sample
  misc_feature (1)..(882): n is a, c, g, or t
atgcacaacgattttactttgttttcgagggttgttccttcggggaaaagcgtcatttattactatgcttatgacagcgaggggaaacgtttaggggctaagagtacagggctgactaataagacggcggctcgtaattactgtaataagttaagccgtgaggggaacttattgccgaaacaaaaagatatgccgacttttgctgaattttccgctttgttttgggattgggagaaaagcgaatacctgaaagaacgccggaaacgccgaaagctgacacaatcctatgcggacaagaataaaaagacgatcgaaaatattctggttccgtactttgggaaaatgaggctggacgctataaccggaaaggaaattgatacatggcttgattacctgatttccaaaaagtacaagaattcgaccgctaacggtttttatggctctttgcagactatgttgaaatgggctgtgaaaaaacacattattgagcgcgaccccttcaatgacgtggaaaaactgctacaggagcaaaaagaaaaaaagattatcacccatgaagaatttagggcgttgtttggcggtgactggaaaaggatttgggataataatttcctgatgtgtacggctcataaactggcgggactgacagggattaggtgctgtgaagtgttgggtttaaaaggggaatatgtgtttgatgaccatatttatatctgcgcccaatacgatgacgtgtacggttatcgggaaacgaaaactaaaacgaaacacaatataccgctgaccaaagaagttattgcggacttgaaaagacttatggagctgaacggaaagggttttgttttcggagactggcggcgatgtgcctataccagaaaatga

SEQ ID NO: 47518 - protein, 293 aa, Unknown
  Obtained from environmental sample
  misc_feature (1)..(293): Xaa is any amino acid
MHNDFTLFSRVVPSGKSVIYYYAYDSEGKRLGAKSTGLTNKTAARNYCNKLSREGNLLPKQKDMPTFAEFSALFWDWEKSEYLKERRKRRKLTQSYADKNKKTIENILVPYFGKMRLDAITGKEIDTWLDYLISKKYKNSTANGFYGSLQTMLKWAVKKHIIERDPFNDVEKLLQEQKEKKIITHEEFRALFGGDWKRIWDNNFLMCTAHKLAGLTGIRCCEVLGLKGEYVFDDHIYICAQYDDVYGYRETKTKTKHNIPLTKEVIADLKRLMELNGKGFVFGDWRRCAYTRK

SEQ ID NO: 47519 - DNA, 609 bp, Unknown
  Obtained from environmental sample
  misc_feature (1)..(609): n is a, c, g, or t
atggcaactgtggcaaagtgcaatttcaacaatgttaccagcattggggttagcgttttttacggttgcagcaactttaccagtataaccataccgtttgtcggggcaagcaagaacgcggtaaatgaaaacgcagtattcggatatatattcggatatacgacatctgctccaacacctgcggggtctgagcctccaagagggacaacgttgcaatatcaatattctgttatgggtgataatcttaatacgtattatacttattattactattacattccagcatcgctcaaaactgtcgtcataacagggggggacagtatccttgcctatgcttttagaaattgcgccaaccttactagcgtaaccatacctaacagcgttaccagcattggggattatgcttttagaaattgcaccaaccttaccgttctaaccataccgaacagcgttaccagcattggggattatgctttttatgatacagcatggtttaataataagccaaatggtttagtatatgtcggtaaagttgcatacaaatataaaggcactatgcaggcaaatacaaatataacgttactgaagacacaacagattcggccataa

SEQ ID NO: 47520 - protein, 202 aa, Unknown
  Obtained from environmental sample
  misc_feature (1)..(202): Xaa is any amino acid
MATVAKCNFNNVTSIGVSVFYGCSNFTSITIPFVGASKNAVNENAVFGYIFGYTTSAPTPAGSEPPRGTTLQYQYSVMGDNLNTYYTYYYYYIPASLKTVVITGGDSILAYAFRNCANLTSVTIPNSVTSIGDYAFRNCTNLTVLTIPNSVTSIGDYAFYDTAWFNNKPNGLVYVGKVAYKYKGTMQANTNITLLKTQQIRP

SEQ ID NO: 47521 - DNA, 708 bp, Unknown
  Obtained from environmental sample
  misc_feature (1)..(708): n is a, c, g, or t
atgccaggcaaggccctgtttgacgtgacaaccccaaaggggaaagcggaggcgtttgccttgttatatccgtatcttgacgcgctggagtcaaaaaccgagcgcgatgcctgcattgaagttcttgccgatgaaatgcgggcggatagaaacgcggtagataatgattatgaacgctggcggcgctccggcgggggcgcttcggcaggcagagcgaaagacgctgattctaaggaggtttccggtactgaacggccgatacggatgaacgaggagctgtttttgcttatcgtggtatcggtcaatatggaattatatcctgaattccgtgcttcgattgagatgaaggaaattgaggatccttacgcgaaagagttgtttgtcgcccttgaagagtgttttattaatgaggaaagcggaacggacgctttcctggcgcgtattaactcaagtcttttgcgtaattttattgtcgagcggggaatatccccggaattcagggcaaatgagaaacgtgatcccaaaaagttgatggaggacggtattaagcgggttaaggagaaaaaacttcgccgcaggctttccgaaatcaacgcggaactgcggataatggaacggaataccggcaatgccggtgatgatttgagtggtcttgtcgctgagaaaatgcagcttgacgctgaaattcgcaaactggaaggtaattag

SEQ ID NO: 47522 - protein, 235 aa, Unknown
  Obtained from environmental sample
  misc_feature (1)..(235): Xaa is any amino acid
MPGKALFDVTTPKGKAEAFALLYPYLDALESKTERDACIEVLADEMRADRNAVDNDYERWRRSGGGASAGRAKDADSKEVSGTERPIRMNEELFLLIVVSVNMELYPEFRASIEMKEIEDPYAKELFVALEECFINEESGTDAFLARINSSLLRNFIVERGISPEFRANEKRDPKKLMEDGIKRVKEKKLRRRLSEINAELRIMERNTGNAGDDLSGLVAEKMQLDAEIRKLEGN

SEQ ID NO: 47523 - DNA, 585 bp, Unknown
  Obtained from environmental sample
  misc_feature (1)..(585): n is a, c, g, or t
atgcctacacccaaactctccctcgtccttgcttgcacattgctnttcgttgcttgcgaaaagaaaaatgaaccgcaaaaagacacattcaccgatacacgagacggcaaaacatacaaaaccgtaaaaattggcgagcagatttggatggcggagaatttgaattacgaagcagaagattctaaatgctataatgatagtacagcctactgcgtaaaatatggcaggttgtataattgggaaacagctatgaaagcctgtcccagcggttggcatttacccagcagcgaggaatgggaagtattggtagtagcggctggcggtaacaaaactcttaaaaccactaaagggtggaacgaaaatggcaacggcgaggataagttcggcttttctgctctgccgggcggtatgggctatccggatggcagtttcgtctatgtcggctcctacagtggctggtggagtagttcaatgagaaaaaatagcgaagactattttatggacatatactacaacatctcggcaaagctttggatcagccttgataagagcagcttgcgaagtgtccgttgcttgcaggactaa

SEQ ID NO: 47524 - protein, 194 aa, Unknown
  Obtained from environmental sample
  SIGNAL (1)...(18)
  misc_feature (1)..(194): Xaa is any amino acid
MPTPKLSLVLACTLLFVACEKKNEPQKDTFTDTRDGKTYKTVKIGEQIWMAENLNYEAEDSKCYNDSTAYCVKYGRLYNWETAMKACPSGWHLPSSEEWEVLVVAAGGNKTLKTTKGWNENGNGEDKFGFSALPGGMGYPDGSFVYVGSYSGWWSSSMRKNSEDYFMDIYYNISAKLWISLDKSSLRSVRCLQD

SEQ ID NO: 47525 - DNA, 507 bp, Unknown
  Obtained from environmental sample
  misc_feature (1)..(507): n is a, c, g, or t
ttgttgattattatgttgatggttgggatcaaccaggggcttgcgaaaactcaggcaatgatatggtatgattcgggcgtctatgcgatcttttcagccgccggaaacagcggtaacggaactatagcgcaggcgaaggaataccgtatagctggaaaaaaagtttgggcgattggcgtagattccgatcaatttgaagacgggctttacaataaaaaagattccgccgttcttacatcaatggtgaaacgagtggatagcgctgttattttcgctcttaaagaggttaaaaataaaacctttaccccgagcgttatagtttttgatttgaaagccgacggcgttgcctattccgacaaaaatcctgcgttaagcaaaaatataaacgaaagattggagcttataaaaaagcagatcataagcggaaatattgttgttgcggcaacccttaaagattctttgaaactgccgggtttcccgaaaaatttaagggcgaaagacgactaa

SEQ ID NO: 47526 - protein, 168 aa, Unknown
  Obtained from environmental sample
  misc_feature (1)..(168): Xaa is any amino acid
MLIIMLMVGINQGLAKTQAMIWYDSGVYAIFSAAGNSGNGTIAQAKEYRIAGKKVWAIGVDSDQFEDGLYNKKDSAVLTSMVKRVDSAVIFALKEVKNKTFTPSVIVFDLKADGVAYSDKNPALSKNINERLELIKKQIISGNIVVAATLKDSLKLPGFPKNLRAKDD

SEQ ID NO: 47527 - DNA, 420 bp, Unknown
  Obtained from environmental sample
  misc_feature (1)..(420): n is a, c, g, or t
gtgtttcttggttttcttgtcgctactctgcttattcttataatcgggaaaaatccgtctgtcatgtatcaggctatgctgcaggttgtcagcggatttgattcccggcgaggcacatggaacattcgctatgtcggggaatggatagtaatttcaatgccgcttattttatgcggtttaagcatgggtttttccgtccgtgccggattattcaacatcggggcggaagggcagtacattgccggattaacggcggctcaattaatcgccgttggttttacaaacgccgcaggagagcggtttcctgttcatttttcgctcgctgtgttaggtgcaatgtttttcggggcgctgtggggcggcatttccggctttttcaggcaagatacaaagtatcggaagttgtctccacgattatga

SEQ ID NO: 47528 - protein, 139 aa, Unknown
  Obtained from environmental sample
  misc_feature (1)..(139): Xaa is any amino acid
MFLGFLVATLLILIIGKNPSVMYQAMLQVVSGFDSRRGTWNIRYVGEWIVISMPLILCGLSMGFSVRAGLFNIGAEGQYIAGLTAAQLIAVGFTNAAGERFPVHFSLAVLGAMFFGALWGGISGFFRQDTKYRKLSPRL

SEQ ID NO: 47529 - DNA, 1737 bp, Unknown
  Obtained from environmental sample
  misc_feature (1)..(1737): n is a, c, g, or t
gtggtacctcgggccgaaagagacgaaaaagattcacatgacggaaccatacaactggacataccccgacgaaaagcgcgagcgcaagatgttcacgctgagcgccccatcatggctgacggaaagttcgttggcgtcgccggtatcgacctgcagttggatttgatgcagaaacacctgttcgacaagatgaccgacgccaagaaaggggcctacgccgtattgctttccaacgagggtttgatggccgcgcaccctaaatacgaactggtgctcaacgaggtcggcgaagacatggaaccgtcggaacgccaggcgctgaaggacgccataaagaaaggcgagtaccgccgtgtgctcaagaaaagcctcaatacgggtactctttcccttatctcctacgttccaatgctgcctgccggacttgagtcgccgtggtccctagcctacgccgtctctcttgacgttgtgcaggccgatgcgaacaaggctcgggaatacatgataatactcgggatttcctgcgccgccgcgtgggggatatttcttctgctcttcatgtccgccattttcggcagaatcacccgtacggtcgcggcgataagcaaaatgaccgagggcgacctgaccgtccgcttcgacgggcgcgacaaggacgagttcgggcagatggcgcggggtctgaacagtctggtggagaaactccgttccatgatagagaccatcggcagaatgaccgagggcgacggcgacctgaccatccgcttcgaagagaacagcggcggcgagttcgggcagatggaacgcggcctgaataggctgatggagaaactccacaacaccgtaaagacgacgcaagccgaggccaaaaatctgtcaagcgcgtccacggcgctgttcgaactctcgaacgtgctctccaaatcctccgagaccacgcttgacgaatcaataagcgtttcgcgtcaaagcagggagacgagcggcaacgttcaaggcatagcgggcgaagcggcgcggtcgagcgtcagtgcctcggaactctcgtcaacagcggaaaagatgggcgcgaatatgaacaccgttatcaaagccgtgggagaaatgaacgagaatttcaacagaattatctccggcacggtagagtcaaaaaccatagccgacagagcggtagacagcgccgccgccgcggtgaacgtaatggacgcgctcggcgagtcggtgaaagagatcggacggtttacggatattatcaggagcatagccaaaaagacgaacctgctgtcgctaaacgcctcgattgaagcggcgcgagccggagacgccggaaggagcttcgcggtagtggccggagacgttaaacaattggcgacccaaagcgtgctgaacgtcaacgacatctcgcaacgcatagaaaaggtgcaaaccggaaccgccgacgccgtcagggccataaaggagatatccgccattataaaaaagataggcgaaacctccggttcgatattcgagaacgtagagcggcagatgaaagtgacccagaacctgacgaacaccgccgagcagacaaacacaggcgcccagcacgtagtctcggcgataggcgacgtggccgcgtccatcaaaacctccgccaaacacgccgacatagccgccgccggcgcggagcgcgtatccgacagcataggcgtaatccgccaagccgcggaaaagacgacagccgactccatagaatga

SEQ ID NO: 47530 - protein, 578 aa, Unknown
  Obtained from environmental sample
  DOMAIN (342)...(575): Methyl-accepting chemotaxis protein (MCP) signaling domain
  misc_feature (1)..(578): Xaa is any amino acid
MVPRAERDEKDSHDGTIQLDIPRRKARAQDVHAERPIMADGKFVGVAGIDLQLDLMQKHLFDKMTDAKKGAYAVLLSNEGLMAAHPKYELVLNEVGEDMEPSERQALKDAIKKGEYRRVLKKSLNTGTLSLISYVPMLPAGLESPWSLAYAVSLDVVQADANKAREYMIILGISCAAAWGIFLLLFMSAIFGRITRTVAAISKMTEGDLTVRFDGRDKDEFGQMARGLNSLVEKLRSMIETIGRMTEGDGDLTIRFEENSGGEFGQMERGLNRLMEKLHNTVKTTQAEAKNLSSASTALFELSNVLSKSSETTLDESISVSRQSRETSGNVQGIAGEAARSSVSASELSSTAEKMGANMNTVIKAVGEMNENFNRIISGTVESKTIADRAVDSAAAAVNVMDALGESVKEIGRFTDIIRSIAKKTNLLSLNASIEAARAGDAGRSFAVVAGDVKQLATQSVLNVNDISQRIEKVQTGTADAVRAIKEISAIIKKIGETSGSIFENVERQMKVTQNLTNTAEQTNTGAQHVVSAIGDVAASIKTSAKHADIAAAGAERVSDSIGVIRQAAEKTTADSIE

SEQ ID NO: 47531 - DNA, 795 bp, Unknown
  Obtained from environmental sample
  misc_feature (1)..(795): n is a, c, g, or t
ttgtcagatcggccgangttcgcctgtttttcgggagtttgccgtttctttcattctatggagtcggctgtcgtcttttccgcggcttggcggattacgcctatgctgtcggatacgcgctccgcgccggcggcggctatgtcggcgtgtttggcggaggttttgatggacgcggccacgtcgcctatcgccgagactacgtgctgggcgcctgtgtttgtctgctcggcggtgttcgtcaggttctgggtcactttcatctgccgctctacgttctcgaatatcgaaccggaggtttcgcctatcttttttataatggcggatatctcctttatggccctgacggcgtcggcggttccggtttgcaccttttctatgcgttgcgagatgtcgttgacgttcagcacgctttgggtcgccaattgtttaacgtctccggccactaccgcgaagctccttccggcgtctccggctcgcgccgcttcaatcgaggcgtttagcgacagcaggttcgtctttttggctatgctcctgataatatccgtaaaccgtccgatctctttcaccgactcgccgagcgcgtccattacgttcaccgcggcggcggcgctgtctaccgctctgtcggctatggtttttgactctaccgtgccggagataattctgttgaaattctcgttcatttctcccacggctttgataacggtgttcatattcgcgcccatcttttccgctgttgacgagagttccgaggcactgacgctcgaccgcgccgcttcgcccgctatgccttga

SEQ ID NO: 47532 - protein, 264 aa, Unknown
  Obtained from environmental sample
  misc_feature (1)..(264): Xaa is any amino acid
MSDRPXFACFSGVCRFFHSMESAVVFSAAWRITPMLSDTRSAPAAAMSACLAEVLMDAATSPIAETTCWAPVFVCSAVFVRFWVTFICRSTFSNIEPEVSPIFFIMADISFMALTASAVPVCTFSMRCEMSLTFSTLWVANCLTSPATTAKLLPASPARAASIEAFSDSRFVFLAMLLIISVNRPISFTDSPSASITFTAAAALSTALSAMVFDSTVPEIILLKFSFISPTALITVFIFAPIFSAVDESSEALTLDRAASPAMP

SEQ ID NO: 47533 - DNA, 900 bp, Unknown
  Obtained from environmental sample
  misc_feature (1)..(900): n is a, c, g, or t
atgagaaacggattaacaaaaagagaagaacgcgcctcctatttttttctgaccgggccggcggtaattatctacttgtttgtaatggccttcccgacggttttttccgtggttttaagctttaccaattattcgggaggcaaaattttcggcaacccgaatgttggttttgccggtctgaagagttacgaggctattttttcagacaagtacttttacatgtcgctcattaataatttctggatagtgcttatatctgtttttgggcagatacccctgggatttttcctggcctacatactgtcgcgtgggcttatccggggaacggatttttttcagaccatgatatatctgcccaatgtaatctccgccgttattatcggcatactgttcaataaattcctgctgacctctgacagcgtttttttggaaatccagcgtaattttaatccggctgcggaattcgtacccggcaaaaacgccatgctgcccgttctgctcgtgatactctggatgtataccggaacgtatgtgatcatttttttggcaaacttacagaagatagatccatcaattattgaagcctcaaagatcgacggcgcgagcgaaatgcagactttgcgttatattattctcccggctttgtccggggtgattgttaccaccgcaatcctggcgatttcaggctcgcttaaatcatttgatctgatttttgtaatgacccagggagggcccgcccacaggaccagcgtccttgccctttatatgtacgagaaggcgtttcggggagcgccgaattatccggtggcaaatgctatttcaacggtgatggttattatcagttttatactgattggaatcacaagaagcgttgaaaaacgctactcgtcgggaaggtag

SEQ ID NO: 47534 - protein, 299 aa, Unknown
  Obtained from environmental sample
  DOMAIN (72)...(297): Binding-protein-dependent transport system inner membrane component
  misc_feature (1)..(299): Xaa is any amino acid
MRNGLTKREERASYFFLTGPAVIIYLFVMAFPTVFSVVLSFTNYSGGKIFGNPNVGFAGLKSYEAIFSDKYFYMSLINNFWIVLISVFGQIPLGFFLAYILSRGLIRGTDFFQTMIYLPNVISAVIIGILFNKFLLTSDSVFLEIQRNFNPAAEFVPGKNAMLPVLLVILWMYTGTYVIIFLANLQKIDPSIIEASKIDGASEMQTLRYIILPALSGVIVTTAILAISGSLKSFDLIFVMTQGGPAHRTSVLALYMYEKAFRGAPNYPVANAISTVMVIISFILIGITRSVEKRYSSGR

SEQ ID NO: 47535 - DNA, 954 bp, Unknown
  Obtained from environmental sample
  misc_feature (1)..(954): n is a, c, g, or t
atggcgagagcgcgtctgcttttacggcaagcgtccagcatagccttggatctttccaaacagaaaaccatgtatcttgcgcgccagagggcccaatattgggacggccgaatgggcggctatatagacgtgctgcagacactttcgaatataatgaacttttatgaaaacctgcctccggcagaacggcgacagacctatgaagacacaatgatgtctgtttttgaggacatgcccgactttgtacgaatgtttaccgtctggaaaccggacgccattgacggcatggacgccaaaaatataggcagaatgggctcaaccgccacgggacagttcgcatatgccctggcaagagacaccggggagataaagcctttaaccgctgtggttgttgatgaagtaatggctcaaatcacagggcctaacgccagagtagtcggaatgagcgatcccgccccattcaagaatatgggaaaagatacttatgcggtcagaattgtagtccccattataaacaagcgcctcaatgaaacagtcggagctataggctgtcagttggatatcagcatgatacaacccagggtagagcaaactattaaagatttcgatgaagttacttctatggttatttattccgacaacgggtttgtattgggaaattacctgccggaatttataggaaagcaaattgacacggaaacacaatacggcccttatttacaagaagtcaaagatgttattaaaaactcgcaggaatggcaagggacagcttacgaccccgaattgaaaacaaacatggtaatggcagtagccaatattcccataggggtttctcctacaacatggtcggtaatggtcggttcaaccgaagcctacatactgaaagaatgttacgcgatgagaaactttgtcatcacttttggcgcagcagccattttagcggcatggcgctga

SEQ ID NO: 47536 - protein, 317 aa, Unknown
  Obtained from environmental sample
  misc_feature (1)..(317): Xaa is any amino acid
MARARLLLRQASSIALDLSKQKTMYLARQRAQYWDGRMGGYIDVLQTLSNIMNFYENLPPAERRQTYEDTMMSVFEDMPDFVRMFTVWKPDAIDGMDAKNIGRMGSTATGQFAYALARDTGEIKPLTAVVVDEVMAQITGPNARVVGMSDPAPFKNMGKDTYAVRIVVPIINKRLNETVGAIGCQLDISMIQPRVEQTIKDFDEVTSMVIYSDNGFVLGNYLPEFIGKQIDTETQYGPYLQEVKDVIKNSQEWQGTAYDPELKTNMVMAVANIPIGVSPTTWSVMVGSTEAYILKECYAMRNFVITFGAAAILAAWR

SEQ ID NO: 47537 - DNA, 1383 bp, Unknown
  Obtained from environmental sample
  misc_feature (1)..(1383): n is a, c, g, or t
atggcaagggacagcttacgaccccgaattgaaaacaaacatggtaatggcagtagccaatattcccataggggtttctcctacaacatggtcggtaatggtcggttcaaccgaagcctacatactgaaagaatgttacgcgatgagaaactttgtcatcacttttggcgcagcagccattttagcggcatggcgctgatatattttgtcttaagcagaactacaaaaccaatcgtaaaattagcggaaactcttaaggatatttctgaaggcgaaggcgacttaacgcggactataaccgtcaattccaaagatgagataggcgaccttgccctgtacttcaacaaaacgctggataaaatcaagaatatgatcattcatatcaaggatgaggcggatggtttatcagggataggcaatgatcttgcgggcaatatgaccgagactgccgccgcggtaaatcaaattaccgccaacatccagaacatcaagggcaggattattaaccagagcgccagcgttacccagaccaacgccaccatggaacaggttatcgcgaatatcaacaaacttaacgatcaggtagaagaccagagcagcaatatgtccaaggcttcgtccgccatagaggaaatggtagccaatgtcagttcggtaacccaaacgctggtgagaaacgcggataatgtaaaaatcctggaggaagcctctgaagtgggccgcaacgggctgcgtgaagtggcgactgatattcaggaaatagcccacaaatccgaagacctgttgaaaattaacgcggtaatgaaggacatcgccagccagaccaatctgctttcaatgaacgcggcgatagaagcggcccacgccggggaagcgggcaaaggcttcgccgttgtggccgatgaaatccgcaagctggcggaaagctcaagcgaacagtcgaagaccatcggcgccgtacttaagaatataaagggttcgatcgacaagataacccattccacggaaaacgtgcttaacgagtttgttgcgattgactcaagcgtcaagacggtagtggagcaggaggataatatccggaacgcaatggaggaacagggcgagggcagcaggcagatactggacggcgtaagcaatgtaaacgaaattacccggcaggtaaagggcggttccgctgaaatgcttgaaggcagcagggaagtgataaatgaaagccacaacctggaaacggtgacgcaggaaataaccggcggcatgaacgagatggcttccggcgcggaacaggtaaacatagcggtacaccatgtcaacgagatatgtgtaaaaaaccgcgagaggattggctctttgatgcaggaagtgtcacgcttcaaagttgcataa

SEQ ID NO: 47538 - protein, 460 aa, Unknown
  Obtained from environmental sample
  DOMAIN (55)...(123): HAMP domain
  misc_feature (1)..(460): Xaa is any amino acid
MARDSLRPRIENKHGNGSSQYSHRGFSYNMVGNGRFNRSLHTERMLRDEKLCHHFWRSSHFSGMALIYFVLSRTTKPIVKLAETLKDISEGEGDLTRTITVNSKDEIGDLALYFNKTLDKIKNMIIHIKDEADGLSGIGNDLAGNMTETAAAVNQITANIQNIKGRIINQSASVTQTNATMEQVIANINKLNDQVEDQSSNMSKASSAIEEMVANVSSVTQTLVRNADNVKILEEASEVGRNGLREVATDIQEIAHKSEDLLKINAVMKDIASQTNLLSMNAAIEAAHAGEAGKGFAVVADEIRKLAESSSEQSKTIGAVLKNIKGSIDKITHSTENVLNEFVAIDSSVKTVVEQEDNIRNAMEEQGEGSRQILDGVSNVNEITRQVKGGSAEMLEGSREVINESHNLETVTQEITGGMNEMASGAEQVNIAVHHVNEICVKNRERIGSLMQEVSRFKVA

SEQ ID NO: 47539 - DNA, 666 bp, Unknown
  Obtained from environmental sample
  misc_feature (1)..(666): n is a, c, g, or t
ttgcttcccggacagccagtgccaaatacttttcgttatgcaactttgaagcgtgacacttcctgcatcaaagagccaatcctctcgcggttttttacacatatctcgttgacatggtgtaccgctatgtttacctgttccgcgccggaagccatctcgttcatgccgccggttatttcctgcgtcaccgtttccaggttgtggctttcatttatcacttccctgctgccttcaagcatttcagcggaaccgccctttacctgccgggtaatttcgtttacattgcttacgccgtccagtatctgcctgctgccctcgccctgttcctccattgcgttccggatattatcctcctgctccactaccgtcttgacgcttgagtcaatcgcaacaaactcgttaagcacgttttccgtggaatgggttatcttgtcgatcgaaccctttatattcttaagtacggcgccgatggtcttcgactgttcgcttgagctttccgccagcttgcggatttcatcggccacaacggcgaagcctttgcccgcttccccggcgtgggccgcttctatcgccgcgttcattgaaagcagattggtctggctggcgatgtccttcattaccgcgttaattttcaacaggtcttcggatttgtgggctatttcctga

SEQ ID NO: 47540 - protein, 221 aa, Unknown
  Obtained from environmental sample
  misc_feature (1)..(221): Xaa is any amino acid
MLPGQPVPNTFRYATLKRDTSCIKEPILSRFFTHISLTWCTAMFTCSAPEAISFMPPVISCVTVSRLWLSFITSLLPSSISAEPPFTCRVISFTLLTPSSICLLPSPCSSIAFRILSSCSTTVLTLESIATNSLSTFSVEWVILSIEPFIFLSTAPMVFDCSLELSASLRISSATTAKPLPASPAWAASIAAFIESRLVWLAMSFITALIFNRSSDLWAIS

SEQ ID NO: 47541 - DNA, 1563 bp, Unknown
  Obtained from environmental sample
  misc_feature (1)..(1563): n is a, c, g, or t
ttgccgcacgtcacgtgctctaccacgaggggcacgccgttttatcttaaccttaacccgggcggggacgtcgggcacgccgcgatatgggggccgacgggggcagggaagtccacgctcctaaaccttctggaagcgcagtttttcaggtacccagacagccaggtaatcgtcttcgacaagggcaggagctgcaggcagctgtgcctggcctgcggggggctgttcttcgagccggcggcggaaagcgtcgcaggcgtttccttccagccgcttagggacctcgaaacggagcgcgacctgtccgactcatcggacttcatagaatcccttttcgaagtgaataaatttgaagtaacgcctgcaatgcgggccagcataaagcagaccctcgaatttatgaggggaataccggagaaggacaggactataaccagcttcctccattattgcaattacgtggacccaatatcgaaaaaaaacattttcagggagcagatgggcgactaccgctggctcggcggcaagttcggcaaggtattcgattcttccttttccgggctttccatcgacacgcgcttcctggccatcgaaatggaggccctgatgaaccgcggcgaaggctgcatagtccctgctttggtctacctcttcaacatggtcgacaagaaattcgacggccgccttacgctgctggtgctggacgaagcctggctctttttgaagaacgagacgttcagcgaaaagattgccgaatggctcaaggtcttgcgcaagaaaaatgtattcgtcgtcttcgccacgcaggacgtcgcggacgtggaaaagtcgcctttgaagaccaccatcgtccagcagtgcctgaccaagatatacctggccgacccttccgcgcttaccaacgccatgaaatccgtgtattcggccttcgggctcacggaaaccgaaatagccttcatacagtccgctgaaatgaaaagggactatttctacacaagccccctggggcgcaggatgttccagctggacttgggaaagctgactctttccctgatcggcgcaccgaggcacgagcttttggacaggctcgcgtccgagaagggggccgggatccctctatgcagggacttgcttgccgcttccaaaatagactaccggaggctcctgcggcacgacgcgcctgccgacagggagggcgatcctggggccagggccgcgcgggctcccgtttcggtcccgccggaggagccggatcgggcaattccggccaatggcggcatcggccgtgccgcgagcaccgcgacttcttcttccgcttcgggctttgcggaagcttccattatattcgacgctatcgccgccatcccggaaaggcgcaaaaaaggcgaagggcgggccgccgaccttctggccaaaaagctgggggtaagcccgtctaccatataccaggcccttgccattgccaaaagcggaaattcggatatcgtcgagcaagtaaagaagggcgagatcgggtttaaaaaagcctgcaaaatgctacggcaggcgaaagatgcaggctaa

SEQ ID NO: 47542 - protein, 520 aa, Unknown
  Obtained from environmental sample
  misc_feature (1)..(520): Xaa is any amino acid
MPHVTCSTTRGTPFYLNLNPGGDVGHAAIWGPTGAGKSTLLNLLEAQFFRYPDSQVIVFDKGRSCRQLCLACGGLFFEPAAESVAGVSFQPLRDLETERDLSDSSDFIESLFEVNKFEVTPAMRASIKQTLEFMRGIPEKDRTITSFLHYCNYVDPISKKNIFREQMGDYRWLGGKFGKVFDSSFSGLSIDTRFLAIEMEALMNRGEGCIVPALVYLFNMVDKKFDGRLTLLVLDEAWLFLKNETFSEKIAEWLKVLRKKNVFVVFATQDVADVEKSPLKTTIVQQCLTKIYLADPSALTNAMKSVYSAFGLTETEIAFIQSAEMKRDYFYTSPLGRRMFQLDLGKLTLSLIGAPRHELLDRLASEKGAGIPLCRDLLAASKIDYRRLLRHDAPADREGDPGARAARAPVSVPPEEPDRAIPANGGIGRAASTATSSSASGFAEASIIFDAIAAIPERRKKGEGRAADLLAKKLGVSPSTIYQALAIAKSGNSDIVEQVKKGEIGFKKACKMLRQAKDAG

SEQ ID NO: 47543 - DNA, 351 bp, Unknown
  Obtained from environmental sample
  misc_feature (1)..(351): n is a, c, g, or t
atgcctcgttccataccgcactcggcgcgcatgaagcgccggaagaatatgcgcaagcaaacccggggatttttcggcacagccagccggggatacaaaaaggcgcgcaccctcgtcatgcgcgcaatgcggtattcctaccgcgatcgccgcgcgcgccggcgcgatatgcgctccctctggattgtgcgtatcaacgccgcctgccgcatctgcggcggaagctacagccgctttatcgacgccctcaagaaaaacgagatgatactcgatcgcaaagtactcgcgtatatcgccgctaccgatctggaggcgttcaaggccatttataatcaggcgatgccacgctag

SEQ ID NO: 47544 - protein, 116 aa, Unknown
  Obtained from environmental sample
  DOMAIN (9)...(109): Ribosomal protein L20
  misc_feature (1)..(116): Xaa is any amino acid
MPRSIPHSARMKRRKNMRKQTRGFFGTASRGYKKARTLVMRAMRYSYRDRRARRRDMRSLWIVRINAACRICGGSYSRFIDALKKNEMILDRKVLAYIAATDLEAFKAIYNQAMPR

SEQ ID NO: 47545 - DNA, 378 bp, Unknown
  Obtained from environmental sample
  misc_feature (1)..(378): n is a, c, g, or t
gtgccgcttacatacgattgggtcagagacttcagcgagggttttgcagaggtctggcttgggagtaagcagggtttcgttgatgcgaccggaaaagaggttgtaccgcccaagtacgacatagtctacgaattcagtgagggctttgcagtggccaaacttggggataagtatggtttcgttgataagaccgggaaagaggtcgtaccacccaagtacgacgaagcctacggcttcagtgagggctttgcatgggtcaagcttggcgggaaatggggtttcattgatacgaccgggaaagagatagtaccgcacaagtacgacgcagtcagctccttcagagatgttttggagaccacgttcccaccgggaatatag

SEQ ID NO: 47546 - protein, 125 aa, Unknown
  Obtained from environmental sample
  DOMAIN (91)...(107): KWG Leptospira
  misc_feature (1)..(125): Xaa is any amino acid
MPLTYDWVRDFSEGFAEVWLGSKQGFVDATGKEVVPPKYDIVYEFSEGFAVAKLGDKYGFVDKTGKEVVPPKYDEAYGFSEGFAWVKLGGKWGFIDTTGKEIVPHKYDAVSSFRDVLETTFPPGI

SEQ ID NO: 47547 - DNA, 1707 bp, Unknown
  Obtained from environmental sample
  misc_feature (1)..(1707): n is a, c, g, or t
ttgagaaatgaattgcagaacgaaactctgcaatttttgggaacggaacacggaaattcagtacgcgaagtatatccgagcatagctatgcctgtttatggcaatttttctgtggcaggcatttctgaagcaaaaaatgcggaactcactttgctctttggttttggaaatactgttgaaaaaaagataaaagtgaaattggaagcaaaaaattccgccaaacagggaaatgtgtatagaatttgggcgcagaagaaaattgaggaattggatttgaactacgaaaagaaccgcaccgaacttacggaacttggacagcaatttggaattgtcacgcggaatacatcgcttatagtccttgaaacacttagtgactacattcgctatgacattgaaccgccagctgccgaacctgaactgctagccaaatatcagagcaatcgaaaacattatgatgaaaaacgcaatatattggagagggcaatagctgcagccgaagatataaaaaaatggtgggatacagattttacacctataaaacccaagtatccaacaccggataaagaagccagccaagtcacccgtagtagttctgcggacgatggtgatggtagccgtttaatggctggcaacagtggtacagagaaacctaggaagatgcagggtgcgggcggaaaacctcgcggcaaaggtcagccagatgcttatcaaagccgcggtgttttgaaaatgctcactgccaagggcgaaaaatcttacgctgaanatgaacaagaaaacgctcaacctactattactattaaatccattaaaaaagataatgagtatttgaaaaaattaacgggaaaaactgcggaagattatcaaatatatttgaaattgagaactgattatgccaattcgccaattttttattttgatatggcagattggttttacaaaaacaacgacagagaaaccgctcttcgcatactcacgtccattgccgatttggagttagagaacgcttcgctttataaattgctcggctataagtttaaagaatacggcgaacacgtgcttgaaaaatttgtttaccaaaaggtaattcagtggcgaccaatggaaccgcaaagctaccgcgactacgctttagcccttgccgaanacggagagatgcaggcagcactggactcgctttatggggtactcacaaggtcatattcggaaaatatcactaggcgtagccgaggaatagaggaagttgtggttgtggaaataaataatttgattgccaaaaacgcaaaactgaatacatcaaatatagacaaacgcctgataatgaacattcccattgatattcgcgtggttataaactggaatatgaacaacaccgatattgacctgtacgttaaagacccaaacggcgaaatatgctcttacagccgccgcaaaacgggcataggtgggcgcataagcacagataatacaggtggctacggacctgagcaattccttttgaaaagggcgataaagggaaaatatcaggtttatgtggattactatggcgaccgccaatttaccgcggctggcccatctaccattatggcggaaatctacaccaaatactcagacaaaaccgagcaacgccaaattgtatctttgcaaatgtctaaggcgactaaaaaagaagataaaaaagttgaggtagctgaatttgcgttttaa

SEQ ID NO: 47548 - protein, 568 aa, Unknown
  Obtained from environmental sample
  misc_feature (1)..(568): Xaa is any amino acid
MRNELQNETLQFLGTEHGNSVREVYPSIAMPVYGNFSVAGISEAKNAELTLLFGFGNTVEKKIKVKLEAKNSAKQGNVYRIWAQKKIEELDLNYEKNRTELTELGQQFGIVTRNTSLIVLETLSDYIRYDIEPPAAEPELLAKYQSNRKHYDEKRNILERAIAAAEDIKKWWDTDFTPIKPKYPTPDKEASQVTRSSSADDGDGSRLMAGNSGTEKPRKMQGAGGKPRGKGQPDAYQSRGVLKMLTAKGEKSYAEXEQENAQPTITIKSIKKDNEYLKKLTGKTAEDYQIYLKLRTDYANSPIFYFDMADWFYKNNDRETALRILTSIADLELENASLYKLLGYKFKEYGEHVLEKFVYQKVIQWRPMEPQSYRDYALALAEXGEMQAALDSLYGVLTRSYSENITRRSRGIEEVVVVEINNLIAKNAKLNTSNIDKRLIMNIPIDIRVVINWNMNNTDIDLYVKDPNGEICSYSRRKTGIGGRISTDNTGGYGPEQFLLKRAIKGKYQVYVDYYGDRQFTAAGPSTIMAEIYTKYSDKTEQRQIVSLQMSKATKKEDKKVEVAEFAF

SEQ ID NO: 47549 - DNA, 1329 bp, Unknown
  Obtained from environmental sample
  misc_feature (1)..(1329): n is a, c, g, or t
gtgctgcttgagatagtgcggtatcacgagatacagaagctcatcgcgtcgggtcaggttgtgcgggctaagaacagcgccgaggattttcgggaaacttacccgcgttcgcgttacactgagcctgtcaaggtgtttttgagccagtttgtgaaagagcagcaacagcagaggaagggccccaagccgcttcaggtggggcttttggcgcctatgacgggcgaggacgccgatatcgggaagtttatactgcaaggggtgaaattggcgctggacgggtacaaccagcgggcggagagccctataaagctcatagtttacgacactaagggcagccctgtagagacggccagaaagtccaaggatctgctggtcaaggatcaggcgcagctgtgcataggccccgtcctctccaatacagcggtggtgagcgcggcgatgttctccgataaggatatcgtgatgatcacccccacggccaacgaggacggcatctcggctataggcgacaacattttccagatgaacgtgacgctcggcacgatggcgcagcggttggctaagtatgctgtagacaacatgagcatccgcgacttcgcgatcatcgcgccgtcgagcggtttcggttttgcgatggccgacgctttcaaggacgagctccgccggcagaacatagaggcggtttacgaggagtacttcaccgagggcacccacgacttttcggctacgctcaatagattgcgcggcgcgcttatacgccgccgcttggaggagatattggccgagcgcggcctcatgcagagggtaatgaccctgtccaccgccgacagcgcgcgctacgccgactctacgctcgccgtgggcgggctcttcatgcctctctcggactacgaggatgtggtcaaactctcgtcgcaggtggtattcaggcgcatacgcacccaaatgctcggaaccggcggctggagcgacccgcgcgtcccctccgggaacgagggcaagcgctacgctaacaacgccatagtgtcggtgggtatccaacccgatccggcgagcgaagactggcaaaatttcgccgcggcctataagaccaggtacaacgatgaaccgaaccgtatagccgcgatgggctacgacgccgcgatgctggtaataaaagcgacgaccgaagccggcggccccgacatttcaaagcttagaaaagccttggcaaccgtaaaggaatacaacggtttatccggtctgataactttcgaccctgttaccggagctaatggggaggctattattatgaaggttacggataaggggtttgtgcgggtgcattga

SEQ ID NO: 47550 - protein, 442 aa, Unknown
  Obtained from environmental sample
  DOMAIN (82)...(433): Receptor family ligand binding region
  misc_feature (1)..(442): Xaa is any amino acid
MLLEIVRYHEIQKLIASGQVVRAKNSAEDFRETYPRSRYTEPVKVFLSQFVKEQQQQRKGPKPLQVGLLAPMTGEDADIGKFILQGVKLALDGYNQRAESPIKLIVYDTKGSPVETARKSKDLLVKDQAQLCIGPVLSNTAVVSAAMFSDKDIVMITPTANEDGISAIGDNIFQMNVTLGTMAQRLAKYAVDNMSIRDFAIIAPSSGFGFAMADAFKDELRRQNIEAVYEEYFTEGTHDFSATLNRLRGALIRRRLEEILAERGLMQRVMTLSTADSARYADSTLAVGGLFMPLSDYEDVVKLSSQVVFRRIRTQMLGTGGWSDPRVPSGNEGKRYANNAIVSVGIQPDPASEDWQNFAAAYKTRYNDEPNRIAAMGYDAAMLVIKATTEAGGPDISKLRKALATVKEYNGLSGLITFDPVTGANGEAIIMKVTDKGFVRVH

SEQ ID NO: 47551 - DNA, 1551 bp, Unknown
  Obtained from environmental sample
  misc_feature (1)..(1551): n is a, c, g, or t
atgcgcaatcgcgacgctaaaataaccgcttctccagatttcctgaaaggaggcggtcttaccggcgccagaagcagggcggctattcagcgtgtggttatgcaaaatatgattacgcttcgctatgaatatgtcaaacgcttgcgcgaaaaaaagggtttgagcggtaaaatcacaatccgattcgctattgatgaattcggtcaagtgatattcgctaacatggtggaatccacgataaatgacgccaaacttgagaaaaccgcaatggacatcgttaagaactggaagttcgggactattgactactccggagacgtgactgaggttacatatccgttcattttcgcggacgatggattctcagacatagaccctgtctcggaaagcaatatgcgaaatgccgcggcaatggcaaaagaacaaaatatgctctacgccgcggctacggctatgagccacaatatgccatactccgcagtcatgactccaaatcctaatatgctcaacgcggcggcggcggctcaaattttaaaactttggtggaataccgattttacgcctcaaaaaattaattctcccgcatccgataaaggatacggtacatcgcatacggacaccgcgagaaacgctttcattaacgacaaagattacttgagcaaattgaccggaaagactatggaagatgaacggctatacttaaaaataagaaaaaattacgccgattcgccggcgttttattttgatatggcggattggttttatacgcacggcgataaagaaaccgcgcttcgcgtacttacctccatcgccgatattgcgggtttggagccggaaaacgctccgctttatcgaatgctcggttatcggctgaaagagtacggcgagtacgcgctcgaaaagtttgcttgcaagaaggtatttcagcggcggcctatggaacctcaaagtcacagagactacgcgttagcccttgccgacaacggtgaggcgcaagcggcgctcgactcgctctacgggctactgacaaagacatattcgaacgacatcgtctggcatagtagcggaatagaagaagccgtgattatggagataaatcaaatacttgccaaaaacgcaaatctgaacacatcaaaaatcgacaaaaatctgataatgaaaatgcctgttgatattcgcgtggtcataaactggagttccgacaacgccgttattgacttgcacgtcgtaaacccgaacaatgagaattgttatccccgtcgacgcgaaatgagcgtcggctggcgtataaacgccgacattagagagcgttacggtccggaacaattccttgtgaaaaacgcgctgcgtggaaaatatcgtgtttatgccgagtattacagcgacgaccgctactatcgcgctcccacgataggcacgttaaccgttatggcggaaatttttacaatgtacgccgacaaaaccgaacaacgtaaagtcgtatgtttacgcatacctaacgcgaaagagagcggttataaaaaagtagaggcggctgaatttgaattttga

SEQ ID NO: 47552 - protein, 516 aa, Unknown
  Obtained from environmental sample
  misc_feature (1)..(516): Xaa is any amino acid
MRNRDAKITASPDFLKGGGLTGARSRAAIQRVVMQNMITLRYEYVKRLREKKGLSGKITIRFAIDEFGQVIFANMVESTINDAKLEKTAMDIVKNWKFGTIDYSGDVTEVTYPFIFADDGFSDIDPVSESNMRNAAAMAKEQNMLYAAATAMSHNMPYSAVMTPNPNMLNAAAAAQILKLWWNTDFTPQKINSPASDKGYGTSHTDTARNAFINDKDYLSKLTGKTMEDERLYLKIRKNYADSPAFYFDMADWFYTHGDKETALRVLTSIADIAGLEPENAPLYRMLGYRLKEYGEYALEKFACKKVFQRRPMEPQSHRDYALALADNGEAQAALDSLYGLLTKTYSNDIVWHSSGIEEAVIMEINQILAKNANLNTSKIDKNLIMKMPVDIRVVINWSSDNAVIDLHVVNPNNENCYPRRREMSVGWRINADIRERYGPEQFLVKNALRGKYRVYAEYYSDDRYYRAPTIGTLTVMAEIFTMYADKTEQRKVVCLRIPNAKESGYKKVEAAEFEF

SEQ ID NO: 47553 - DNA, 744 bp, Unknown
  Obtained from environmental sample
  misc_feature (1)..(744): n is a, c, g, or t
gtgtttcatgagataggttggaatatattacattcatttacctgtaattatgggttgaattttattggagcgggtcttggaacatgggccttcatcgagactgacattgattggaaatggcgtaatattgcctataataacacatggctgtccgattctggacggcccgggctgtatataggttacgttgttcccgctataacgccgatttttacttacacattgggatggtttaaaaaagatgataagcttcaaataaccggcatggcattactgcaaacgcttatgataatgctggctgttcagacgcccttaaaaatgattaccggcagggctttgcccggtattgttgacgaactcgaccacacaagaagtctccgtaccgacaatttcagcggtgaatttaactggtttaataagaatcccgtaggtggttggccaagcgcgcataccgcaaacgcgtttgcggcggcggcgacaatatcggaaatatattcggaaaatttatggttaaaaataggggcgtatacttatgccaccataatcggcttcggcgttacagtaaacgtacattgggcgtcagaggcgttagcgggcgctttaatcggatacgcggtaggcagttccgtaggtaaaagttataaaaaattattggaaaaaaaatcaaataattcaaataattcagaaaataatgtatcattctatgtttatccaaacagcataggaatgataataaaaatataa

SEQ ID NO: 47554 - protein, 247 aa, Unknown
  Obtained from environmental sample
  DOMAIN (87)...(219): PAP2 superfamily
  misc_feature (1)..(247): Xaa is any amino acid
MFHEIGWNILHSFTCNYGLNFIGAGLGTWAFIETDIDWKWRNIAYNNTWLSDSGRPGLYIGYVVPAITPIFTYTLGWFKKDDKLQITGMALLQTLMIMLAVQTPLKMITGRALPGIVDELDHTRSLRTDNFSGEFNWFNKNPVGGWPSAHTANAFAAAATISEIYSENLWLKIGAYTYATIIGFGVTVNVHWASEALAGALIGYAVGSSVGKSYKKLLEKKSNNSNNSENNVSFYVYPNSIGMIIKI

SEQ ID NO: 47555 - DNA, 321 bp, Unknown
  Obtained from environmental sample
  misc_feature (1)..(321): n is a, c, g, or t
atgggccttgatgtagggccaaagaccttagccaagtacaaggacgtaatcgccaaagcgaaaaccattgtatggaacggtccggtcggcgtctttgaattcgacgcgtttgccaaaggcactctggaagtggcgaagctcgtggcggacgccaccggcaagggcagcattaccgtggtaggcggcggcgactccgtggcggcggtgaacaaattcggccttgccgacaaaatgagccatgtctcaaccggcggcggcgcgtctctggaactgctggaaggccgcaagctgcctggaatagaagtttgtcgaggaaaataa

SEQ ID NO: 47556 - protein, 106 aa, Unknown
  Obtained from environmental sample
  DOMAIN (1)...(103): Phosphoglycerate kinase
  misc_feature (1)..(106): Xaa is any amino acid
MGLDVGPKTLAKYKDVIAKAKTIVWNGPVGVFEFDAFAKGTLEVAKLVADATGKGSITVVGGGDSVAAVNKFGLADKMSHVSTGGGASLELLEGRKLPGIEVCRGK

SEQ ID NO: 47557 - DNA, 618 bp, Unknown
  Obtained from environmental sample
  misc_feature (1)..(618): n is a, c, g, or t
ttgtcgattttcccgttccggttccccggactcacatggtactatgcggtaatttatgaagatgagatcgcgagcggcaacatggggattaagcctggaattaacgcgacagtaacgcccgtaaccgtaacaagcgaacagccggttgagcgtaacttgcgcccgattcccctgcctgtactgacgttacgcaacaccgttcccgatagttattttatgacagagattcctgaacaggttcccttaaacgctgcgtccgaaaatattttacgcagtacaaaaatgccttcaaaagctcctttaagattaaagagaccgcgtgttttttcggttgatttagttgcgcctacaggcggcgaagaatccgctttgtttcagataattacggagtactttgtaacgtttaaatgggaagatgcgcgaatcagtttacagcactatttgtccatgccgagatcaaaagacatagaagcgcgcgcccgtttttatttggggcagactttgtattacaccggaaattaccgcgaatcgttaatggaatttatgtcgataagatcgcttcatcttgccgaggcaaacaggtggatagacgctgttttatcggcgatggtatattaa

SEQ ID NO: 47558 - protein, 205 aa, Unknown
  Obtained from environmental sample
  misc_feature (1)..(205): Xaa is any amino acid
MSIFPFRFPGLTWYYAVIYEDEIASGNMGIKPGINATVTPVTVTSEQPVERNLRPIPLPVLTLRNTVPDSYFMTEIPEQVPLNAASENILRSTKMPSKAPLRLKRPRVFSVDLVAPTGGEESALFQIITEYFVTFKWEDARISLQHYLSMPRSKDIEARARFYLGQTLYYTGNYRESLMEFMSIRSLHLAEANRWIDAVLSAMVY

SEQ ID NO: 47559 - DNA, 1302 bp, Unknown
  Obtained from environmental sample
  misc_feature (1)..(1302): n is a, c, g, or t
ttggccccggcgagtatttcgtcgtttccgacgacaggagcaattcaggcgattcacgcacatgggggccggttaacgctaaaaagctgttgggaaagcccgtattccggttctggcccatcccgcgaatcggccgaccttagtatgacagcgtcgctgtatatccatgttcctttctgttcgcaaaaatgcgattactgcgatttttattccgttcccattgcacctgatacagacgctcaaaccctgatagattcgtatattgaggccctgttagacgacattgaagaccagatcaatttgttcaatatcagcagcataccatgcgtctatataggcggcggaacgccttccgcgcttggagcanagcgcataacacgtttgctgtcctcaattaataaactgttaacaaatatggatacgccttctgtcgaattcacagtggaagtaaacccggaatcaactgacggggctttcctgcaggcctgtcttgaaggcggcgtcagccggataagccttggcgtacagagcttctgtgaagcgtcacgaaaagccgtgcgcagacaaggcagccttaagcaaatcgaagacgccctttccattatcgcgtggtattaccctgatgctttttccgtcgaccttattgccggcctccccttccagaccagggatgttgtttgtcaggacatcaggcatctgctctctttccatccgccgcatatttccatgtacagccttatccttgagccgcaaacgccccttggcatgaaagcggacagggcttccctcccctcgccggacgaggccgacaactcatggatcgcgggacgggacttgctgggaaatgcgggttaccgccaatacgaggtgtccaatttctgcctgtcggacaaattctgcgcccacaacatacgctactggagaatggaaaactggcttggcgccggccccgcggcttcgggaacgatcatcaacgataaaacaggcgccgcgaaacgattcacctatccggccgacattgagggttacataagaatgaaaagaccccgcctcaatcacgccataacagaagaattgaacagggaagaccttattaaggaaacattgctcatgggattcaggtattgcgagggacctgacagagagcttttcaaacggcgctttggccgcgaaattgaggattgtatccccaaaaccatcgccttctggagcaagcggaatttttttcaaacagcgcaaggattaaggccgtcaaaacagggattattgtttgtcaacaggatttttgagagacgcctttga

SEQ ID NO: 47560 - protein, 433 aa, Unknown
  Obtained from environmental sample
  DOMAIN (304)...(423): HemN C-terminal region
  misc_feature (1)..(433): Xaa is any amino acid
MAPASISSFPTTGAIQAIHAHGGRLTLKSCWESPYSGSGPSRESADLSMTASLYIHVPFCSQKCDYCDFYSVPIAPDTDAQTLIDSYIEALLDDIEDQINLFNISSIPCVYIGGGTPSALGAXRITRLLSSINKLLTNMDTPSVEFTVEVNPESTDGAFLQACLEGGVSRISLGVQSFCEASRKAVRRQGSLKQIEDALSIIAWYYPDAFSVDLIAGLPFQTRDVVCQDIRHLLSFHPPHISMYSLILEPQTPLGMKADRASLPSPDEADNSWIAGRDLLGNAGYRQYEVSNFCLSDKFCAHNIRYWRMENWLGAGPAASGTIINDKTGAAKRFTYPADIEGYIRMKRPRLNHAITEELNREDLIKETLLMGFRYCEGPDRELFKRRFGREIEDCIPKTIAFWSKRNFFQTAQGLRPSKQGLLFVNRIFERRL

SEQ ID NO: 47561 - DNA, 456 bp, Unknown
  Obtained from environmental sample
  misc_feature (1)..(456): n is a, c, g, or t
ttgattgacacgaggcgcggtgacaaccggaattggcccgtaaaaacagccgacagttttatccggtttgtcacggcgcagcaaaagcaaattctaaactcggacgagcatctgtatataaagcggatcatcgcgattcccggcgacgagatcagcatgaataattttgttttcagggtgaagccggcgggcaatatgtatgtctttaccgaatttgaactttccgaccgcccctattacccgaacataccccaggtacccgctctttgggatgagactcttccgttttcagggtacatggacagcataattcttggccccggcgagtatttcgtcgtttccgacgacaggagcaattcaggcgattcacgcacatgggggccggttaacgctaaaaagctgttgggaaagcccgtattccggttctggcccatcccgcgaatcggccgaccttag

SEQ ID NO: 47562 - protein, 151 aa, Unknown
  Obtained from environmental sample
  misc_feature (1)..(151): Xaa is any amino acid
MIDTRRGDNRNWPVKTADSFIRFVTAQQKQILNSDEHLYIKRIIAIPGDEISMNNFVFRVKPAGNMYVFTEFELSDRPYYPNIPQVPALWDETLPFSGYMDSIILGPGEYFVVSDDRSNSGDSRTWGPVNAKKLLGKPVFRFWPIPRIGRP

SEQ ID NO: 47563 - DNA, 1251 bp, Unknown
  Obtained from environmental sample
  misc_feature (1)..(1251): n is a, c, g, or t
atggaaacaacagattcaactagccaattttataaagacataattggcgtacatgccccatgggtgattacagccgtaacaatggacgatgcgtccagaaaagtaaccatacggatagagcacgatcctgagaaaatactggcctgcccaatatgcgcacaaagcaccaagctgcatgaccaccgggtaagggtgttaaggtatttagacacctgccagtacgagacttttctcgaagtacatgtgccgagaatacggtgcgaaaaagacggagtgcagcaaatacagattccgtttgcggaaaaacattcccggtttaccagccggtttgaaatggctgtcctggtatggcttcaaagcagccccatatccgacgtggcggaaaacttcgacatgagctgggacgaagtggacgggatattgcagcgggcggtcaagcgggggcttgcccggaggaagcggcagaaagtagtcaacatggggatcgacgagacgtcatatcaaaaggggcacaaatatgtgaccataatccaggacaaagaccgggattgcgtgatagacgtgcttgacgaccggaaagcggaaacggtagagaaatggcttaaaacgcaggaaaaaagcgatttaagcggtgtaaacagcatttccatggatatgtgggatgcgtatataaaagcggtcaaagcggcgattcctgaagcgggcaagaagatagcatttgatcgattccatgtgagcaagcatataaacgaggcattggacaaagtaaggaggagggaacacaatgctttcatgaaacaggcgggagaaagccctttaagcaaaagtcggtttcagtggctgataaactcaaacctgacggacaaccgtagcgggaaacggaaagcgtttttaagcctgtcgcggctcaacctagaaacggcgagggcatggaggataaaggagactgctaacagcctgtgggattatgtttacatgaacgtagcagaggccgcatggaagaaattgctttggtggataagccatagccggataccagaaatgatacaggtaggtaaaacgatacggaactatttctgggggatactaaacgcgatacgcttaaatgcaacaaacggaacggttgaatcaaagaataattccatccagcggatcaaacgaatggcgtatggatttagaaatccagaaaggttcaaaaacgcaatcctttttcacttgggcaaattagacctttttccttccaccatttag

SEQ ID NO: 47564 - protein, 416 aa, Unknown
  Obtained from environmental sample
  DOMAIN (159)...(260): Transposase
  misc_feature (1)..(416): Xaa is any amino acid
METTDSTSQFYKDIIGVHAPWVITAVTMDDASRKVTIRIEHDPEKILACPICAQSTKLHDHRVRVLRYLDTCQYETFLEVHVPRIRCEKDGVQQIQIPFAEKHSRFTSRFEMAVLVWLQSSPISDVAENFDMSWDEVDGILQRAVKRGLARRKRQKVVNMGIDETSYQKGHKYVTIIQDKDRDCVIDVLDDRKAETVEKWLKTQEKSDLSGVNSISMDMWDAYIKAVKAAIPEAGKKIAFDRFHVSKHINEALDKVRRREHNAFMKQAGESPLSKSRFQWLINSNLTDNRSGKRKAFLSLSRLNLETARAWRIKETANSLWDYVYMNVAEAAWKKLLWWISHSRIPEMIQVGKTIRNYFWGILNAIRLNATNGTVESKNNSIQRIKRMAYGFRNPERFKNAILFHLGKLDLFPSTI

SEQ ID NO: 47565 - DNA, 858 bp, Unknown
  Obtained from environmental sample
  misc_feature (1)..(858): n is a, c, g, or t
atgcatggagcttctaatcttgcaagaaatttgaccactggtgtcgttaaatatacatcctacggtatgattgatcttttccctcgtcaggaaaagaacgccgatgccaataaggacgtgaaaaccattcgtgaactgaggggtaaaatcaataaggcactcaaggaaataaaatcggctacgccttacgctcgtttcgtcttttttgtggatgatatggaccgtgttcaccccggcacagccattgagattctggacgttttgaaaaacgtgtttgacattgaggactgcgtttttgtcctggccatcgactttgaagtggtggtcaagggcctggaggggaaatacggccccaaaaccaaggaaaacgagcgtgagttcaggcagtattttgacaagataatccaaattcccttcaccatgcccatcggttcttatgataagtatatgtatgattttcttgataaatcattccagaaaatgggctatgagttcagcaaatatgatgataaactcagggaaaacatcaagaacgtggccttttgcgccacagacggcgtgccgcgcagcgtcaagcgcatcatcaacaccctgtctctcatgatccatatccagcggttggaggaagaagactattccgaaaacagaagttggaatgaggcggccggtagccctaagcctcagaccgacgatgagggcacacaatacgccctggaagcggaaatcatagtcgtgcccctgcnacctgttttcccccaaatctgccgctgcctcatggccaggcagaatttttcagctggactttcgaggaactgggaaagcagtggaaactggagaaagagcattacgaggatataa

SEQ ID NO: 47566 - protein, 285 aa, Unknown
  Obtained from environmental sample
  DOMAIN (2)...(205): KAP family P-loop domain
  misc_feature (1)..(285): Xaa is any amino acid
MHGASNLARNLTTGVVKYTSYGMIDLFPRQEKNADANKDVKTIRELRGKINKALKEIKSATPYARFVFFVDDMDRVHPGTAIEILDVLKNVFDIEDCVFVLAIDFEVVVKGLEGKYGPKTKENEREFRQYFDKIIQIPFTMPIGSYDKYMYDFLDKSFQKMGYEFSKYDDKLRENIKNVAFCATDGVPRSVKRIINTLSLMIHIQRLEEEDYSENRSWNEAAGSPKPQTDDEGTQYALEAEIIVVPLXPVFPQICRCLMARQNFSAGLSRNWESSGNWRKSITRI

SEQ ID NO: 47567 - DNA, 654 bp, Unknown
  Obtained from environmental sample
  misc_feature (1)..(654): n is a, c, g, or t
atgtattttgttgactggaaaatgtcgggtatggacggtattgagctgtcaggcaagatcaaaaaaacaaactccggaaactcgataataattatgatttccgcaaccgaatggaacacaattgaacaggaagcggaaaatgccggagttgacgattttttaccgaaaccgctgttttattcttcattggcggactgcatcaaaaagtatatttccggcgccgaatctcccatgcccggaacaactgaaggaaaaataacagattcgttctccggacggcggattctacttgtcgaggatgttgatatcaaccgtgaaattgttctgaccatgatggaacctttgcagatagaaattgattgcgccgtaaacggcacggaggcggtagaaatgtttgccgctaatcctaatcgttatgatttgatttttatggatctgcaaatgccggtattggacggctttggagcttcccgcgagattcgcaagctaaattccgaaaaagcaaaagcgattcccatcattgcgatgacagccaatgtattccgcgaagacgttgaaaaatgcctggaagccggcatgaacgatcacatcggaaagcctctggactttgacaaagtactggaaaagctgaaattttttctgggcagggaatag

SEQ ID NO: 47568 - protein, 217 aa, Unknown
  Obtained from environmental sample
  DOMAIN (93)...(211): Response regulator receiver domain
  misc_feature (1)..(217): Xaa is any amino acid
MYFVDWKMSGMDGIELSGKIKKTNSGNSIIIMISATEWNTIEQEAENAGVDDFLPKPLFYSSLADCIKKYISGAESPMPGTTEGKITDSFSGRRILLVEDVDINREIVLTMMEPLQIEIDCAVNGTEAVEMFAANPNRYDLIFMDLQMPVLDGFGASREIRKLNSEKAKAIPIIAMTANVFREDVEKCLEAGMNDHIGKPLDFDKVLEKLKFFLGRE

SEQ ID NO: 47569 - DNA, 348 bp, Unknown
  Obtained from environmental sample
  misc_feature (1)..(348): n is a, c, g, or t
atgctgataaaacatgaagaaatgaagacggaagtcaaagaaaaaatgcgcggaggggaaggcaaggtagaacttgtccacctggttgactgcgaaaacgagaaaaacatcagattgcttgcggaaataacgcttatgccgggctgctcaatcggcggccacagccatgaagctgaaaccgagtactatgtcatactttcgggcgagggcgtagttaatgacaacgggatcgaaaagcctgttaaagccggtgacacgatgattaccggaaacagcgcgtcccacagcatatgcaacagcggctccgtcccccttgtgtttcacgcgataatagttacgtactcttag

SEQ ID NO: 47570 - protein, 115 aa, Unknown
  Obtained from environmental sample
  DOMAIN (41)...(111): Cupin domain
  misc_feature (1)..(115): Xaa is any amino acid
MLIKHEEMKTEVKEKMRGGEGKVELVHLVDCENEKNIRLLAEITLMPGCSIGGHSHEAETEYYVILSGEGVVNDNGIEKPVKAGDTMITGNSASHSICNSGSVPLVFHAIIVTYS

SEQ ID NO: 47571 - DNA, 1533 bp, Unknown
  Obtained from environmental sample
  misc_feature (1)..(1533): n is a, c, g, or t
gtgttggaatttatcaaacaattctacgattttgatttggattcgcgcgtccatctggtagaagaaaatgagacgttgaataccggaaagcacaatcttcaatttattatggctccgatggtgcattggcccgaagtcatgatgacttacgattccacggctaaaatacttttttcagcggatgcgtttggatgcttcggcgcgttgaacggcgctctttttgcggatgaagtggatttcgcgaaggattatatggacgaggcccgccgttactattcaaatatagtcgggaaatacggaatacaggttgaatcggcgctggataaagcgtccgctctcaatatcgaaatgatttgtccgcttcacggttttgtatggcgttcaaacttaaatgaaatcatttcaaagtatatgctttggagtagataccagccggaagaacgaggcgttatgatcgcttatgcgtccgtttacgggaatacggaaaatgcggcggaaattcttgcctgtcgtctgcgcgataaagggattaaaacagttgtatttgatgtttcagttacgccggcatcagagatagttagcgccgtgttcaaatggagccatcttgtattcgcgtccacaacctacaacgcgggaattttcgtaacaatggaagccttgattaatgatcttgcggcgcacaatattcaaaaccgccgcgtcgcgataatcgaaaacggttcatgggctcccacaagcggcggcttgattcgtgaaatactgggcaagtgcgaaaagattgatattcttgaaaacaatgtcagcatactgtccggcttaaaaaaagcgcagctttcggatattgaatcaatggcggaagcgattggcgcggacttcgcctctcccccggcagttgcccaaaataatcaggccgtaccaaacacagttgatcccgctgccatgttcaagctgtcttatggtttatttgtactaacagccagagacggcaacaaggacaacggctgcattatcaataccgttatgcaaataacggtatctccagtaaagataacgattggggtgaacaaagccaattatacccatgatatgatactcaagacgggaaaattcaacgtttccgttttaagcgagggcgtgcctttccgtgtttttcagcaatttggctttcatagcggaaaagacacggataaattcgccggctgcggggaagccttgcgcacatcaaacggcgtccgttatgtgtcagaatggacaaacggcgtaatttccgcggaagtgaaagaatcggttgattgcggcacccatacgctgtttatcgccgaagtgaatcaggccttttccctgtcgcgcgatccaagcgtgacctatcaatattattttgacaacataaagcccaagccccagccgccgaaaggaaacaaaaaaggcttcgtctgcaagatttgcggatatgtgcatgaaggcgacactttgccggatgattttatttgcccgctctgcaagcatggcgccgcggattttgagaaaatttaa

SEQ ID NO: 47572 - protein, 510 aa, Unknown
  Obtained from environmental sample
  DOMAIN (474)...(507): Rubredoxin
  misc_feature (1)..(510): Xaa is any amino acid
MLEFIKQFYDFDLDSRVHLVEENETLNTGKHNLQFIMAPMVHWPEVMMTYDSTAKILFSADAFGCFGALNGALFADEVDFAKDYMDEARRYYSNIVGKYGIQVESALDKASALNIEMICPLHGFVWRSNLNEIISKYMLWSRYQPEERGVMIAYASVYGNTENAAEILACRLRDKGIKTVVFDVSVTPASEIVSAVFKWSHLVFASTTYNAGIFVTMEALINDLAAHNIQNRRVAIIENGSWAPTSGGLIREILGKCEKIDILENNVSILSGLKKAQLSDIESMAEAIGADFASPPAVAQNNQAVPNTVDPAAMFKLSYGLFVLTARDGNKDNGCIINTVMQITVSPVKITIGVNKANYTHDMILKTGKFNVSVLSEGVPFRVFQQFGFHSGKDTDKFAGCGEALRTSNGVRYVSEWTNGVISAEVKESVDCGTHTLFIAEVNQAFSLSRDPSVTYQYYFDNIKPKPQPPKGNKKGFVCKICGYVHEGDTLPDDFICPLCKHGAADFEKI

SEQ ID NO: 47573 - DNA, 1398 bp, Unknown
  Obtained from environmental sample
  misc_feature (1)..(1398): n is a, c, g, or t
atgggaatgggcgggtatttactacggggaaaaattttgagctttaccgcgtttaaacggacaaaaatgggcaaaaaacgcaggtttattttcgttttacttttgttctgtattatcaatttaacatgggcgcagacggaagaaagccgtcctttgcgcggaaaccagcccgatccctcgcttcccatcccttccaacagttccatgcaggcttttacgcctgcggaaaactcccttctttcggaaatggctcttgaacagcccctaacacagcgttacattcaacagttttcaagtcctcatggaattgccactcttaacgccgttttagagagggggagtctttatctgccgtttatcaaagaagaagccgcccgtcttaatatgccgcccgaactggcttatcttccggttattgaatccggttttgtgataacggcaagaagcagatcgggcgcggtgggtctttggcaatttatgcttaacagcatttccccgtacaacataagagttaccgaccttatcgacgaaaggcgcgattttgagaaagcgacaaaagccgccctgctaaaactggaagaaaattacagaacgctcggcagttgggaacttgcgcttgcggcgtacaacagcggattgggcgcggtcagcaaaattgtaaaaagaacgggaaggaatgattactgggaacttgtaaaaaaaggcgatttaaaacaggaaactcagcattatgtacccaaattaatcgcggcaaactatattatttcccagccgcggaaatacggaattaatatctggcatgaaaaaattgattggacgacaatcccgctgaaacgccagatttccatcgatattcttgccgaggaaactggcgtttccaaagatttgctgcaccgtcttaacgcggaactgcttcacgggataagccccgccgattcaaactaccggctaaaaatcccagcggaggacattgaaaagattacaaacgcccttgaaagcgacgatttaaaactactccgttaccattaccatgtggttaaaaccggcgacacattatggtcgatgtcaaggaattacgggatagccgtaaatatcatagaacagcacaatccggggatttccggcagatatttaaaaataggggaaacgattatcattccggcattcggcaacgcgcctgcgcccaaaaacccgccgcaaaatatactgcaaaacagaccggtaaccgcgccgcctaactttacggatacctatattgtgcaaaaaggcgaaactttttggtctttgggcaggaaatacggggtcgatccccaagttctggcggaggcaaacgggcttaaaattaccgatattctgcatgaaggaagaacgattagagtgccgataatattagaataa

SEQ ID NO: 47574 - protein, 465 aa, Unknown
  Obtained from environmental sample
  DOMAIN (117)...(232): Transglycosylase SLT domain
  misc_feature (1)..(465): Xaa is any amino acid
MGMGGYLLRGKILSFTAFKRTKMGKKRRFIFVLLLFCIINLTWAQTEESRPLRGNQPDPSLPIPSNSSMQAFTPAENSLLSEMALEQPLTQRYIQQFSSPHGIATLNAVLERGSLYLPFIKEEAARLNMPPELAYLPVIESGFVITARSRSGAVGLWQFMLNSISPYNIRVTDLIDERRDFEKATKAALLKLEENYRTLGSWELALAAYNSGLGAVSKIVKRTGRNDYWELVKKGDLKQETQHYVPKLIAANYIISQPRKYGINIWHEKIDWTTIPLKRQISIDILAEETGVSKDLLHRLNAELLHGISPADSNYRLKIPAEDIEKITNALESDDLKLLRYHYHVVKTGDTLWSMSRNYGIAVNIIEQHNPGISGRYLKIGETIIIPAFGNAPAPKNPPQNILQNRPVTAPPNFTDTYIVQKGETFWSLGRKYGVDPQVLAEANGLKITDILHEGRTIRVPIILE

SEQ ID NO: 47575 - DNA, 1011 bp, Unknown
  Obtained from environmental sample
  misc_feature (1)..(1011): n is a, c, g, or t
gtggcgcctttattcagaaatgaaaaagatattaacaatgtaatggagaggataatccccccgataattgcaatgaaagacaaggaatggaattatattgccgattatgttgaagatacaatagaagagcttcgggagcggtataccctgttcctcgatcagggcatggggccgataaggcaaagggtaggggaattgcacgccgcggtggtggagcttgccgcccgcctgcaaaaaggcgagatggatatatcatggctgcccaagcatacctttataatgctctcccaaatccagggacacgcggctcatctgctggaagaccttgatacaaacgaggctccgcctgaatcggaactggaggcgatggataattcccttgacggcatgattgatacttttaccgatataaaagagatgatcgattatgacatgaacagcttcaggcggagcaaccttatgctggtacgtgataaagacggagatttgtcggagacatggcggacaatgcagatatgcataggcggaacagacgtgtggcgcagagtgcttgtccccagggaatggcagttgtcggatctgcataaactgattcaacttaccctggactggaacgattcctacaggcaccgtttctttcttgagggcagcggcagaagcggacttgaaattcttgatgataaaatgaagatactggaaatttgcgatcagggtatcaacgaactgcagtatgaatatggggccaaatggaacatcaaagtgatcatcctttctccgtaccagcccgagaaaaaagagatcatacgctgcgtcgccggcgaaggagcctccccgcccgaggaaatcggcggcccgctgcgtttccgcaagatactcagcgcgattgaagggggcagtgaaatggaaaaacagacggctctgcatgagctgggccgggagttcgactcggaactgtttgatattgaaaaatgcaaccgcaaaatagaagcggtttattcggtggatgtatga

SEQ ID NO: 47576 - protein, 336 aa, Unknown
  Obtained from environmental sample
  DOMAIN (164)...(325): Plasmid pRiA4b ORF-3-like protein
  misc_feature (1)..(336): Xaa is any amino acid
MAPLFRNEKDINNVMERIIPPIIAMKDKEWNYIADYVEDTIEELRERYTLFLDQGMGPIRQRVGELHAAVVELAARLQKGEMDISWLPKHTFIMLSQIQGHAAHLLEDLDTNEAPPESELEAMDNSLDGMIDTFTDIKEMIDYDMNSFRRSNLMLVRDKDGDLSETWRTMQICIGGTDVWRRVLVPREWQLSDLHKLIQLTLDWNDSYRHRFFLEGSGRSGLEILDDKMKILEICDQGINELQYEYGAKWNIKVIILSPYQPEKKEIIRCVAGEGASPPEEIGGPLRFRKILSAIEGGSEMEKQTALHELGREFDSELFDIEKCNRKIEAVYSVDV

SEQ ID NO: 47577 - DNA, 531 bp, Unknown
  Obtained from environmental sample
  misc_feature (1)..(531): n is a, c, g, or t
atgcaaccgcaaaatagaagcggtttattcggtggatgtatgacaggtaataatgaattgagccttgccgctctggtagaacgcggtggagtatactacgatgttcccggcgcaagcccgaaagaactgattgacagcgtaatcggcctgatgccacccatagagggcgttactgcggaggaattgcaccggcagataatggagagggaagcccttgtatcaacaggggtaggacatggcattgccttgcctcatccgagaaatccggtgcttgagggcacaaacgcgccgccccttgtggctatagcgttccccgttatgccgattgactggaaaacacaggacggcagcaaagtgcatacggtattcctcatcatttccgtgtcggcgaaacagcaccttaatacgctgtcaaagatcaattttttatgtcaaaaggaaaaatttcatagcctgattgaagcgcgggtttcaaaaaaagagattgtagccgcgattaaggaagcggaaatttcctgggttaacaaataa

SEQ ID NO: 47578 - protein, 176 aa, Unknown
  Obtained from environmental sample
  DOMAIN (24)...(169): Phosphoenolpyruvate-dependent sugar phosphotransferase system, EIIA 2
  misc_feature (1)..(176): Xaa is any amino acid
MQPQNRSGLFGGCMTGNNELSLAALVERGGVYYDVPGASPKELIDSVIGLMPPIEGVTAEELHRQIMEREALVSTGVGHGIALPHPRNPVLEGTNAPPLVAIAFPVMPIDWKTQDGSKVHTVFLIISVSAKQHLNTLSKINFLCQKEKFHSLIEARVSKKEIVAAIKEAEISWVNK

SEQ ID NO: 47579 - DNA, 807 bp, Unknown
  Obtained from environmental sample
  misc_feature (1)..(807): n is a, c, g, or t
ttgtcactcttcattcatatagaatatttaaaagatatgttttcaatacctattttcaaaaaacatcaaaattccatgcggcgcagatttttcattttctccgccgttttgtttctgcttattttttcgtttggaagccttgcgtttattattttaatggagcaaatccagtatggtaacgccggtgaaaaattaacgaagaccattgaaattgaacggcttaaactggaagcgtccataaacagtgaaattgccattgtcctgagaatggctgattctaatttgataagacggcatttccttaaccccgcggacagcgaattgcaaaaaatgacctttgaggaaatagccggataccgcagggcttttaaaggcgattctgttttctggtgcagcgatattgataaagaattttactttaatgaagataatcattatgcccttgatatcgaaaaccccgataactattggtataaaatgaccctatatgaaacggaaaaatacaatttcaacatcaactacaacgcggaaatacaaaagaccatgctgtggattaacgcgcctgtttttgatcaaaatcaaaaatccgcgggaatggtgggaacaggtataaatctgtctgatttcatcaacgcaatatatgataaccattcgggaactgaggaattgtatttctttaacgcggccggagaaataacagggacgaaagacatcggccttgttgaaaaaaaagcggatatagccgaagtgctgggtcaaaccggcaagaaaatcaaggactacgctaaatacttaaaaaacnggtga

SEQ ID NO: 47580 - protein, 268 aa, Unknown
  Obtained from environmental sample
  misc_feature (1)..(268): Xaa is any amino acid
MSLFIHIEYLKDMFSIPIFKKHQNSMRRRFFIFSAVLFLLIFSFGSLAFIILMEQIQYGNAGEKLTKTIEIERLKLEASINSEIAIVLRMADSNLIRRHFLNPADSELQKMTFEEIAGYRRAFKGDSVFWCSDIDKEFYFNEDNHYALDIENPDNYWYKMTLYETEKYNFNINYNAEIQKTMLWINAPVFDQNQKSAGMVGTGINLSDFINAIYDNHSGTEELYFFNAAGEITGTKDIGLVEKKADIAEVLGQTGKKIKDYAKYLKNX

SEQ ID NO: 47581 - DNA, 969 bp, Unknown
  Obtained from environmental sample
  misc_feature (1)..(969): n is a, c, g, or t
atgcgattgccgtcttgctattatatggccgttgcgagaaaagcccttgacgaggctgggtttccacaggtgccggttatcaccacggatgtgtcggattccaaaaaagcccatcccgggctgcgttttaccgatataacctacgctaaagctgtgtggagcatagtccaggcggatattcttgaattcctgcggcgcaggatacggccctacgaactgcagaaggggaagaccgataaaattgttgaaaacgcttttgtcgaaatttccaaagggcttgcgaaaggcggcattcccggcgcgaacgccgcgttcaaaaaagcaataaacgacctgtgcgccattcgctatgaccgttcaaaaccgcgggaacaggtttatattcagggcgagtactatttaacctttcatccgggcgcaaattttcaaattgaaaggtatctggaaaaaaacggaatggaagttatcttctccagaatgtcaagcatttaccgtcatctgtttttgcagcacactcttgcagaaatgaatgaattcaaggtgcgtcattccctgtacaggaatttatacgtgcggcttggcaataaattcatggacatagccgtaaaatacgccgataaaatcgcctcgaagcatcccctgtatgaacctgacatttcgcttgaacaggcggcaaaatacagcgatgatataatacatcattcgatattgtcgggggaatccttccttattgccgcccatacattgcatcatgccgaaaagggaatccgttcatttgtaattctccagccttttggctgcctgccaaatcatgtctgtggacgcggggtgatcaaaagaatcaaggaattgcatccggatatccaaatactgccgcttgactacgatcctgacgttagttttgccaacatcgaaaacagaatacaaatgctgctgatgaatatgaagattttaaaggcggctggataa

SEQ ID NO: 47582 - protein, 322 aa, Unknown
  Obtained from environmental sample
  misc_feature (1)..(322): Xaa is any amino acid
MRLPSCYYMAVARKALDEAGFPQVPVITTDVSDSKKAHPGLRFTDITYAKAVWSIVQADILEFLRRRIRPYELQKGKTDKIVENAFVEISKGLAKGGIPGANAAFKKAINDLCAIRYDRSKPREQVYIQGEYYLTFHPGANFQIERYLEKNGMEVIFSRMSSIYRHLFLQHTLAEMNEFKVRHSLYRNLYVRLGNKFMDIAVKYADKIASKHPLYEPDISLEQAAKYSDDIIHHSILSGESFLIAAHTLHHAEKGIRSFVILQPFGCLPNHVCGRGVIKRIKELHPDIQILPLDYDPDVSFANIENRIQMLLMNMKILKAAG

SEQ ID NO: 47583 - DNA, 1947 bp, Unknown
  Obtained from environmental sample
  misc_feature (1)..(1947): n is a, c, g, or t
atgaaagaaaaccaaaacgataaagtaatattatcaatcggaactaaactgataactattatttccattatagttgttctttctttgggttcaattaccgctcttgtttcatggatggtgcgcgaggatttaaaaatctccgcggaagaaaataacttcgaggcgaacagaagagccgccgaagaagctgaagaaatgctgtcaaatatgcgcgccgcttccggccagcttatgtacacaataaacgctgtaaactcgctgcaaacatccgcggcgctgcaggcaacgtcgcagcaagctgcgttgcaaactgcggcggactttttcttcgctcaaaatccccgcgccgccgcgtttacctatacgctaaaaaacgagcgcaatgttttagttaataaggattatttcctttcccgcgatatagacaagtcccttgcggagactttcttcaatgacaacgaaaactttttgcttcgcgccgcgcagggggagacggcgctgctaaatgcctctccggttttttcaatgccggttcttgccctgttttttccttaccggatggcgggcggacaaaacggggccggctgcgtcctaatcgcttcggaaaaattagtagacagtttcggctccggtacaaaccagtccttcctgataaatgacaaatgcgatttattaattcattccgactccgcgctcttgctgaacggcgcgaatgtggcggactttgattttatcagggaaatacaggcgtccggcgaccgcaataaacaacagcttataaacgcttattttaattttgaaccgccgttggaacctaactcttcaagaacatcgtccgttccccggtattatacggcgtttaccaagcttgctttaggcggctgtatagtgatcaccggcatagaatacgataaagttttcgaaggcatcaacgccactacgcggcgcaacatctaccttacagccgcggttttatttatctccgtaatgtttatctggttcttttcaaaaacaatttcaataccgcttaaaacattggctatcgcggcaagaaacattgagggcggacaattcaaacagcagtttgagattaaggggcgcgatgaaatcgggttgttaggcgcaagtttccacaaaatgtccggcgcactgcatatattcggcagattcacaaaccgtgaaatagccgtaaaagccatgcgcggcgaaattaaaccgggcggtctcaataaacacgccacgatctttttttccgatatacgcggctttaccgcgctgtctgaaaattttacaaaaacattcggtgacaaagcttcggataaaatcgtcttctggcttaacaactaccttacaggcatggtcgaatgcgtggaaaagacgggcggcgtagtagataaatttatcggagacgcggtaatggcgcattggggcacggcttacacggccggcagtcccgggaaagacgcttttaactgcgttaaggcggcgcttatgatgcgcaacgcgctgataacattaaacaagaatcgggcggaaaacgatcccggcgatccgcctatcagcatcggctgcgggattaacaccggtatagttaccgccgggcagatcggctccgatctccgcatggagtataccgtcattggcgatccggtgaatctcgcctcccgcgtcgaggcgttgaacaagcctctgggtacggacattctgattaccgaggatacctggaacatgattaagaaccatattattgtcgaagaaatgccgccggtgacggtaaagggaaaagaaaaacccgtgcggctttttgccgtcgtgaatctttccgcactaaaaacagctcccaggaatttggcgcaagtacggcaaatattgggcattaagccgccggatatttcaaaggcggatgtcaacgccaaagaacacaagtaccaaattggcggcaaataa

SEQ ID NO: 47584 - protein, 648 aa, Unknown
  Obtained from environmental sample
  DOMAIN (317)...(386): HAMP domain
  misc_feature (1)..(648): Xaa is any amino acid
MKENQNDKVILSIGTKLITIISIIVVLSLGSITALVSWMVREDLKISAEENNFEANRRAAEEAEEMLSNMRAASGQLMYTINAVNSLQTSAALQATSQQAALQTAADFFFAQNPRAAAFTYTLKNERNVLVNKDYFLSRDIDKSLAETFFNDNENFLLRAAQGETALLNASPVFSMPVLALFFPYRMAGGQNGAGCVLIASEKLVDSFGSGTNQSFLINDKCDLLIHSDSALLLNGANVADFDFIREIQASGDRNKQQLINAYFNFEPPLEPNSSRTSSVPRYYTAFTKLALGGCIVITGIEYDKVFEGINATTRRNIYLTAAVLFISVMFIWFFSKTISIPLKTLAIAARNIEGGQFKQQFEIKGRDEIGLLGASFHKMSGALHIFGRFTNREIAVKAMRGEIKPGGLNKHATIFFSDIRGFTALSENFTKTFGDKASDKIVFWLNNYLTGMVECVEKTGGVVDKFIGDAVMAHWGTAYTAGSPGKDAFNCVKAALMMRNALITLNKNRAENDPGDPPISIGCGINTGIVTAGQIGSDLRMEYTVIGDPVNLASRVEALNKPLGTDILITEDTWNMIKNHIIVEEMPPVTVKGKEKPVRLFAVVNLSALKTAPRNLAQVRQILGIKPPDISKADVNAKEHKYQIGGK

SEQ ID NO: 47585 - DNA, 1209 bp, Unknown
  Obtained from environmental sample
  misc_feature (1)..(1209): n is a, c, g, or t
atgaagaaaacggttaaaacgacaaatgccaaaaaacaacccgctaaaaacgcaaagaaaaaagcggtaaaaaccgtaaaaacgcccaaaaaacgggcaaaaaagggccattctgacgctctgcaggcatccatgctgacgggtatattgattgttacggcggcgatcatttccatagttgttattaataactataaaaacgcgacgccgacaacggaagttgaatcttctcctgtgcaaaataaaaagagtgagcctttagtcgccgtcaatgttgaaaagcctgaacagaagagtgtaactcatagcgcagcgcagaacgaaacacagagcgttactcccactgtaaaagaagcgcctgcgaaaaaaaccgcgccatccgcggagacatcttcaactaaaccgcaagcttcatcaaacttaaagaaaaataaaacaaatgataataaaccgatcgtaccaaatccgccggcaataagtacgcccgtaacaaacacaactgccgccgtaacacagcgtccgcccgcaaaatcggttgaaaaactcggaaccgttgtttttattatagacgacgccggcaacaatttgcgggagcttgatcctttcctgagtatacccggaccgttaacaatcgccgttctgcccgggcttccccattccgccgaagccgcaaagcgcataagagccgcgggcaaggaagtgtttttgcatcagccgatggaagccataggcgggcagaatcccggcccccaagcgatttattccggcatgagcgcaagtgaaatcagagccgtactaaagcgcaatattgaagagattgggccgattacgggaatgaataatcatcaaggatcaaaaatcacgatggacacagccgccgtagaaacgatactcgctttttgcgccgaaaacgatttgctttttcttgattccagaacaacagccgatactgtagttccgagtgcggcgcaaaaacttggtattaaaatcggcgagagggatacgtttatcgacaacgagcaggacaaagagtcaatgattagatacatcgtaagcggactcgcgaaggcccgaaaaaccggaagcacggtaatgataggccatacatggtcgccggaacttgcccccattcttgccgagcaatatccgaagttaatcgatcagggttatactataaagaccgccggtgatataataaagtcgaaatga

SEQ ID NO: 47586 - protein, 402 aa, Unknown
  Obtained from environmental sample
  DOMAIN (187)...(400): Divergent polysaccharide deacetylase
  misc_feature (1)..(402): Xaa is any amino acid
MKKTVKTTNAKKQPAKNAKKKAVKTVKTPKKRAKKGHSDALQASMLTGILIVTAAIISIVVINNYKNATPTTEVESSPVQNKKSEPLVAVNVEKPEQKSVTHSAAQNETQSVTPTVKEAPAKKTAPSAETSSTKPQASSNLKKNKTNDNKPIVPNPPAISTPVTNTTAAVTQRPPAKSVEKLGTVVFIIDDAGNNLRELDPFLSIPGPLTIAVLPGLPHSAEAAKRIRAAGKEVFLHQPMEAIGGQNPGPQAIYSGMSASEIRAVLKRNIEEIGPITGMNNHQGSKITMDTAAVETILAFCAENDLLFLDSRTTADTVVPSAAQKLGIKIGERDTFIDNEQDKESMIRYIVSGLAKARKTGSTVMIGHTWSPELAPILAEQYPKLIDQGYTIKTAGDIIKSK

SEQ ID NO: 47587 - DNA, 867 bp, Unknown
  Obtained from environmental sample
  misc_feature (1)..(867): n is a, c, g, or t
ttggttcttttattgaaaaacgccgttgatcccaaaggcgcgcttggggcgggcggttccgtctccactaccgcgtgggattttgcgcgtactttgggctcaaaggaaatttggatcgccggattagaccttgcttttcccggcttaaaaacacatttccggggcgccgtctttgaggatcgttccaatgcggcttcaacccgctttaatcccgccgaaacatgggttgtacgcgccctgcgcgacggttttccgttcaaagccccatgcgtaacaggcgggcaggttcttaccgaccgccgactgtccctctatgccgcgtggtttgaaaaccgtttccgtcagtatccggaagtgcgaaattacgccgtctttcaggaaggcctggcgatagcgggaattcaacccgcattggcgcaaacgcttctttccctgcccgaacgccgcggcgaaattgacatgaaactgcaggcggtattttcacaaatagacggcgattttaacagcccggaagaaaaacaaaaacgcgcggaacgttacgcgaaagccgtatcagctttaattaacggacttgaagaagtcagaaacgccgcccaaaaaggcgcgggaataacacggcaggcgttaaagggcaaacctgattccggcaaacagaataaaattttaaaagaactggacgaaatcatgcggcgcatcacggacagcgaagtaaaagaagtggcgggatttcttttccccgcggaaaataaaatcaatgaaagtaataatacggaaaaagattcttttcgcgcttatcttgaatcatcaaataaacttttttcttcgttggcgcaaactgtggaatttaacataaaatacattaattaa

SEQ ID NO: 47588 - protein, 288 aa, Unknown
  Obtained from environmental sample
  misc_feature (1)..(288): Xaa is any amino acid
MVLLLKNAVDPKGALGAGGSVSTTAWDFARTLGSKEIWIAGLDLAFPGLKTHFRGAVFEDRSNAASTRFNPAETWVVRALRDGFPFKAPCVTGGQVLTDRRLSLYAAWFENRFRQYPEVRNYAVFQEGLAIAGIQPALAQTLLSLPERRGEIDMKLQAVFSQIDGDFNSPEEKQKRAERYAKAVSALINGLEEVRNAAQKGAGITRQALKGKPDSGKQNKILKELDEIMRRITDSEVKEVAGFLFPAENKINESNNTEKDSFRAYLESSNKLFSSLAQTVEFNIKYIN

SEQ ID NO: 47589 - DNA, 564 bp, Unknown
  Obtained from environmental sample
  misc_feature (1)..(564): n is a, c, g, or t
atgcttgatgatataatttcgactaacgaagagcgaatgaaaaaaacagtggcaagccttaaagacgggtttgccgctttcaggacaggaagagcgaccgccgctctgtttgacagagttcgtgtcgacgcttacggagaaaaatcgccgcttaatcaggtggcgaatatttctattcccgaagcccgtcttgtcgttattcagccttgggataaaggtcttataacggagattgaaaaagcggttcgttcttccgagttatcgttaaatccgtcaaatgacggaaaagtaatccgcatttcaattccgcctcttacggaagaaaggcgcaaagaacttgtaaagcttgcaaaaaatcaggctgaacagtccagagtcgccattcgcaacattcgcagagacggaaacgaagaactgaaaaaacttttgaaagacaaaaaagaaaagattacggaagacgatgaaagcaagggggaggaagaactgcaaaaacttacagacaactacatagggcagataaacaaactccttgaagaaaaagaaaaagaaataatggacgtgtaa

SEQ ID NO: 47590 - protein, 187 aa, Unknown
  Obtained from environmental sample
  DOMAIN (19)...(185): Ribosome recycling factor
  misc_feature (1)..(187): Xaa is any amino acid
MLDDIISTNEERMKKTVASLKDGFAAFRTGRATAALFDRVRVDAYGEKSPLNQVANISIPEARLVVIQPWDKGLITEIEKAVRSSELSLNPSNDGKVIRISIPPLTEERRKELVKLAKNQAEQSRVAIRNIRRDGNEELKKLLKDKKEKITEDDESKGEEELQKLTDNYIGQINKLLEEKEKEIMDV

SEQ ID NO: 47591 - DNA, 723 bp, Unknown
  Obtained from environmental sample
  misc_feature (1)..(723): n is a, c, g, or t
atggaaaaaaatatccctgctcatgtaggcattattatggacggaaacggacgctgggcaaaaagccgcggacttgtccgtacgcagggacatcttgaagggttgaaagcggcaaagcgtattgtcaaggcggcaagcgatatgggtatacaatacctgaccctctatgccttttcaacggaaaactggaagcgtgccgccggtgaggttggttttattatggggttggtaaaacagtatctccggaatgagattgctttttaccgcgaaaaccatatccgcatacggcacgcgggcgacacggcgggcctgcccgctgatattgcccaggagttggcaagcgccgcgcttgataccgggggcttcgacggtatgcaggttattcttgccttaaattacgggggcagggacgaaatcgtgagggcgataaagcggcttgccacaaagtggcaagatgccgcccggcaggatatgggggcgattaccgagaaggacattaccgcctgccttgataaccccgacgtgccggatcctgatctgattatccgcagcgcgggcgagtacaggatgagcaatttcctgctttgggagagcgcttacgccgagctatatgtttcggcaaagctctggcccgactggacgggggacgatctggcgaaagccattgatgagtaccggagccgcgacaggcgttttggcggcattacagttaacggagaatga

SEQ ID NO: 47592 - protein, 240 aa, Unknown
  Obtained from environmental sample
  DOMAIN (12)...(234): Putative undecaprenyl diphosphate synthase
  misc_feature (1)..(240): Xaa is any amino acid
MEKNIPAHVGIIMDGNGRWAKSRGLVRTQGHLEGLKAAKRIVKAASDMGIQYLTLYAFSTENWKRAAGEVGFIMGLVKQYLRNEIAFYRENHIRIRHAGDTAGLPADIAQELASAALDTGGFDGMQVILALNYGGRDEIVRAIKRLATKWQDAARQDMGAITEKDITACLDNPDVPDPDLIIRSAGEYRMSNFLLWESAYAELYVSAKLWPDWTGDDLAKAIDEYRSRDRRFGGITVNGE

SEQ ID NO: 47593 - DNA, 729 bp, Unknown
  Obtained from environmental sample
  misc_feature (1)..(729): n is a, c, g, or t
gtggcgaacggttatgtgcagaaattctccgactttatacatcacctcagggaaaccctgccggacagcattattttcgcgggcaatgtctgtaccccggaaatggccgaagagcttattatctcgggcgcggacggggttaaaataggcgtcggccccggagccttttgcaagacaagggttacgaccggcgtcgggtacccgcagctggacgccattatttcctgcgccgacgccgcccacgggctaaacgggctggtaatagcggacggcggttgcaagacgccgggcgatgtggcaaaggctttttgcgccaacgccgacatggttatgcttggcaccatgtttgccggcacagatgaatgcgacggcagcgtaattacaaagtatatacatgacggcgagtatagctctgatttaaaacctttaataaaagaaaaaaaattcaaagtcttttacgggatgagctcggatctcgctcaggcttcccattttgggggcattaaggattaccgggccagcgagggcctggtagaagaagtgccgtacaagggttccgtcaatatccaggtgcggaatatcctggggggcttaagatcttgcggcacctatatcggagccagcagcgtcaagaatttcggcaaatgcgcttccttcatcagggtaaacagggtgcatagcgggccgttatttggaaataacgaacaaaatacaacgaatgatttgtaa

SEQ ID NO: 47594 - protein, 242 aa, Unknown
  Obtained from environmental sample
  DOMAIN (1)...(230): IMP dehydrogenase / GMP reductase domain
  misc_feature (1)..(242): Xaa is any amino acid
MANGYVQKFSDFIHHLRETLPDSIIFAGNVCTPEMAEELIISGADGVKIGVGPGAFCKTRVTTGVGYPQLDAIISCADAAHGLNGLVIADGGCKTPGDVAKAFCANADMVMLGTMFAGTDECDGSVITKYIHDGEYSSDLKPLIKEKKFKVFYGMSSDLAQASHFGGIKDYRASEGLVEEVPYKGSVNIQVRNILGGLRSCGTYIGASSVKNFGKCASFIRVNRVHSGPLFGNNEQNTTNDL

SEQ ID NO: 47595 - DNA, 408 bp, Unknown
  Obtained from environmental sample
  misc_feature (1)..(408): n is a, c, g, or t
ttgaattttttttcttttattaaaggttttaaatcagagctatactcgccgtcatgtatatactttgtaattacgctgccgtcgcattcatctgtgccggcaaacatggtgccaagcataaccatgtcggcgttggcgcaaaaagcctttgccacatcgcccggcgtcttgcaaccgccgtccgctattaccagcccgtttagcccgtgggcggcgtcggcgcaggaaataatggcgtccagctgcgggtacccgacgccggtcgtaacccttgtcttgcaaaaggctccggggccgacgcctattttaaccccgtccgcgcccgagataataagctcttcggccatttccggggtacagacattgcccgcgaaaataatgctgtccggcagggtttccctgaggtga

SEQ ID NO: 47596 - protein, 135 aa, Unknown
  Obtained from environmental sample
  misc_feature (1)..(135): Xaa is any amino acid
MNFFSFIKGFKSELYSPSCIYFVITLPSHSSVPANMVPSITMSALAQKAFATSPGVLQPPSAITSPFSPWAASAQEIMASSCGYPTPVVTLVLQKAPGPTPILTPSAPEIISSSAISGVQTLPAKIMLSGRVSLR

SEQ ID NO: 47597 - DNA, 624 bp, Unknown
  Obtained from environmental sample
  misc_feature (1)..(624): n is a, c, g, or t
atgctgtctgcgtttacacaaaaatgctatactagaaccatgttcaacagtattcggggcattgtcggcgggaaaaacagcgaggctttatttctcctgaccggcggactggagtgggaaataaccatgcccgccacggacatggagcaactgtcatcctcaggcggggagtgccgggtctttacctggctgtaccaccgcgacgatcagatgcggctgtttggttttgccgatgaaacgcggcggaatacctttctggaactgctcaaggttgagggtatcggccccaaaggggcgctgaaaataatgggcggcatagggcaggaagatcttgaacgcgccctggaagccggcgatcttgcccggctggaagccgttcctggactgggaaaaaagaccgcccagaaaatgcttctggcgttaaagggcaagctggttcatacgcccgcggattctccggcggaatcgccctacggcgatttaattgaagcgttagctgaaatgggatacgaaaagcgggccgcggccggggccattgcccgcgcccgaaaaagacgcgcctgccggattgtctcacccggaaaaaagaaaaactgctgttccaaaacgcgattgtatatttaa

SEQ ID NO: 47598 - protein, 207 aa, Unknown
  Obtained from environmental sample
  DOMAIN (14)...(75): RuvA N terminal domain
  misc_feature (1)..(207): Xaa is any amino acid
MLSAFTQKCYTRTMFNSIRGIVGGKNSEALFLLTGGLEWEITMPATDMEQLSSSGGECRVFTWLYHRDDQMRLFGFADETRRNTFLELLKVEGIGPKGALKIMGGIGQEDLERALEAGDLARLEAVPGLGKKTAQKMLLALKGKLVHTPADSPAESPYGDLIEALAEMGYEKRAAAGAIARARKRRACRIVSPGKKKNCCSKTRLYI

SEQ ID NO: 47599 - DNA, 420 bp, Unknown
  Obtained from environmental sample
  misc_feature (1)..(420): n is a, c, g, or t
gtggcgagattcggcgacggcgtgggcgacgtggacatcccggcggtcgtgcgatgccacgaggccgccggcaaaatcgtcacgatcaccgccgttaagccggcggagcggttcggcgcgatagccgtgggcggcgacggctcggtgagcgcgttccgcgaaaaacccgacaacggcggcgtatgggtaagcggcgggttcttcgtggtcgaacccggcatattcgattacctgaccggcggcgacgaaacggttcttgaacgcgagccattcgaacgcttggccgacgacgggcagatgaacgcctacaagcaccagggattctggcatccgatggacaccctgcacgacaagaatatgctgaccgaaatgtggaccggcgcaaaagccccttgggcgctctgggagaagaagcgatga

SEQ ID NO: 47600 - protein, 139 aa, Unknown
  Obtained from environmental sample
  misc_feature (1)..(139): Xaa is any amino acid
MARFGDGVGDVDIPAVVRCHEAAGKIVTITAVKPAERFGAIAVGGDGSVSAFREKPDNGGVWVSGGFFVVEPGIFDYLTGGDETVLEREPFERLADDGQMNAYKHQGFWHPMDTLHDKNMLTEMWTGAKAPWALWEKKR

SEQ ID NO: 47601 - DNA, 1098 bp, Unknown
  Obtained from environmental sample
  misc_feature (1)..(1098): n is a, c, g, or t
gtggaccggcgcaaaagccccttgggcgctctgggagaagaagcgatgatagagttctacaaaggcaaacgggtcttcgtcaccgggcacacgggcttcaaaggggcttggctgtgccgcgtcttagcgaaagccggggcggagaccgccggctacgcgctcgaaccgcccaccgatccgtcgctcttcgaactgatagggatcgagcgcggactctatagccacgttctcggcgacgtcggaaatttcgacgcgctccgcgaggcgatgaaggacgcggagccggagatcgtcatccacatggccgcccggcctatcgtgcgcgcctcctacgccgatccgcgcaaaacttacgaaaccaacgtcatggggacggtcaacgtgcttgaggccgtcagggatgtcggcggcgtcaaatcgttcgtcaacgtcaccaccgacaaggtctacgagaacaaagagcggatctggggctatagggaggacgagaccctctgcggcggcgacccgtactccaacagcaaatcgtgcagcgaacttgtcacgtacagctaccgcaaatcttttttttgcggcgcggacggcggacgccttgccgccgtttccaccgcccgctccggcaacgtgataggcggcggcgactacgccgaggacaggatcatcccagactgcgtgagggcggcgtcggcgtctaaagatatagtcatcagaaacccgctgtccacaaggccctatcagcacgttttggaatgcctgtacggataccttcttttagcgaaggcgcagtacgggaatcccgccgtagagggcgcgtacaacttcggccccgacgaggagagctgcgtgacgaacggggagctggccgatctgttctgcgaagcctacggcggcggcgcgtcgtggcgcgccggggacggcggcggtccgcatgaagctaatttccttaagctcgacagttctaaatctaaggccgtgctgggttggaagccgcgctggaacatcangacggcggtggaaaagacggcggagttcgctaaagcgggcggcggtatgtcggattgcgtcgacaggcagattgacgggtatttcggaacttag

SEQ ID NO: 47602 - protein, 365 aa, Unknown
  Obtained from environmental sample
  DOMAIN (27)...(252): Male sterility protein
  misc_feature (1)..(365): Xaa is any amino acid
MDRRKSPLGALGEEAMIEFYKGKRVFVTGHTGFKGAWLCRVLAKAGAETAGYALEPPTDPSLFELIGIERGLYSHVLGDVGNFDALREAMKDAEPEIVIHMAARPIVRASYADPRKTYETNVMGTVNVLEAVRDVGGVKSFVNVTTDKVYENKERIWGYREDETLCGGDPYSNSKSCSELVTYSYRKSFFCGADGGRLAAVSTARSGNVIGGGDYAEDRIIPDCVRAASASKDIVIRNPLSTRPYQHVLECLYGYLLLAKAQYGNPAVEGAYNFGPDEESCVTNGELADLFCEAYGGGASWRAGDGGGPHEANFLKLDSSKSKAVLGWKPRWNIXTAVEKTAEFAKAGGGMSDCVDRQIDGYFGT

SEQ ID NO: 47603 - DNA, 672 bp, Unknown
  Obtained from environmental sample
  misc_feature (1)..(672): n is a, c, g, or t
gtgttgagcacgtcccccggcgaaactccggtaagcgaagcggaacatattaaaaaccacgccaacatgtggcgcatggtggacgatttctgggacaggtgggatcacgtggtgcatgaatttgcagtgtgccgaaactggccgccctccgccggtcccggtcactggcccgatgccgacatgatccccttcgggagaatcaatttgacgggtctgcaaccgggcggcccccggcggaccaggtttacccgggacgaacagtacacggtaatgtcgctgtttgccattttgcgttcgccgttgatgttcggcgggaacctgcccgacaacgatgcgtttaccaactcgctgttaacgaacaatgaagtcctgtacatgcaccaaaaatccgtaaacaaccgggaactgtacaatgaagacggggttattgtatggacagccgacgatgccgaaagcggcgacaaatttctcgccctgttttttacgggcggcggaaattccaacggcaaacgcaatgttacatttaacatgagcaggctgggctttaccggaaaagtaaaggtgcgcgatatgtggcaaaaagccgacatgggggaattttcgggaacagaatttgccccggaaataaaccttcacggcgttggcctgtaccgcctgtcgccggttaaataa

SEQ ID NO: 47604 - protein, 223 aa, Unknown
  Obtained from environmental sample
  misc_feature (1)..(223): Xaa is any amino acid
MLSTSPGETPVSEAEHIKNHANMWRMVDDFWDRWDHVVHEFAVCRNWPPSAGPGHWPDADMIPFGRINLTGLQPGGPRRTRFTRDEQYTVMSLFAILRSPLMFGGNLPDNDAFTNSLLTNNEVLYMHQKSVNNRELYNEDGVIVWTADDAESGDKFLALFFTGGGNSNGKRNVTFNMSRLGFTGKVKVRDMWQKADMGEFSGTEFAPEINLHGVGLYRLSPVK

SEQ ID NO: 47605 - DNA, 546 bp, Unknown
  Obtained from environmental sample
  misc_feature (1)..(546): n is a, c, g, or t
gtgctggtttcgacgatactcagcctccgtaccaaagacgatgtaaccctgaaaacctcccggcggctgctggagcaggccnccggccccaaagaactgaacgccctgcccgaagaccgcgttgcccgccttgcctatccggcggggttttaccgcaccaaagcggcaagcctgaaaaaaatcgccgcgatactgctggaacaatacggcggcaaagtccccgccgacatggacgcgctattggcgctgcccggcgtaggccggaaaaccgcgaacctggtcctcattgaagcgtttgaccttcccggcatttgcgttgacgtgcatgttcaccgcatatcaaaccgctgcggctggctgcgtaccaaaacgcccgaagaaaccgaaatgaccctgcgcggcatcctgccgaaaaaatactggaaagggataaacgccctgttggttttatacggccagaacctctgccgcccggtaagcccgcactgttcccgctgcgtaattaagccgcactgcgagaggaacggagtggaacggagcaggtaa

SEQ ID NO: 47606 - protein, 181 aa, Unknown
  Obtained from environmental sample
  DOMAIN (68)...(97): Helix-hairpin-helix motif
  misc_feature (1)..(181): Xaa is any amino acid
MLVSTILSLRTKDDVTLKTSRRLLEQAXGPKELNALPEDRVARLAYPAGFYRTKAASLKKIAAILLEQYGGKVPADMDALLALPGVGRKTANLVLIEAFDLPGICVDVHVHRISNRCGWLRTKTPEETEMTLRGILPKKYWKGINALLVLYGQNLCRPVSPHCSRCVIKPHCERNGVERSR

SEQ ID NO: 47607 - DNA, 1602 bp, Unknown
  Obtained from environmental sample
  misc_feature (1)..(1602): n is a, c, g, or t
atgaaagcaggaatagatttcggcacctcgacatcggaaatagcctatgttgacgataacggcaaagttaccattgttcccaatcatctgggagaaacaatcaccccgtcggtcgtatatatagccgaagacggcagccccgttgtcgggcttgaggcgaaggaaaaagcccttctcgagccggaaaacacctttcttgaggtaaagcggcttttcggccaaaatacggagcttcaggcgcgggataaggtttattcgcctgtggatatcgcggcgatgattatacgttatttgacagactgcgcgcaaaaacactcaggccagacggtcgattccgcggtgattaccgttcccgcctatttcaccgattcgcagcgcaaggacgttatggctgcgggaaaggcggccgggcttgaagttgatcgcatcatcaacgagccgacggcggccagcctggactacggcatcgagcacatgcgcgaatgtaaatatatgctggtctatgatctgggcgggggaacacttgacgttacagtccttgaactttttgaaggcgtagtggaggtaaaatcaagctgcgggaacaacacgctgggcgggaaagatttcgaccaggccattatggatcatataaccgggctgattaagaagcgcgataaatttgacgtttcaggcgacccgcgcgcgatgatgcggataaaaatcgccgccgagcaatgtaaaatagcgctcagcgacaaaaccgaacatacaatagaattgccgtttttatacagcaagagcggcaatcctgtcgggtattcagaaaaaataacgcggactctttttgaatccatgatccgcgaaaaaatatattccaccgaacagcaaatcaagacagcgttattcgacgcaaatttgaatgccgacgatattgatttaacgctgttggtaggcggaagcacgcgtattccgctggtgtctcattttttggatgaaacctttggcattgcccccgagtcggcggtggatccggatctggccgtagttcgcggcgcggctatacaggcaggcgtgttaagcggggtgctaaacgaaaacgcgattgtccttacggatatttgcccctacagtctcagcacggaagttctggaagatttagggtttggtcataaagaattgttttgtgatattattataaaacgcaacacgacccttccggcctccgcatctaaaatatattcgacttcctgcgataatcaaacaaaagttcatgttactgcgcttcagggtgaaagcctcgatcctgacgagaattaccttttgaattgttttgaactcagcggcatacccaaagcaagggcaggcaaagaaaagataaatatccgctttgaatatgatttgaacggcattttgacgattcaggcggaaatagtctcaacaggtaaatcggcgtcggtgacggtgaacacatcgcagatgggcaagaatcttgatctttcaaaatggaaagacgttcccgccgccaggaaataccggcagataataaataaagcggaaaggcttgtaaaagttcacggcgatgaagcttcgggagatgttaaagccgccgccgatgaatga

SEQ ID NO: 47608 - protein, 533 aa, Unknown
  Obtained from environmental sample
  DOMAIN (4)...(358): MreB/Mbl protein
  misc_feature (1)..(533): Xaa is any amino acid
MKAGIDFGTSTSEIAYVDDNGKVTIVPNHLGETITPSVVYIAEDGSPVVGLEAKEKALLEPENTFLEVKRLFGQNTELQARDKVYSPVDIAAMIIRYLTDCAQKHSGQTVDSAVITVPAYFTDSQRKDVMAAGKAAGLEVDRIINEPTAASLDYGIEHMRECKYMLVYDLGGGTLDVTVLELFEGVVEVKSSCGNNTLGGKDFDQAIMDHITGLIKKRDKFDVSGDPRAMMRIKIAAEQCKIALSDKTEHTIELPFLYSKSGNPVGYSEKITRTLFESMIREKIYSTEQQIKTALFDANLNADDIDLTLLVGGSTRIPLVSHFLDETFGIAPESAVDPDLAVVRGAAIQAGVLSGVLNENAIVLTDICPYSLSTEVLEDLGFGHKELFCDIIIKRNTTLPASASKIYSTSCDNQTKVHVTALQGESLDPDENYLLNCFELSGIPKARAGKEKINIRFEYDLNGILTIQAEIVSTGKSASVTVNTSQMGKNLDLSKWKDVPAARKYRQIINKAERLVKVHGDEASGDVKAAADE

SEQ ID NO: 47609 - DNA, 1977 bp, Unknown
  Obtained from environmental sample
  misc_feature (1)..(1977): n is a, c, g, or t
atgataagaactggggtgtttgacggggcttatatgctcatcaaaacgaaccagactttccaggacggcgatcctgtctacagtccgagcgactacaaactagtggggccggacgggactatgtataactttaaggcgctcagcgcggataccaaagttaaggccaccgaattggaggcgggcactattgtcgccgatggcggagcggtgacgaaggtaaccaaggcgggagcgatttcagccgcctttacgggaaccccgccggcctcgatagtgcttggcaacgcgcttaccgaacacgagctcagctcggtaacttcgggcagcattttggcctccggctctaactttacgcttctgaccggcggagagattgcgcttgacaaggcaagtaccggtaccggcgcgatcacgtacacagccaccggagagctccaactcctcgacagccccggcggcgccgtaatcaccactgttgaggtaggcaagaccataaggctcaacgacggtacggttctcaagaacaacggcggcggaaatgtcagcgtggacagcgggagtctcgaaatcggtaccaatttaacctccgctaacgttctctctttcacattggcctcgcagaccaccataaatacgaactctcagacttcgagagataatgtggaagtagtgtcggcgtccaattacttagtagcgtcgggcgaactcagcgtcaacataacgctgggcaacagttccccgctcatcagcagaaccgataccgcttcaacctctgatcccggcgatgtcgccgtgctcgcggaaggtagcatcctctccaagggcagcatcattgagatgcttacccccggtcccggatcttcgcctaccgccatcaagataatggtgaacggcaacgaggtcaccgtatcctacgacgacgtctcgaaaacgctaaaagtgggcaacgaggtagtctcccccggcaagagcataacgcttgaagacggcactgttctcacccacatgaccgacattaacgataaaaacacggcgaccggcaagttgttcatagatacaggccgcattaccctggccgaagatatctccgcggatagcgtcggcggcgtccgaaatgtaaaggctttctccttagccaaggacagcattcttgccgccggcacaaagttgaacaccgtcgtcccgcaggccggcacccaactaatggccggcaccgtagtcaccgcccccgacaagttctatccgggtagcgtgaccatgggccacgaaggcagacgcatccagttctccgccaacatcgacgtttctttagaggcccgttactacgaggcggcggtaagcgagagcttgacattcatcttctcccgttatgaacccgcgtcaagcaacctaaaagactctgtgatggcccaaatcggcgccaacagcggtcagacagctttcatatccatgggcgacatgagggccgccgcgttaaacgtagcaaatatagacatcagctccaagtggggcgccgccaccgccatagaaacggtgaacaacgccttacagcgcgtctctcaccagcgcagccttgctcggagcgtgncagaacaggctcgagcacacgataaagaacttggacacggccgcggagaacctgcaagccgccgagagccgcatccgcgacgtggacatggcgaaggagatcatggagttcacaaggacgaacatccttcagcaagcgtcgcaggccatgctggcacaggcgaatcagcagccgcagagcgtgttgcagttactcaggtaatggtatgttgtagagacgcgattaatcgcgtctctacggcacaacgagcggcggtgttgtggattgagaaaaggggcgatcggaaacggtcgccctttttgataaccctacgttctggattacttcgtcgcttcgctcctcgtaatgaccgtcatcgcgagcaaagcgaagcgatccagagcctttaa

SEQ ID NO: 47610 - protein, 658 aa, Unknown
  Obtained from environmental sample
  misc_feature (1)..(658): Xaa is any amino acid
MIRTGVFDGAYMLIKTNQTFQDGDPVYSPSDYKLVGPDGTMYNFKALSADTKVKATELEAGTIVADGGAVTKVTKAGAISAAFTGTPPASIVLGNALTEHELSSVTSGSILASGSNFTLLTGGEIALDKASTGTGAITYTATGELQLLDSPGGAVITTVEVGKTIRLNDGTVLKNNGGGNVSVDSGSLEIGTNLTSANVLSFTLASQTTINTNSQTSRDNVEVVSASNYLVASGELSVNITLGNSSPLISRTDTASTSDPGDVAVLAEGSILSKGSIIEMLTPGPGSSPTAIKIMVNGNEVTVSYDDVSKTLKVGNEVVSPGKSITLEDGTVLTHMTDINDKNTATGKLFIDTGRITLAEDISADSVGGVRNVKAFSLAKDSILAAGTKLNTVVPQAGTQLMAGTVVTAPDKFYPGSVTMGHEGRRIQFSANIDVSLEARYYEAAVSESLTFIFSRYEPASSNLKDSVMAQIGANSGQTAFISMGDMRAAALNVANIDISSKWGAATAIETVNNALQRVSHQRSLARSVXEQARAHDKELGHGRGEPASRREPHPRRGHGEGDHGVHKDEHPSASVAGHAGTGESAAAERVAVTQVMVCCRDAINRVSTAQRAAVLWIEKRGDRKRSPFLITLRSGLLRRFAPRNDRHREQSEAIQSL

SEQ ID NO: 47611 - DNA, 324 bp, Unknown
  Obtained from environmental sample
  misc_feature (1)..(324): n is a, c, g, or t
atggtgagaacgtcgcgcccgcttgacaagggggacatctcaaagctcttagccggcgttgagtcggaggatcaaatcctgcatgccgcctccgtagacgccgtagacgtcaagcctgaccaatactggtacgagatcgcgctctttgagggcaaaaaccgccaaatccgccgtatgcttgagggaataggccacgaagtgaggcgtctgcgccgcaccgccttcgggtcggtgaggctgggcggcatgacggcgggggagtacagggagctgacgccgagggaaatatcgggactgaagaacgcggggtttaagaacgcctga

SEQ ID NO: 47612 - protein, 107 aa, Unknown
  Obtained from environmental sample
  misc_feature (1)..(107): Xaa is any amino acid
MVRTSRPLDKGDISKLLAGVESEDQILHAASVDAVDVKPDQYWYEIALFEGKNRQIRRMLEGIGHEVRRLRRTAFGSVRLGGMTAGEYRELTPREISGLKNAGFKNA

SEQ ID NO: 47613 - DNA, 681 bp, Unknown
  Obtained from environmental sample
  misc_feature (1)..(681): n is a, c, g, or t
gtgtatacgatgagcgacattgccgtaaaattcgactctgtttctttttcctacggcgatattcatgttttggataacgcttcgttccacattcgcaaaggcgaatttaccgcaatggtcggaccgaacggttcgggaaaaactacggcgttaaaattgcttttcggtcttgaaacgccgagcgcgggaaaaatagagttgtttggaaacgaggggtataataatcaagcccgtgtaaatatgtcctatgtgtctcaaattatgcccgcggataatttatttcccataacagtttacggcgttgtaagaatggggcttcttcacccttttaatcggtatttggggaaaaaacaggaaaaagaagccgttacgcaggctttacgcaatacgggaatacttgatcttgagtcaaggctgtatcgaacgctgtcgggcggtcagaaacgcagagcgcttgtggcaagagcgttagccgcaaatcccgaccttcttgtgctggacgagccgacggcgaacatggacgttgaaagcgaacgattgctctatgaaacattaggcgcttataaaggaaaagtaacaatcattgtcgttacccatgacacgcaatatgttacgtctcttacggacagggttttaactttgggagacggacgcaaaatcgtccagcgtggcggggaatag

SEQ ID NO: 47614 - protein, 226 aa, Unknown
  Obtained from environmental sample
  DOMAIN (17)...(221): RecF/RecN/SMC N terminal domain
  misc_feature (1)..(226): Xaa is any amino acid
MYTMSDIAVKFDSVSFSYGDIHVLDNASFHIRKGEFTAMVGPNGSGKTTALKLLFGLETPSAGKIELFGNEGYNNQARVNMSYVSQIMPADNLFPITVYGVVRMGLLHPFNRYLGKKQEKEAVTQALRNTGILDLESRLYRTLSGGQKRRALVARALAANPDLLVLDEPTANMDVESERLLYETLGAYKGKVTIIVVTHDTQYVTSLTDRVLTLGDGRKIVQRGGE

SEQ ID NO: 47615 - DNA, 840 bp, Unknown
  Obtained from environmental sample
  misc_feature (1)..(840): n is a, c, g, or t
atgcaggatttttttatcgctttgttaagccccgattttccgtttttgcgtaacgctctcattgcgggcgtattatcatcaattctttttggaacgctcggctctattgttaccgtgcgcagaataggcagtcttgcgggcgctatttctcacgccgtgcttggcggcataggaatggcgctttttctttcggcgacaattattccgggtttcccgccgattgtcggggcgtttattttttccgtattaagcgcattagccataggatttgtatcgctcaaagcgaagcagcgtgaagatacggtaattaacgcaatatgggtaatcggcatgagtcttggtttaattttcatggcaaagacacctggttacgccgacccgacagcgtggctctttggaaacatacttttaatttccaacaccgatttaattttgctctcaatccttgacgtaatagttattgtactaacatggcggttttacgcccaaatagaagcttcgtcattcgactctgaattcgcccgcacaagaggcgtccccgtcgatttaatttttcttttactgcttggaataaccgccgccgccatcgttcttcttcaaacctacataggtataatgatggtcattgccatgctcactcttccgtcaggctgcgccacagttttttcccgaagcctcggcggcatgatgctctccagttgtctattctcagtatttttttcaatcttcggattaataaacggctggcttttcgatcttcccgtaggagccatgacggtaatcattgcgggctttgtgtttttagggttttcagtgtatagagttatcaggaagcgttag

SEQ ID NO: 47616 - protein, 279 aa, Unknown
  Obtained from environmental sample
  DOMAIN (12)...(274): ABC 3 transport family
  misc_feature (1)..(279): Xaa is any amino acid
MQDFFIALLSPDFPFLRNALIAGVLSSILFGTLGSIVTVRRIGSLAGAISHAVLGGIGMALFLSATIIPGFPPIVGAFIFSVLSALAIGFVSLKAKQREDTVINAIWVIGMSLGLIFMAKTPGYADPTAWLFGNILLISNTDLILLSILDVIVIVLTWRFYAQIEASSFDSEFARTRGVPVDLIFLLLLGITAAAIVLLQTYIGIMMVIAMLTLPSGCATVFSRSLGGMMLSSCLFSVFFSIFGLINGWLFDLPVGAMTVIIAGFVFLGFSVYRVIRKR

SEQ ID NO: 47617 - DNA, 1599 bp, Unknown
  Obtained from environmental sample
  misc_feature (1)..(1599): n is a, c, g, or t
gtggcggggctgccttatgttatagacatgatacagccgacgctggagaacgttataaggacacgggaagaaatttccgcaacatcaatttactcaagcaacgggtttattctggcgagctatgtgaaggagcgcgtaggcaagaagctgaccgaagtggataccatctacggccggcatattaacgcggcaaatcaggccgttcgtgacggtgaggaatattcctgcacaagcttctcgtctgtgttgaattcagaggtggaaattgtcataatgcccgtgaccatgggcaattcgggcaagacctggagcgtaatgatcgcgtcaacgagatcgtacattttaaaagaagtaaacgaattgacccgttttacagccatcatcgcggtgataaccgttgtgatagctgtgttaattatctatcttatcctgggcagcactacaaaaccaattgtcatggtggcggacacgctcaaggacatatccgaaggcgaaggcgatctgacaaaaacagttaatataagttccaaggacgagattggcgaccttgccaaatacttcaatcaaacgcttaagaaaatcaaagaccttgtggttcttattaaggggcaggccggtatattaaaagatataggcaacgaattgtccaacaatatgaccgaaacagcggcggcggtaaaccagatcaccgccaatattcaaagcattaaaggcagggtcataaaccagagcgcaagcgtaacccaaacaaacgcgacaatggaacaagttatcaccaacatcaacaaactcaatgaccatgtggaagcccagagccgcaacgtatcgcaggcgtcatctgccattgaggaaatggtagccaacatcagctctgttaccaacacgctggtcaacaatgccggcaatggaaatatattacaggaggcctccgaagtggggcgcgccggtttgcaggatgtggcgacagacattcaggaaatcgcccgcgagtcagaagggcttttggaaatcaatgcggtaatggaaaacatagccagccagaccaacttgctttcgatgaacgccgcaatagaggcggctcacgcaggagaggccggcaagggctttgccgtagttgccgatgaaatccgcaaattggcggaaagttccagtgaacagtctaaaacgattggcacggtgttgaaaaaaatcgcagaatcaatcaaaaaaatcacaagctccaccgacaacgtgttaaaaagatttgaggcgattgacacaagcgtaaagacggtggctgatcaggaagaaaatatccgcaacgcaatggaggagcagggcgagggaagcaagcaagtactgaacgctcaaagcagtttaagcgagcttacccaacaggtaaggagcggctccgaggaaatgcttaacggcagtcaggaagttatgcatgaaagccagaatcttgaaaagatgacacaggaaataacaagcggcatgaacgaaatggcttccggcgctgaacagataaatgtcgcggtacaccatgtcaacgagataagcgtcaaaaaccgcgaaggaattgatacgctgatacgcgaagttgcacggtttaaaatataa

SEQ ID NO: 47618 - protein, 532 aa, Unknown
  Obtained from environmental sample
  DOMAIN (269)...(489): Methyl-accepting chemotaxis protein (MCP) signaling domain
  misc_feature (1)..(532): Xaa is any amino acid
MAGLPYVIDMIQPTLENVIRTREEISATSIYSSNGFILASYVKERVGKKLTEVDTIYGRHINAANQAVRDGEEYSCTSFSSVLNSEVEIVIMPVTMGNSGKTWSVMIASTRSYILKEVNELTRFTAIIAVITVVIAVLIIYLILGSTTKPIVMVADTLKDISEGEGDLTKTVNISSKDEIGDLAKYFNQTLKKIKDLVVLIKGQAGILKDIGNELSNNMTETAAAVNQITANIQSIKGRVINQSASVTQTNATMEQVITNINKLNDHVEAQSRNVSQASSAIEEMVANISSVTNTLVNNAGNGNILQEASEVGRAGLQDVATDIQEIARESEGLLEINAVMENIASQTNLLSMNAAIEAAHAGEAGKGFAVVADEIRKLAESSSEQSKTIGTVLKKIAESIKKITSSTDNVLKRFEAIDTSVKTVADQEENIRNAMEEQGEGSKQVLNAQSSLSELTQQVRSGSEEMLNGSQEVMHESQNLEKMTQEITSGMNEMASGAEQINVAVHHVNEISVKNREGIDTLIREVARFKI

SEQ ID NO: 47619 - DNA, 435 bp, Unknown
  Obtained from environmental sample
  misc_feature (1)..(435): n is a, c, g, or t
atggctggaaccggatggaggccgaagaagcgcagcgtggcggcggcaacgaagcgatccccaagcgcctgggagcgccttcgccgatcaagcacgtgttcctcgtcgtcaaggagaaccggacctacgatcaggacctcggcgacctcggcgagggcaacggcgaccccgcggacgcgcagttcggggccccgatcacgcccaaccagcacgctctgtcgaaggacttctccgacttcgacaacttctacgacgacggcagccagtccgcggacggccaccagtggatcgtccagggcaacgacaacgaatacaacgaggcctggaaccaggacgagtgggtccgcagctacccctacaacggcggcgatccgatgtccatccagccggacgggttcatctggaacgcggccgagaaggcccaccagaccgtga

SEQ ID NO: 47620 - protein, 144 aa, Unknown
  Obtained from environmental sample
  misc_feature (1)..(144): Xaa is any amino acid
MAGTGWRPKKRSVAAATKRSPSAWERLRRSSTCSSSSRRTGPTIRTSATSARATATPRTRSSGPRSRPTSTLCRRTSPTSTTSTTTAASPRTATSGSSRATTTNTTRPGTRTSGSAATPTTAAIRCPSSRTGSSGTRPRRPTRP

SEQ ID NO: 47621 - DNA, 1374 bp, Unknown
  Obtained from environmental sample
  misc_feature (1)..(1374): n is a, c, g, or t
atgaaaaccccttcaatcacccccgcgttttgcgccgcaaacggaataataattgcacgctttgaagataaaacaatttttttcggaatgttaaacgtaaacgacgcgatcttaaaaacaagggtaaggaaagcttacgccgaataccaatgtgtatttcaggaacttgatacggaaactttcaaccttaagctgtcgcagttgttttccgaggaagaatcctcaagcgatttcttgcctgaaacaacgcgtgacagccgcgagtcggtaattgatcaggtagctgacgacgcgccggttgttaatctgcttaacagcatatttttggaagcgatctccaaaagggcctcggatatacacatagaatccggcgcatatgaaaccgccgtcaggtttcgcgttgacgggctgttggtcacgattaaacaaataagccaggaacgggcattagcggtttccgcccggcttaagatcctcgcgaaccttaacgtgcttgaaaaccggcggcctcaggacggccacatagacgtaaaaaccgattcttactcgcttgacgttagaatatcaacgataccaactgtttggggcgagtcaatagtattgcggctcctgaaccgttccgattcgccattaagccttgactcccttggtttttccgcagggtatgccgcgtatctgcaaaagatacttaccataacttccgggctgatccttgtgaccggcccgaccggttccggaaaaacgaccaccctcgctgctctgcttaaagaacttgatatcaaaagcacaaaaataatttccatagaggatccagttgaataccggattccggggattattcaaatacaggtaaatgaggaattgggattgggctttgatgctttgctccgccggattntcaggcaggaccccgatgtaattatgattggcgaaatccgggatatagaaaccgcagaactagctgtcagggccgctttaaccgggcatttggtttntgcgacccttcacacaaacaattctctggaagcagtgtaccgccttcaaaacatgggcattccgccttacatggttgcggcagtgctaaaagcagtaattgcccagcgccttatcagaaaagtgtgccaatcttgcaggggagaaggctgcagttgctgttcaaatacgggctacatggggagaacagcaatcgcggagtttatatctgttgaccttaccctgcaggacatgatagctgcgggagccgtgattgaacaactgcgatcgcgcctgaataatgtgcgctttaaaacgctttatgacgacgcggaagaaaaagtttcttctggcctgacaaccgaagcggaaatcaggcgcgagctgggagggcgactgtga

SEQ ID NO: 47622 - protein, 457 aa, Unknown
  Obtained from environmental sample
  DOMAIN (95)...(373): Type II/IV secretion system protein
  misc_feature (1)..(457): Xaa is any amino acid
MKTPSITPAFCAANGIIIARFEDKTIFFGMLNVNDAILKTRVRKAYAEYQCVFQELDTETFNLKLSQLFSEEESSSDFLPETTRDSRESVIDQVADDAPVVNLLNSIFLEAISKRASDIHIESGAYETAVRFRVDGLLVTIKQISQERALAVSARLKILANLNVLENRRPQDGHIDVKTDSYSLDVRISTIPTVWGESIVLRLLNRSDSPLSLDSLGFSAGYAAYLQKILTITSGLILVTGPTGSGKTTTLAALLKELDIKSTKIISIEDPVEYRIPGIIQIQVNEELGLGFDALLRRIXRQDPDVIMIGEIRDIETAELAVRAALTGHLVXATLHTNNSLEAVYRLQNMGIPPYMVAAVLKAVIAQRLIRKVCQSCRGEGCSCCSNTGYMGRTAIAEFISVDLTLQDMIAAGAVIEQLRSRLNNVRFKTLYDDAEEKVSSGLTTEAEIRRELGGRL

SEQ ID NO: 47623 - DNA, 564 bp, Unknown
  Obtained from environmental sample
  misc_feature (1)..(564): n is a, c, g, or t
atggcaaacaaactggcgaaaatctcaaaaatgatttacgaaattcgaggacagaaggtcatgtttgacagtgaccttgcggatttatatggggttgaaataaaacgcttaaatgagagcgtaaaacggaatataaaaagatttcctgcggaatttatgtttcaattaaccgctacggaatggtcaaatctaaggtcgcaaattgcgacctttaataaagacaccagaaaatacaagccttttgccttcactgaacatgggatactaatgctttcaagcgttttgaactctgataaagcaattaaaataaacattcaaataatgaagatatttgtacaaatgcgtcattacacgttttcgcaaagcgcagtcaatgaacaaattgccgaattacgaaaactgctcatggtttacatggaaaatactgactataaactttcgaaacatgacaagacaattggacatatcatcctcgccctgaataaccttattgaaaaacctccgaagaccaagcctattggttttaacgccgnganattacaaatgacacataacagagaatag

SEQ ID NO: 47624 - protein, 187 aa, Unknown
  Obtained from environmental sample
  misc_feature (1)..(187): Xaa is any amino acid
MANKLAKISKMIYEIRGQKVMFDSDLADLYGVEIKRLNESVKRNIKRFPAEFMFQLTATEWSNLRSQIATFNKDTRKYKPFAFTEHGILMLSSVLNSDKAIKINIQIMKIFVQMRHYTFSQSAVNEQIAELRKLLMVYMENTDYKLSKHDKTIGHIILALNNLIEKPPKTKPIGFNAXXLQMTHNRE

SEQ ID NO: 47625 - DNA, 585 bp, Unknown
  Obtained from environmental sample
  misc_feature (1)..(585): n is a, c, g, or t
gtgcagggagggaagggcataggcgtatccctggacagcgtccttgcccaaaaatggccgcagcggcctttgctggtgcataggctggacagggacacgtccggtctgatccttgccgcgaaaaataaaaccgccgccgccgcatactcccgcctgctcatgtctcgcgccgttgttaagcgatatatggcaatgtgcaaaggcaggccggatcagggtgaaggggtaatcagcctggatttggagattcgcggcatgaaaaaaaaatccgaaaccggctaccgtataattgaggtttttgaaaacggcttctcccttctggaacttgagttgggaacaggcagaatgcaccagatacgccgccatctggccctgacggggaaccctgtccttggcgatgacaagtacggcgatttcaccctgaaccatctgcttcgcaggacaatgaggctgaataagctcctcctgcacgcgtcgcggctgatcatccccgaaaccagggacaatccccgacttgacctgatcgcgcctttgccggaatattttagtcaattncctgctctgaataaaaaatccagaccctga

SEQ ID NO: 47626 - protein, 194 aa, Unknown
  Obtained from environmental sample
  DOMAIN (1)...(125): RNA pseudouridylate synthase
  misc_feature (1)..(194): Xaa is any amino acid
MQGGKGIGVSLDSVLAQKWPQRPLLVHRLDRDTSGLILAAKNKTAAAAYSRLLMSRAVVKRYMAMCKGRPDQGEGVISLDLEIRGMKKKSETGYRIIEVFENGFSLLELELGTGRMHQIRRHLALTGNPVLGDDKYGDFTLNHLLRRTMRLNKLLLHASRLIIPETRDNPRLDLIAPLPEYFSQXPALNKKSRP

SEQ ID NO: 47627 - DNA, 690 bp, Unknown
  Obtained from environmental sample
  misc_feature (1)..(690): n is a, c, g, or t
atgaggcgtgtacataaacaagtatccaaagtaatggctaaggaagaacagccgcccgccgacggtctttttaacataggcgaattttatttaaagaacaaacgtttctctcacgcaaaacatatattcagccgctatttgacattctatccttcggggaaaaacgccattcaagcggcaaaaaatcttgaggttgcggaaaacgcccttgcccgttacggcgacggcaaaggacccagcgttgctgtcagcgccgcggctccagcgcaagcggcagcgcctgccgctccagccgcttcacagaaagatttagacagggcaaacaagtcatattatgacgctatcggatttatttctcagggaaaatatcaagaagcgtttatgacttttaaagtaattgtagacagtaaggtaaatgcggaatggacggctaaagcgtcttttgaaatcggacgctgtttattccttatgaacaagtatgaagacagccttaaattctatacaaatatgctgacccaattcccgaaacatcccgagttaaccgaaaccatgtttatcatgggtcaatgcaacgagaaactgggcagaaaagatcaggctgtggcattctacaaaaaaattatctcaatgggcggagacgagtccactatcgaaaaagtaagaaaggcgcttagcgctttaggagcgtaa

SEQ ID NO: 47628 - protein, 229 aa, Unknown
  Obtained from environmental sample
  DOMAIN (144)...(177): Tetratricopeptide repeat
  misc_feature (1)..(229): Xaa is any amino acid
MRRVHKQVSKVMAKEEQPPADGLFNIGEFYLKNKRFSHAKHIFSRYLTFYPSGKNAIQAAKNLEVAENALARYGDGKGPSVAVSAAAPAQAAAPAAPAASQKDLDRANKSYYDAIGFISQGKYQEAFMTFKVIVDSKVNAEWTAKASFEIGRCLFLMNKYEDSLKFYTNMLTQFPKHPELTETMFIMGQCNEKLGRKDQAVAFYKKIISMGGDESTIEKVRKALSALGA

SEQ ID NO: 47629 - DNA, 648 bp, Unknown
  Obtained from environmental sample
  misc_feature (1)..(648): n is a, c, g, or t
atggctatggatttggccgcatttcaacgtttttcccgcacatttaaacaaggagatattatattctccgagtttgagcttggcgatacattttattttatccagtccggcagagtgcagcttgtaaaacttgtcggggacattgaaagaactttggatattcttcaaccgtcggaaatgttcggcgaaatggcgattttggaaagctctccccgttcggcgacggcgcttgcccttgatgaagtaaaagttttggaattcaactcgcaaaactttgaagtcctgctccttggaaatccgcagattgctttaaaacttttaaaaatgttctgcaaacgcatatacgattccaaacgccgattcatgattcttactctgccggaaccgcaggcaaaaatcgcagacgtattcctgatgcttgatgaaactcagcctgacattgataaaacaagcgaaaggcgtgaatttaaaaccacagtggaaggagtagcgcactgggcgggaatgagcgtaaacgaagtacgggacattctcggacactttgttaaccagcgccgcgttgaaatttttccggatcgtattaccgtaaaaaacatcaacgacttctcccgctttgtcagctccagacgcaatgcgagagctatctag

SEQ ID NO: 47630 - protein, 215 aa, Unknown
  Obtained from environmental sample
  DOMAIN (12)...(101): Cyclic nucleotide-binding domain
  misc_feature (1)..(215): Xaa is any amino acid
MAMDLAAFQRFSRTFKQGDIIFSEFELGDTFYFIQSGRVQLVKLVGDIERTLDILQPSEMFGEMAILESSPRSATALALDEVKVLEFNSQNFEVLLLGNPQIALKLLKMFCKRIYDSKRRFMILTLPEPQAKIADVFLMLDETQPDIDKTSERREFKTTVEGVAHWAGMSVNEVRDILGHFVNQRRVEIFPDRITVKNINDFSRFVSSRRNARAI

SEQ ID NO: 47631 - DNA, 1050 bp, Unknown
  Obtained from environmental sample
  misc_feature (1)..(1050): n is a, c, g, or t
atgagcgaacaggtaaagaaatccatagatttattgataaaaaatatcaaaagcctaatttcggttgattcaaaaaaactggaatatatcatcgccgcgcagatagccggcggccatgtaattctggcggactcgcacggggtcggaaaaacctcccttgcgcgggctttggctcagtctatcctttggcatcccgaagatacggctcccgcgaaaagcagcgccgcaacaagcaataccgcgaaaaccgccgccaaaagcaaggccaaagacgaagcgccgccggaagcgtctttaatggaaggattcagccgtattcagtgtacggtcgatcttctgccgcaggacattttgggatataaccgcttcctgggtcattcgggggagctgctttttaacaagggcccgatcttcgcgcactttgttttgtgcgacgagattaacctgcttactccgaaaacgcagggaagcttttttcaggtaatggaagaacaaagcgtaactatcgagggcaagtcttaccgtttgcaggatcccttctttattatcgctacaatgaacctgaaaggcgttcacctgttcccgctccccgtgccgcagcttgaccgttttatgattcgcctctctcttggctatccaagcgaagaagacgagacggaaattatcaaccggcacggaaagatagacgcgtgggacagatttaagagcgtaatcgacagcaaggatttaatcctctggcgaaaaatggtggacgaggttcacatgcaccccgaagtaaccgcctaccttgtaaactgcgtcaggaaaaccagatcgcacccggacattgaaactccggcaagcccgcgcgccggcgttcgtatctcgcgccttgcgcgctcgctcgctctttgccgcggtatggactttgtttccgttgacataattaaggaaatatttattcacgcgatggctcatcgtataattacccgcgatccttccataccgccggaagcgccgctgcagaatattttaaattcggtctctgtagagccgaagcgggaacagtaa

SEQ ID NO: 47632 - protein, 349 aa, Unknown
  Obtained from environmental sample
  DOMAIN (39)...(206): ATPase family associated with various cellular activities (AAA)
  misc_feature (1)..(349): Xaa is any amino acid
MSEQVKKSIDLLIKNIKSLISVDSKKLEYIIAAQIAGGHVILADSHGVGKTSLARALAQSILWHPEDTAPAKSSAATSNTAKTAAKSKAKDEAPPEASLMEGFSRIQCTVDLLPQDILGYNRFLGHSGELLFNKGPIFAHFVLCDEINLLTPKTQGSFFQVMEEQSVTIEGKSYRLQDPFFIIATMNLKGVHLFPLPVPQLDRFMIRLSLGYPSEEDETEIINRHGKIDAWDRFKSVIDSKDLILWRKMVDEVHMHPEVTAYLVNCVRKTRSHPDIETPASPRAGVRISRLARSLALCRGMDFVSVDIIKEIFIHAMAHRIITRDPSIPPEAPLQNILNSVSVEPKREQ

SEQ ID NO: 47633 - DNA, 852 bp, Unknown
  Obtained from environmental sample
  misc_feature (1)..(852): n is a, c, g, or t
gtggaaccgcgaatcgccggactggatctgggcaatcttgacgatttcggcgaccttggccttcccgaagaacccgcggcagtggaaaccgcagaatcgccggacatgggtttcgacgaccttggccttcccgaagaacccgcggcagcggaaaccgcagaatcgccagatatggatttcgacgaccttggccttcccgaagaacccgcggcagcggaaaccgcagaatcgccagatatggatttcgacgaccttggccttcccgaagaacccgcggcagtggaaaccgcagaatcgccagatatggatttcgacgaccttggccttcccgaagaacccgcggcagtggaaaccgcagaatcgccagatatggatttcgacgaccttggccttcccgaagaacccgcgccagtggaaaccgcagaatcgccagacatggatttcgacgaccttgaccttcccgaagaacccgcaccagcggaaactgaagaatcgccggacatggatttcgacgaccttggccttcccgaagaacccgcggccaccgcagaatcgccagacgcggatctcggtaatcttgatgatttcggcgattttgacctgcccaaagaacctgcggcagccgaggatggcgaaacacccgaccagggcggtattgaccaacccgaaacgcctgctgcagccgatgatagcggaatgccgganattggcgagcttgacgatcttgagactttaggcgacctcggcctcccggaagaacccgcggcggtcggtgacgctganaccatagagtcaggcggcgagggcgaccttgaccttcccggagaacctgangccgccgttgaaagatga

SEQ ID NO: 47634 - protein, 283 aa, Unknown
  Obtained from environmental sample
  misc_feature (1)..(283): Xaa is any amino acid
MEPRIAGLDLGNLDDFGDLGLPEEPAAVETAESPDMGFDDLGLPEEPAAAETAESPDMDFDDLGLPEEPAAAETAESPDMDFDDLGLPEEPAAVETAESPDMDFDDLGLPEEPAAVETAESPDMDFDDLGLPEEPAPVETAESPDMDFDDLDLPEEPAPAETEESPDMDFDDLGLPEEPAATAESPDADLGNLDDFGDFDLPKEPAAAEDGETPDQGGIDQPETPAAADDSGMPXIGELDDLETLGDLGLPEEPAAVGDAXTIESGGEGDLDLPGEPXAAVER

SEQ ID NO: 47635 - DNA, 699 bp, Unknown
  Obtained from environmental sample
  misc_feature (1)..(699): n is a, c, g, or t
ttgacgatttcggcgaccttggccttcccgaagaacccgcggcagtggaaaccgcagaatcgccggacatgggtttcgacgaccttggccttcccgaagaacccgcggcagcggaaaccgcagaatcgccagatatggatttcgacgaccttggccttcccgaagaacccgcggcagcggaaaccgcagaatcgccagatatggatttcgacgaccttggccttcccgaagaacccgcggcagtggaaaccgcagaatcgccagatatggatttcgacgaccttggccttcccgaagaacccgcggcagtggaaaccgcagaatcgccagatatggatttcgacgaccttggccttcccgaagaacccgcgccagtggaaaccgcagaatcgccagacatggatttcgacgaccttgaccttcccgaagaacccgcaccagcggaaactgaagaatcgccggacatggatttcgacgaccttggccttcccgaagaacccgcggccaccgcagaatcgccagacgcggatctcggtaatcttgatgatttcggcgattttgacctgcccaaagaacctgcggcagccgaggatggcgaaacacccgaccagggcggtattgaccaacccgaaacgcctgctgcagccgatgatagcggaatgccgganattggcgagcttgacgatcttgagactttag

SEQ ID NO: 47636 - protein, 232 aa, Unknown
  Obtained from environmental sample
  misc_feature (1)..(232): Xaa is any amino acid
MTISATLAFPKNPRQWKPQNRRTWVSTTLAFPKNPRQRKPQNRQIWISTTLAFPKNPRQRKPQNRQIWISTTLAFPKNPRQWKPQNRQIWISTTLAFPKNPRQWKPQNRQIWISTTLAFPKNPRQWKPQNRQTWISTTLTFPKNPHQRKLKNRRTWISTTLAFPKNPRPPQNRQTRISVILMISAILTCPKNLRQPRMAKHPTRAVLTNPKRLLQPMIAECRXLASLTILRL

SEQ ID NO: 47637 - DNA, 786 bp, Unknown
  Obtained from environmental sample
  misc_feature (1)..(786): n is a, c, g, or t
atgtctttccccgatttggatgttggcgaatcgccgaaagataaaaaaaccaccgcagccggtaaagccgtcaggaagaaggacaagagaaaaggcgaaataccgatccccgaaaaagaagatgatatagagcttaacgacagtgagcttcgttatttacaggaaactctagccggatatccgcttaatcttcgcatcgcctgcgaggaaataatcgcggaacaaagtgttcgtccggaacagatggtaaggctgataaggaatcttatccgcggcgctccggcgagagaaaccgccgcgctggccagcgaaatactagatagagctattaccgttccaagaggctttgaaaagagctcggtcgaggcgctggaagccgagaaatcaacttttgcctatatctttttccacaatttccttcccgtactcaggcttgttacgttaattgcaattgtggcaggctctattttctaccttacctataaatttgtgtatataccccttaaagcggaatccatttataanatgggttatgagcggataccggagggtgaataccagcgcgccaatgaacgttttaacgaagcctttaaaaaacaccgaaaaaaaatctgggttcttcagatacgccgacgtcttttatcaaagaacggcagtatatatacgcggaacagaaatacgaagatctgctgcgttattatccccgtgacaaacagggcgttctggcttacgccagactggaaacaaaatacctgcggaactacgctaaagcggacagccttttaa

SEQ ID NO: 47638 - protein, 261 aa, Unknown
  Obtained from environmental sample
  misc_feature (1)..(261): Xaa is any amino acid
MSFPDLDVGESPKDKKTTAAGKAVRKKDKRKGEIPIPEKEDDIELNDSELRYLQETLAGYPLNLRIACEEIIAEQSVRPEQMVRLIRNLIRGAPARETAALASEILDRAITVPRGFEKSSVEALEAEKSTFAYIFFHNFLPVLRLVTLIAIVAGSIFYLTYKFVYIPLKAESIYXMGYERIPEGEYQRANERFNEAFKKHRKKIWVLQIRRRLLSKNGSIYTRNRNTKICCVIIPVTNRAFWLTPDWKQNTCGTTLKRTAF

SEQ ID NO: 47639 - DNA, 588 bp, Unknown
  Obtained from environmental sample
  misc_feature (1)..(588): n is a, c, g, or t
atggatatactaggccagcttccgtttataatggaacggatgatgatgtactttattaaaaccgacaacctgaaagaagtgcttccgatctggctatggtttaactccaataccaaggaaaggcccctgagcgctgagacgctttcggaactgggcggttacttcctggacaaacagcttgaggaagtccggggcgtcccgaatgagtatgtcgcgtatattgatgatgtacgcgaaatactgctgagggcggtgcgggaagatccttccctgcctgaaccgcactataatcttgcccgttactataaaaatcttggcaattctcatgaggaaagggttaccctggagattgcccttcgcgaatttgaaaaagcggaagagggttctctgcgccgtcttacttaccgtattgacgcctatcaacgttatgctgacaatttgattgacagcagggaattcctgcatgccgaagagcagcttgaaaagggattaaactgtacgatgacgcgattagacggcggctgctgtctccttcgccaaattacggaaggctctacgcggggcttggcgatctttgatactttgtaa

SEQ ID NO: 47640 - protein, 195 aa, Unknown
  Obtained from environmental sample
  misc_feature (1)..(195): Xaa is any amino acid
MDILGQLPFIMERMMMYFIKTDNLKEVLPIWLWFNSNTKERPLSAETLSELGGYFLDKQLEEVRGVPNEYVAYIDDVREILLRAVREDPSLPEPHYNLARYYKNLGNSHEERVTLEIALREFEKAEEGSLRRLTYRIDAYQRYADNLIDSREFLHAEEQLEKGLNCTMTRLDGGCCLLRQITEGSTRGLAIFDTL

SEQ ID NO: 47641 - DNA, 510 bp, Unknown
  Obtained from environmental sample
  misc_feature (1)..(510): n is a, c, g, or t
ttgaagaaaatattttttttgataattttattttctctcctgtttaacgccgcttataaagcggaagcgcaaagcttaagcacaactcaaccgactgaatcgacttataaaccttccgatttgccgcagtgggtaaaagatttccgccgttttgatattatcgccttcggtatattcccattctcaatgttttttgttacaaccgtaaccgacatgatccgctggagagacgcaaataattttaatttttcggaagaaggacggcggtatgcgccttggcctctaaaatcggctggtgctgctgaaatgtcaaacgatgaatttaagaaaactatttatattgccgccggagtatcggtgggattagcgcttattgatctgctcattgtaaacttaaaaagagcgaatgaacgcaaaagaactgagaacctgccttccggctcttatgagattaatataaccccctatggaacggaggctgataattccgcaggctcggaaaaaaagtaa

SEQ ID NO: 47642 - protein, 169 aa, Unknown
  Obtained from environmental sample
  SIGNAL (1)...(20)
  misc_feature (1)..(169): Xaa is any amino acid
MKKIFFLIILFSLLFNAAYKAEAQSLSTTQPTESTYKPSDLPQWVKDFRRFDIIAFGIFPFSMFFVTTVTDMIRWRDANNFNFSEEGRRYAPWPLKSAGAAEMSNDEFKKTIYIAAGVSVGLALIDLLIVNLKRANERKRTENLPSGSYEINITPYGTEADNSAGSEKK

SEQ ID NO: 47643 - DNA, 1074 bp, Unknown
  Obtained from environmental sample
  misc_feature (1)..(1074): n is a, c, g, or t
gtggttccccgattcgtgaacttagacatagttgtaataggcggtggacacgccggcattgaggcggcaaacgcagcgtggaaaataggcgcaaaaaccgcaatgctcgtcttggataaaaagagcataggccgcatgagttgcaaccccgcgataggcggcgttggcaaagggcagatggtgcgcgacatagatgcgatgggcgggcttatgggtgtgctggcagacggagccggaataatgttccgcgtgttgaacgcgagcaaaggccccgccgtttggggcaaccgcgcccagtgcgacatggatttatacagcgagcttgcgcaaaaaactttggaaaatttagacggcttgcaaataatagaaggcgaagctaccacgctggaaaaagaaaatgaaaattggaaaatagtcacccaaagcgggctgcaaatactttgcaaagcggtaataattgcgagcggcacctttttaaattcaaagatgttcacgggcttggacaaaatcagcattggcggcaggataaatgaacccagctccgacttgcttcccttgtctttgcaaaaactgggaataaaaacaaagcgattgaaaaccggaacgcccagccgcttggacgccgcgagcatagatttttcaaaatgcgaaattcagcacggagacgcagagccttgggcttttagcggcaaaagcgatgccgcaaaactttgcaactccgcaaactgctacctaaccagaaccacagagcaaacccacagaattttagaagccgcctttgaaaaaagccccctattcactggcaaaattcaggggcttggcccgcgctattgccctagcatagaagacaagataaaacgctttgcagacaaagggagccaccagctgtttttggagccggagacaaaaaacgcaaagaggatatacataaacggctttagctcaagcctgccagaagatacgcagatagaagcaatacgcaccattccgggcttggagaacgcggtggtgctgcaaattggctacgcggtggaatacgatgccataaacgccacggattgcaccaaaccctaa

SEQ ID NO: 47644 - protein, 357 aa, Unknown
  Obtained from environmental sample
  DOMAIN (9)...(357): Glucose inhibited division protein A
  misc_feature (1)..(357): Xaa is any amino acid
MVPRFVNLDIVVIGGGHAGIEAANAAWKIGAKTAMLVLDKKSIGRMSCNPAIGGVGKGQMVRDIDAMGGLMGVLADGAGIMFRVLNASKGPAVWGNRAQCDMDLYSELAQKTLENLDGLQIIEGEATTLEKENENWKIVTQSGLQILCKAVIIASGTFLNSKMFTGLDKISIGGRINEPSSDLLPLSLQKLGIKTKRLKTGTPSRLDAASIDFSKCEIQHGDAEPWAFSGKSDAAKLCNSANCYLTRTTEQTHRILEAAFEKSPLFTGKIQGLGPRYCPSIEDKIKRFADKGSHQLFLEPETKNAKRIYINGFSSSLPEDTQIEAIRTIPGLENAVVLQIGYAVEYDAINATDCTKP

SEQ ID NO: 47645 - DNA, 639 bp, Unknown
  Obtained from environmental sample
  misc_feature (1)..(639): n is a, c, g, or t
atgctcgcggcgtccaagcggctgggcgttccggttttcaatcgctttgtttttattcccagtttttgcaaagacaagggaagcaagtcggagctgggttcatttatcctgccgccaatgctgattttgtccaagcccgtgaacatctttgaatttaaaaaggtgccgctcgcaattattaccgctttgcaaagtatttgcagcccgctttgggtgactattttccaattttcattttctttttccagcgtggtagcttcgccttctattatttgcaagccgtctaaattttccaaagttttttgcgcaagctcgctgtataaatccatgtcgcactgggcgcggttgccccaaacggcggggcctttgctcgcgttcaacacgcggaacattattccggctccgtctgccagcacacccataagcccgcccatcgcatctatgtcgcgcaccatctgccctttgccaacgccgcctatcgcggggttgcaactcatgcggcctatgctctttttatccaagacgagcattgcggtttttgcgcctattttccacgctgcgtttgccgcctcaatgccggcgtgtccaccgcctattacaactatgtctaagttcacgaatcggggaaccacagcttaa

SEQ ID NO: 47646 - protein, 212 aa, Unknown
  Obtained from environmental sample
  misc_feature (1)..(212): Xaa is any amino acid
MLAASKRLGVPVFNRFVFIPSFCKDKGSKSELGSFILPPMLILSKPVNIFEFKKVPLAIITALQSICSPLWVTIFQFSFSFSSVVASPSIICKPSKFSKVFCASSLYKSMSHWARLPQTAGPLLAFNTRNIIPAPSASTPISPPIASMSRTICPLPTPPIAGLQLMRPMLFLSKTSIAVFAPIFHAAFAASMPACPPPITTMSKFTNRGTTA

SEQ ID NO: 47647 - DNA, 609 bp, Unknown
  Obtained from environmental sample
  misc_feature (1)..(609): n is a, c, g, or t
atgggttttgcgggcgcgaatgtcaccatcccgcacaaagagcaggttatccagtttttggattacatatcgcctgtgtctaaagcgactggtagcgttaatacgctttactgggataacggcaaactgtgcggcacaagcaccgatgggctgggcgcattgaggaatttggaagaagccggaatggatataaaaaacaaaaacatagcgttgctcggcagcggcggcgcggcaaaagccctcgcttacgcttttatggaaattgccggagcagcgagcctaaaaattttcagcatagagccggagctttggaatttggaattgaagaacagcagcctgcacgattttgacgaggttaaaaaatacagggacagcatagacctactctgcaacgcaacgccgcttgggatgcacccgaacgtgaaccaaagccccgttgacaaatccatcctcagcaaaaacatgatggtctttgacatagtttacaacccgctccaaacaaaactgctgcaagaagcggaagaggcaggctgcaaaaccctgggcgggattgggatgttgaatcatcagggcttggaaagttttaagctgtggttccccgattcgtga

SEQ ID NO: 47648 - protein, 202 aa, Unknown
  Obtained from environmental sample
  DOMAIN (1)...(36): Shikimate dehydrogenase substrate binding domain
  misc_feature (1)..(202): Xaa is any amino acid
MGFAGANVTIPHKEQVIQFLDYISPVSKATGSVNTLYWDNGKLCGTSTDGLGALRNLEEAGMDIKNKNIALLGSGGAAKALAYAFMEIAGAASLKIFSIEPELWNLELKNSSLHDFDEVKKYRDSIDLLCNATPLGMHPNVNQSPVDKSILSKNMMVFDIVYNPLQTKLLQEAEEAGCKTLGGIGMLNHQGLESFKLWFPDS

SEQ ID NO: 47649 - DNA, 882 bp, Unknown
  Obtained from environmental sample
  misc_feature (1)..(882): n is a, c, g, or t
atgaactacttcaatacattgccactccgcatacaactggaggaactcggcaaatgccgttttatggatgcatcggaatttgctcgcggcgtagaggcgcttaaaggcaaaaaaattgtgattataggcgcaggcgcacagggcttgcaccaagggttaaacttgagggatagcggtttggatgtttcttacgcactcaggcaagccgccattgacgaaaagcgagccagcttcacaaacgctagtgaaaatggattcaaggttggagtatataaagatttaatcccaacagcagatttggtttgcaacctcactccagacaaacaacattccaaagtcgtggcagaaattatgcccttgatgaaaaaaggctcggctcttctttacagccacggtttcaacattgtggaagagggaatgcaaatacgagaagacataaccgttataatggttgctccaaagggaccaggctccgaggttcgcgcagaatatgtgcgcggttttggaatgccctctctggttgcagttaaaagagaaaacgaccctgaaggcaaaggtttagactatgcaaaggcttatgccgttgggcttggcagcgaccgtgccggtgttttagaaagttctttcatcgccgaggtgaaaagcgatttgatgggcgagcaaaccattctgtgcggaatgctccaaacaggcaccctgctctgctttgaccgcatggttcagcttggcattgaacccccttatgcatccaaacttttgcaatacggctgggaaacggtatctgaggctcttaaacaaggtggcataaccaatatgatggacaggctatcaaatccagcaaagataaaggcttttgagctttccgaagaattaaaaccataa

SEQ ID NO: 47650 - protein, 293 aa, Unknown
  Obtained from environmental sample
  DOMAIN (33)...(203): Acetohydroxy acid isomeroreductase, catalytic domain
  misc_feature (1)..(293): Xaa is any amino acid
MNYFNTLPLRIQLEELGKCRFMDASEFARGVEALKGKKIVIIGAGAQGLHQGLNLRDSGLDVSYALRQAAIDEKRASFTNASENGFKVGVYKDLIPTADLVCNLTPDKQHSKVVAEIMPLMKKGSALLYSHGFNIVEEGMQIREDITVIMVAPKGPGSEVRAEYVRGFGMPSLVAVKRENDPEGKGLDYAKAYAVGLGSDRAGVLESSFIAEVKSDLMGEQTILCGMLQTGTLLCFDRMVQLGIEPPYASKLLQYGWETVSEALKQGGITNMMDRLSNPAKIKAFELSEELKP

SEQ ID NO: 47651 - DNA, 741 bp, Unknown
  Obtained from environmental sample
  misc_feature (1)..(741): n is a, c, g, or t
atggctgggggtgattttgccgggacctacgaccaggctgaagatcagggtggtcagggccaggctggagacttggccgcagaggcgggtggcggtgatggtcccggaggcctggccgacgcgctcgggcggcaaggaacctatgatggcgttggaattgggggcgctgaaggtggcgaagcccaggcccaatgggaccaggagggcggcgaagaccgaaaggggggtggtcggggtcaggaccagggccagggcggcgatggaggcgcccacgacggccaggcccagggaagccaaaataccgggatccaggcggtcggagaggcgtccggcgaagggggtcaggagcgcctggcaaaccggctgggtcatgagaatgagcccggccttttccgcgggcagcccctggttgtattggaggtagaggctcagaacaaagcccagcccggaggaggaagagtagctgatgaaggcggccagggaggaaaaggcgaagcgccggctttgggcgaaaagccggaggtcaagaatcgggctgggggtcttcaagctgtggcggacataggcggcggccaggaccaggcccaaggccaggccggaagggccggccggccaagcggttatggcggaaagaccccagaagagggccagcacggccgttgcccacagggccgccccggcgccgtcaaaggcttccccctgggccgggcgctgctcaaagcggacggtcaggcccagtaa

SEQ ID NO: 47652 - protein, 246 aa, Unknown
  Obtained from environmental sample
  misc_feature (1)..(246): Xaa is any amino acid
MAGGDFAGTYDQAEDQGGQGQAGDLAAEAGGGDGPGGLADALGRQGTYDGVGIGGAEGGEAQAQWDQEGGEDRKGGGRGQDQGQGGDGGAHDGQAQGSQNTGIQAVGEASGEGGQERLANRLGHENEPGLFRGQPLVVLEVEAQNKAQPGGGRVADEGGQGGKGEAPALGEKPEVKNRAGGLQAVADIGGGQDQAQGQAGRAGRPSGYGGKTPEEGQHGRCPQGRPGAVKGFPLGRALLKADGQAQ

SEQ ID NO: 47653 - DNA, 495 bp, Unknown
  Obtained from environmental sample
  misc_feature (1)..(495): n is a, c, g, or t
ttggccgagttaccggcctcacgtgggtctgccggtcatggagcgggaactggggctttcggcggtcatgctgggctggatacccctgagcctcatgatgcccatggccgcggcctccgctcccggggccaggctggccgacatccggggccgccgccgcaccacccttctggccctgctcctctccataatcggcctggccgccagcgccctggccgccgggccggccagtctcctgggcggccgagcggtcaccggcttgggcttggccatggttttcaccaatttcatggccatggccacttccgtccatccgccccaagagcgcggccgggtcctgggttataccgtggccgcggtttatatcggcctgagcctgggcccggcggtctgcggctacctggtgacttggctgggctggcggtccattttctggctgaacgccataggctttctgccgcccctggttttactgggcctgaccgtccgctttga

SEQ ID NO: 47654 - protein, 164 aa, Unknown
  Obtained from environmental sample
  misc_feature (1)..(164): Xaa is any amino acid
MAELPASRGSAGHGAGTGAFGGHAGLDTPEPHDAHGRGLRSRGQAGRHPGPPPHHPSGPAPLHNRPGRQRPGRRAGQSPGRPSGHRLGLGHGFHQFHGHGHFRPSAPRARPGPGLYRGRGLYRPEPGPGGLRLPGDLAGLAVHFLAERHRLSAAPGFTGPDRPL

SEQ ID NO: 47655 - DNA, 336 bp, Unknown
  Obtained from environmental sample
  misc_feature (1)..(336): n is a, c, g, or t
ttggggcggatggacggaagtggccatggccatgaaattggtgaaaaccatggccaagcccaagccggtgaccgctcggccgcccaggagactggccggcccggcggccagggcgctggcggccaggccgattatggagaggagcagggccagaagggtggtgcggcggcggccccggatgtcggccagcctggccccgggagcggaggccgcggccatgggcatcatgaggctcaggggtatccagcccagcatgaccgccgaaagccccagttcccgctccatgaccggcagacccacgtgaggccggtaactcggccaatctgtcaatgttaa

SEQ ID NO: 47656 - protein, 111 aa, Unknown
  Obtained from environmental sample
  misc_feature (1)..(111): Xaa is any amino acid
MGRMDGSGHGHEIGENHGQAQAGDRSAAQETGRPGGQGAGGQADYGEEQGQKGGAAAAPDVGQPGPGSGGRGHGHHEAQGYPAQHDRRKPQFPLHDRQTHVRPVTRPICQC

SEQ ID NO: 47657 - DNA, 921 bp, Unknown
  Obtained from environmental sample
  misc_feature (1)..(921): n is a, c, g, or t
ttgttctttttctttataggcccgttccgtaatgtctacagcttcggcaatatgctgaacagcgcaatcccgctgatcttcggcgggcttggcgtcagtatcgcaatgcaggcaggcagcctgaacctcggcggggaaggacagatatattcgggggcctttgtcgcgacaattaccgctttgccgctggcgtttttggggcttccaggcggccttataagtatacttgccggtgcgttttttgcagggatattggcggcgctgtccggttttttcaaggcgcggtggaacacaaacgagcttatcacttcctttcttttgtcaaatgccatgatacttattgttaattaccttgttaccggtcccttccatgatcctgatacaaatttacagtcaacaagaaaaattgccgcaagtttaagactgccgctgcttttgcctccgtcgaatttaaatatgtcgcttgtgattgcgcttgcgtcaacagccgccgtgtatctttttctgaaaaaagccagactggggtatgaattcagaatagccggagcaaacgagatttttgcgcgatacggcgggattaacacaaaactgaatacggtgctggcgatgtttttaagcggcgcgctgtacggccttgccggaaggctttgtgtctttggctcttattaccagacggtaaaggaattttccgcggggcttggctggaacggccttgcggcggcgcttgtcgcggggtttaatcccgtggcggtaatacccgcaagccttttctttgcgtggatttcctcgggcgccagaatcgccatgcagaattcggacattacctatgagatagcgtccattgtccaatcggtaattttctttcttgctaccagcatggttttaagaggcctgttcagcagaaaggagaaatggcggtga

SEQ ID NO: 47658 - protein, 306 aa, Unknown
  Obtained from environmental sample
  DOMAIN (14)...(291): Branched-chain amino acid transport system / permease component
  misc_feature (1)..(306): Xaa is any amino acid
MFFFFIGPFRNVYSFGNMLNSAIPLIFGGLGVSIAMQAGSLNLGGEGQIYSGAFVATITALPLAFLGLPGGLISILAGAFFAGILAALSGFFKARWNTNELITSFLLSNAMILIVNYLVTGPFHDPDTNLQSTRKIAASLRLPLLLPPSNLNMSLVIALASTAAVYLFLKKARLGYEFRIAGANEIFARYGGINTKLNTVLAMFLSGALYGLAGRLCVFGSYYQTVKEFSAGLGWNGLAAALVAGFNPVAVIPASLFFAWISSGARIAMQNSDITYEIASIVQSVIFFLATSMVLRGLFSRKEKWR

SEQ ID NO: 47659 - DNA, 900 bp, Unknown
  Obtained from environmental sample
  misc_feature (1)..(900): n is a, c, g, or t
atggcggtgaaacttttgtcgcccgttctgcacagcgcggtaacgataatgacgccgatcctgttagccgcgacaggcggactgttcacggaacttgcggggtttctgaacatcgctcttgaggggctgctcctcgcgggcgcgttttccgccatagccgcggcgtattacacgggcagctttgccacagcccttaccgcttcgattctcggctcacttttactttcctcgttcatggccttctcaaccctgaaactgcgttccaatgtgtttattgccggccttgcggtaaacctgcttaccgccggtttgacagttgtcctttcgcactacttttttaatacaaaaggcgttatcatttttcagtctgataaaagcattccgattgtgaatattccgtttgtgaaacatatcccagtaatcggcgatttgttttccggccatagcgtgtacgtatacgcaagctggctgttattggtaatttcatggatcgcgatttacaaaacatcctttggctaccgttancgggcntgcgccaattattcaatggcattagcttccctgggactcaagccggacacataccgttatgcggcttttttactctcagggcttttctgcgggattggcggctcgttcctcagcctgaaccttggggcctttgttcccaatatgaccgccggcaagggctggattgccctggttgttatctttctcggcggccgcaaaccgcaagggcttttggcggcggcttttgtctttggccttgccgaggccctgtcaaattacgcgcagggccttcgcaacgtacccgccgattttatccttgccatgccgtatctgcttaccctgctggcaatggttcttgtttcggtttgggggaaggcaaataacaggtaa

SEQ ID NO: 47660 - protein, 299 aa, Unknown
  Obtained from environmental sample
  SIGNAL (1)...(23)
  DOMAIN (9)...(287): Branched-chain amino acid transport system / permease component
  misc_feature (1)..(299): Xaa is any amino acid
MAVKLLSPVLHSAVTIMTPILLAATGGLFTELAGFLNIALEGLLLAGAFSAIAAAYYTGSFATALTASILGSLLLSSFMAFSTLKLRSNVFIAGLAVNLLTAGLTVVLSHYFFNTKGVIIFQSDKSIPIVNIPFVKHIPVIGDLFSGHSVYVYASWLLLVISWIAIYKTSFGYRXRACANYSMALASLGLKPDTYRYAAFLLSGLFCGIGGSFLSLNLGAFVPNMTAGKGWIALVVIFLGGRKPQGLLAAAFVFGLAEALSNYAQGLRNVPADFILAMPYLLTLLAMVLVSVWGKANNR

SEQ ID NO: 47661 - DNA, 414 bp, Unknown
  Obtained from environmental sample
  misc_feature (1)..(414): n is a, c, g, or t
atgaatgttttcaaaagtgaaaccgcaaaaagacgtatcgttaatacatataacaaactgcttgatttgtggaatgttgataaaatagaaagagaaatacttacaacctatggaacaacgaatgtgataatatgcggagagcaaagcaacccgcctcttatactctttcacggtgtaggcgacaattccgctcttatgtggatatataatgccgcgactctctcccgttatttcaggatttatactgttgatacaattggaggacccgggaaaagccgccccaataaaaattataataaaaattttgatattgggatatggattgatgagattttagcagggttaatgcttgataaggtatatatagctggtgtttcacagcggcgcatatctggtacaatattacgggcttaa

SEQ ID NO: 47662 - protein, 137 aa, Unknown
  Obtained from environmental sample
  misc_feature (1)..(137): Xaa is any amino acid
MNVFKSETAKRRIVNTYNKLLDLWNVDKIEREILTTYGTTNVIICGEQSNPPLILFHGVGDNSALMWIYNAATLSRYFRIYTVDTIGGPGKSRPNKNYNKNFDIGIWIDEILAGLMLDKVYIAGVSQRRISGTILRA

SEQ ID NO: 47663 - DNA, 732 bp, Unknown
  Obtained from environmental sample
  misc_feature (1)..(732): n is a, c, g, or t
atgagccttgcccttatgaaccgtttttgtcatatcttttatgaaatggatatagatttttttatggatggatttgtctccgattttaaaaataatgaaaaagctaaaataaacggtaaagaacaaataatcattaatgagaataaataccgtctggctgtggcgaatttcgttaaagagaagcccaattatcttgacgcctttcccgctgacggggcaatatcaaatccccttgaattcgcgtatccaactccgcgttcatgggagatggttgtaaaaatcctgtccgttcttgacgagaatgaacctgagtataaagaagaactggtaaagggatgtataggggacgcggcgggtaaactgtttatagaatttattaaaaaatataaaggtcttgaagttgatattcccggttttgtcggaagagagaaagaattccgtttgcctaatcctaaacgccatgatcatgtttctcagataatggcttctatggtgttttatcttgaacatgcacctaaaaaatacatggaactctggatacaagttatcaatgttcttcataatgaaggttatgacggcttaataatgaagtatttatactcaaatatgaaagtgcttttggacagcaaaacactcgatccggaaaatattcgcgaatttagcaaacgtattccatgttatgaccttttacaaatagacgcgtttgataaattttcaaacaggaacagatag

SEQ ID NO: 47664 - protein, 243 aa, Unknown
  Obtained from environmental sample
  misc_feature (1)..(243): Xaa is any amino acid
MSLALMNRFCHIFYEMDIDFFMDGFVSDFKNNEKAKINGKEQIIINENKYRLAVANFVKEKPNYLDAFPADGAISNPLEFAYPTPRSWEMVVKILSVLDENEPEYKEELVKGCIGDAAGKLFIEFIKKYKGLEVDIPGFVGREKEFRLPNPKRHDHVSQIMASMVFYLEHAPKKYMELWIQVINVLHNEGYDGLIMKYLYSNMKVLLDSKTLDPENIREFSKRIPCYDLLQIDAFDKFSNRNR

SEQ ID NO: 47665 - DNA, 300 bp, Unknown
  Obtained from environmental sample
  misc_feature (1)..(300): n is a, c, g, or t
atggcggataaattacagcaaattctaacaatgatttacgaaatccgggggcaaaaagttatgctcgacatggatcttgctatattgtatcaggtggaaaccaagtatcttaacagaacggtaaaaagacatttgaagcgttttccggctgatttcatgtttcaactcaatgataaagagtgggcaaactctcccaattattgccagccgctaaatagtgccctttttcagataacagtgaacagagatgagaattctcttcctctgttatctgttacctattatctgttatcngtttag

SEQ ID NO: 47666 - protein, 99 aa, Unknown
  Obtained from environmental sample
  misc_feature (1)..(99): Xaa is any amino acid
MADKLQQILTMIYEIRGQKVMLDMDLAILYQVETKYLNRTVKRHLKRFPADFMFQLNDKEWANSPNYCQPLNSALFQITVNRDENSLPLLSVTYYLLSV

SEQ ID NO: 47667 - DNA, 1494 bp, Unknown
  Obtained from environmental sample
  misc_feature (1)..(1494): n is a, c, g, or t
atgacagatcggccgagaggcgtgcagcgcaactttgtccatatgtaccttgcgctggaacacaaccttgagatagtgcctgtaatcaacaagatcgatatgcaggcggctgatgttcccagagttaaaaaacaaattgataaagacctagggctggacgcggaaaccgccgttttggcgtccgcaagacagggtatcggaattgacgagcttttagaggcgatagtacagaaaattcccgctccctcagggaagacagacgctccgttacgcgctcttatttttgactgccattacgatccttatcgcggcgtagttgtacatttgcgtctctttgacggaaaaataaaaaaaggaatgaaaatatcctttatgtccagcggctctgtctacgaagtggaaaccgtaggcgtttttaaacttgcccttgtggaaacggacgagctttccgcgggggacgtaggctacataatcgcgagcattaaaaccgtaagcgatgtgcgcgtaggcgacaccgtaacaggcgcggacaatccctgtccggaacctttgcccggtttccgcgaagtaaaacccgtcgtcttttcttctatttaccccgttgactcaaacgactacgaagaattacgcgcaagcatggacaaacttaaacttaacgacgcttccctcatctttgaaaaagactcctccgcagccctcggctttggtttccgctgtggctttctggggctcctgcaccttgaggttattcaagaacgccttgagcgcgaatttgatcaatcggtaatttttaccgcgccgtccgtaaaatacaaagtgcatctaaggaacggcgaagaaatcatgatcgacaaccccatggattatccagacgaagggcgcattgaaggagcgcaggagccgtacatccgcgcatctgtaattacgccgaccgattatttgggaaacattatgacgctttgcatggaaaaacgcggcatacagacaaacatgacataccttgacgaaaaacgagttgaaataatctatgatatgccgctttccgaagtattattcgatttttacgaccgccttaaaagcatctcaagaggttatgcgtcatttgattacgatatttcaggttacaaaccgacagaacttgtaaaacttgacatactacttaacggaaaacctgtggacgcactttctcagcttgttttcaaagaaagcgcctacgaccgcgcgcggaaagtctgcgaaaggctgcgcgatgaaatcccgcgccagcagtttaaaattcccattcagggttcaatcggcagccacataatcgcgcgggaaaccgtgaacgcccttcgtaaagacgtacttgccaaatgttacggaggcgacattacgcgcaaacgcaaacttttggaaaaacagaaagaaggtaaaaaacgcatgaaaatggtcggcgatgtagagcttccgcaaagcgcgttccttgctgtacttaaagcaaaagacgattaa

SEQ ID NO: 47668 - protein, 497 aa, Unknown
  Obtained from environmental sample
  DOMAIN (104)...(174): Elongation factor Tu domain 2
  misc_feature (1)..(497): Xaa is any amino acid
MTDRPRGVQRNFVHMYLALEHNLEIVPVINKIDMQAADVPRVKKQIDKDLGLDAETAVLASARQGIGIDELLEAIVQKIPAPSGKTDAPLRALIFDCHYDPYRGVVVHLRLFDGKIKKGMKISFMSSGSVYEVETVGVFKLALVETDELSAGDVGYIIASIKTVSDVRVGDTVTGADNPCPEPLPGFREVKPVVFSSIYPVDSNDYEELRASMDKLKLNDASLIFEKDSSAALGFGFRCGFLGLLHLEVIQERLEREFDQSVIFTAPSVKYKVHLRNGEEIMIDNPMDYPDEGRIEGAQEPYIRASVITPTDYLGNIMTLCMEKRGIQTNMTYLDEKRVEIIYDMPLSEVLFDFYDRLKSISRGYASFDYDISGYKPTELVKLDILLNGKPVDALSQLVFKESAYDRARKVCERLRDEIPRQQFKIPIQGSIGSHIIARETVNALRKDVLAKCYGGDITRKRKLLEKQKEGKKRMKMVGDVELPQSAFLAVLKAKDD

SEQ ID NO: 47669 - DNA, 729 bp, Unknown
  Obtained from environmental sample
  misc_feature (1)..(729): n is a, c, g, or t
atgagctcgtctgaaaacatttcccaagaaaatataaccgactccttaaacgatattgaaaatgaacaatttgaaaatacggcaaacggcctgtttgaaggcgatatgggagaattgccttcggatacacggcgcacgctggtacaattattgtcaggtccgtctctggacgaacgcagacattcaaaactctggtctgttcttttacgtgatgagaatatcatccggcgacggcttgccgacttatttctggaattagtcatagaccgagatcttcaagtcgctttcacccgccagtttgacacaggcgatttagaagacgcaaagttacttcgcagatctcagttgacttttattgattccgtactccttctctacttacggcagcaactggcgcaaaccgcatcatacggaggacgcgcagttgtatcaaaggaagaaattgtcgagaatcttaaagtatatgagaaaaccggaagtactgacaaagccggatttgataagcgggttcacgcgtcaattgagaaacttaaaaaaaataacattatacaaaaaattcgcgccagtgatgatcgcttcgaggtatctccggctttaaaactgctgttctccgcggaggaaattcaagctctaacaatgatttatcaacgcatagccgaagacggactgcggaaccacggagatataccgcaagaagaagaggactataagtccggggaagaagaatga

SEQ ID NO: 47670 - protein, 242 aa, Unknown
  Obtained from environmental sample
  misc_feature (1)..(242): Xaa is any amino acid
MSSSENISQENITDSLNDIENEQFENTANGLFEGDMGELPSDTRRTLVQLLSGPSLDERRHSKLWSVLLRDENIIRRRLADLFLELVIDRDLQVAFTRQFDTGDLEDAKLLRRSQLTFIDSVLLLYLRQQLAQTASYGGRAVVSKEEIVENLKVYEKTGSTDKAGFDKRVHASIEKLKKNNIIQKIRASDDRFEVSPALKLLFSAEEIQALTMIYQRIAEDGLRNHGDIPQEEEDYKSGEEE

SEQ ID NO: 47671 - DNA, 1113 bp, Unknown
  Obtained from environmental sample
  misc_feature (1)..(1113): n is a, c, g, or t
atgtgcgccggtaacagaatcggttttaacgcggaaacacccctttcctttgagcaaggcttcggaggctttatctttgaaacggacgctcctcttcaacctgaattgccgcctgaatcatgggttttactgggacgcacaacggaagaatacacccttaacacaaaaacttttaatatcccgcttgataaactgcaaagcgcgtgggaaaaaacgcttgatcccgtttatccgtacaatacggagcagaacggaaaaacggaagcgtttttttacgacaagggcgtaacaatcaaggcgaaagaacgtttcgcgaaaccgaagtttatcatccccgtttttcccggaacaaacagcgagtacgacacggcgcgggctatagaaaaagccggaggacaggcgcaaatattcgtaataaaaaaccttaccccctcttccatcgccgaaagcgtcgtcgcttttgaaaaagctcttcgttccgcgcagggaatggttatcccgggcggcttttccggcggcgatgaacctgacggctcgggcaaatttattaccgcttttatcagaaaccccgtcatctctgcctctgtcatggagcttctgcaaaaaagagacggccttatttgcggtatctgcaacggtttccaggctctgattaagctcggccttgtcccctacggcgaaatccgcgccatgatgcaggactcccccaccctgaccttcaacacaatcgggcggcatcaggctgtccttgtaagaacaaagataacctcgaataaatccccgtggctttcccgtcttgagcttggctctcactacattgtcccgatatcccacggcgagggccgctttatcgcaagcgaagaacaaatccgatcccttgcagtaaacggccagatagccacccaatatgtggatttagacggctccccttcgcaggacatacgttttaacccgaataattccaatttcgccgtagaagggattacatcccccgacggcagggttttcggcagaatggcgcacaacgaacgctttgacgacgggcttttcaggaatattccgggaattcgcaaaatggacatcttctccggcgcggtggattactttaaataa

SEQ ID NO: 47672 - protein, 370 aa, Unknown
  Obtained from environmental sample
  misc_feature (1)..(370): Xaa is any amino acid
MCAGNRIGFNAETPLSFEQGFGGFIFETDAPLQPELPPESWVLLGRTTEEYTLNTKTFNIPLDKLQSAWEKTLDPVYPYNTEQNGKTEAFFYDKGVTIKAKERFAKPKFIIPVFPGTNSEYDTARAIEKAGGQAQIFVIKNLTPSSIAESVVAFEKALRSAQGMVIPGGFSGGDEPDGSGKFITAFIRNPVISASVMELLQKRDGLICGICNGFQALIKLGLVPYGEIRAMMQDSPTLTFNTIGRHQAVLVRTKITSNKSPWLSRLELGSHYIVPISHGEGRFIASEEQIRSLAVNGQIATQYVDLDGSPSQDIRFNPNNSNFAVEGITSPDGRVFGRMAHNERFDDGLFRNIPGIRKMDIFSGAVDYFK

SEQ ID NO: 47673 - DNA, 696 bp, Unknown
  Obtained from environmental sample
  misc_feature (1)..(696): n is a, c, g, or t
atggaaaaaaatatccctgctcatgtaggtattatcatggacggaaacggacgctgggctaagacaagagggcttgtccgtacgcagggacatcttgaagggttaaaaacggcgaaacgtattgtaaaggcggcaagcgatttaggcataaaatatttaacgctttacgccttttctacggaaaattggaaacgagcggcggaagaagtcggttttataatgggtcttataaaacagtatttgcgggctgagtttgactttagcaggcaaaataaaatccgcgtccgccacgcgggggattttaacggactgccgcccgacattcaaaaagaattatccgattccatagcggatacggcaacttttgacggaatgcaggttatccttgcgattaactacggcggcagggacgagattatcagggcgtttagaaaattcgcggcggaaagcaaaaacgctgatgtcagcgaggacgttatacaaaattaccttgataatcccgatgtacccgaccccgatttgataatccgaagcgcgggcgaatacagaacgagtaattttttactgtgggaaggggcgtattcggaattgtacatatcgcagaagttatggcccgattgggataaagaggatttggaaacggcgattgccgaataccaaaatagagacaggcgttttggcggagtaaaagcatga

SEQ ID NO: 47674 - protein, 231 aa, Unknown
  Obtained from environmental sample
  DOMAIN (12)...(228): Putative undecaprenyl diphosphate synthase
  misc_feature (1)..(231): Xaa is any amino acid
MEKNIPAHVGIIMDGNGRWAKTRGLVRTQGHLEGLKTAKRIVKAASDLGIKYLTLYAFSTENWKRAAEEVGFIMGLIKQYLRAEFDFSRQNKIRVRHAGDFNGLPPDIQKELSDSIADTATFDGMQVILAINYGGRDEIIRAFRKFAAESKNADVSEDVIQNYLDNPDVPDPDLIIRSAGEYRTSNFLLWEGAYSELYISQKLWPDWDKEDLETAIAEYQNRDRRFGGVKA

SEQ ID NO: 47675 - DNA, 858 bp, Unknown
  Obtained from environmental sample
  misc_feature (1)..(858): n is a, c, g, or t
atggctgatatatccgcagcagatgtaaaaaaactccgggaaaaaaccggagcgggaatgatggaatgtaaaaacgcgcttgtctcttcagaaggcgattttgccaaagcggaaaaacttttaaaagaaaaaggtcttgccgctcttgaaaaaagagccggacgcgctaccaataacggaaaagtttttataaaaatgaaagacgacaattccgccgctgtgttagttgaacttaacgctgaaaccgactttgttgccagaaaccctgattttatcgccctcggcgaaaaaattgcggctgacgctcttcaaaaaggagtaaccgctccaaatgacgagcttagcggtcttgtacaagagcttgcgacaaaaatccgcgagaacatgggtcttaaaagattgtgtctggtaaaagcgtcttccaatgaatttcttacgcagtatattcacggagacggcaacatcggcgtagttgtaaaatgcgaatccgacaaacctgaaatcttcaagactgaagatgtaaaatcttttattttctcaatcgccctgcacattgcggcttttaatcctctcgcgattgacaaaacaaaagtcgatcaggcatggcttaaagaacaggaagaaattttcaaagttcaaatgggacaagatgaaaaacttaaaggaaaaccggaaaatgttcttgaaggtatccttaaaggcaaggtttcaaagtatttaagcgaaatctgccttatggatcagggttatgtaaaagacgagaaaattaccgtagcgaaagccgttgaagaatgcggaaagaaagcaggggcaaaacttgcggtaaccgagtatgtttactacagagtcggcgaataa

SEQ ID NO: 47676 - protein, 285 aa, Unknown
  Obtained from environmental sample
  DOMAIN (4)...(44): UBA/TS-N domain
  misc_feature (1)..(285): Xaa is any amino acid
MADISAADVKKLREKTGAGMMECKNALVSSEGDFAKAEKLLKEKGLAALEKRAGRATNNGKVFIKMKDDNSAAVLVELNAETDFVARNPDFIALGEKIAADALQKGVTAPNDELSGLVQELATKIRENMGLKRLCLVKASSNEFLTQYIHGDGNIGVVVKCESDKPEIFKTEDVKSFIFSIALHIAAFNPLAIDKTKVDQAWLKEQEEIFKVQMGQDEKLKGKPENVLEGILKGKVSKYLSEICLMDQGYVKDEKITVAKAVEECGKKAGAKLAVTEYVYYRVGE

SEQ ID NO: 47677 - DNA, 915 bp, Unknown
  Obtained from environmental sample
  misc_feature (1)..(915): n is a, c, g, or t
atgaacaaagaaaaaagaatttatatagctgatgatgaaacaaacatcaggcttgccatcaggaaatttttagaaaacgcaggatttgtcgtcgaagactttgagaacggcgatttgctgatggaggcatttttaaaatcacagccggatttagttattcttgacgtaatgatgcccggttccaacggcttcgttatatgtaaagaactgcgaaaaaaaagccaggtgcctgttataatgctgacagcgcgcgacagcgacctggattatgccacaggtcttgatttgggcagtgatgattatctgaccaagcctttcagtcctatggctttaataatgagagttaaggctttgttcaggcgcatggaatttgaccgccaaatttacgccgaacgtgatttattgacagacgtttataataaaatttcaggcatagatattgccgaaaatgaactaaaagtcagcgatggaaaatcccttcatgcgctgtttattattgacatagataatttcaaaggcgtaaatgataaccttggacacgcggttggagacagagttcttgttgaagccgccaaaaccatatcgggtattttccgcgaagcggatattgtaagccgcttcggcggagatgaatttgttatatttgcaacccacatttcggatatgagctttatggaagaaaaagcagttaagttatgcagtgaactgcgcaaaagctacagggacggcggcattgtacagaatatatcggcaagtatcggtatagcgtgttttccggttcacgggtttacctatgatgaattatttaaatgcgccgacaaagccttatacacagtaaaaaaacaagggaaaaacggattcgcaatatattcagataaacatacggaggtatctcatggagaggaagaggactaa

SEQ ID NO: 47678 - protein, 304 aa, Unknown
  Obtained from environmental sample
  DOMAIN (5)...(116): Response regulator receiver domain
  misc_feature (1)..(304): Xaa is any amino acid
MNKEKRIYIADDETNIRLAIRKFLENAGFVVEDFENGDLLMEAFLKSQPDLVILDVMMPGSNGFVICKELRKKSQVPVIMLTARDSDLDYATGLDLGSDDYLTKPFSPMALIMRVKALFRRMEFDRQIYAERDLLTDVYNKISGIDIAENELKVSDGKSLHALFIIDIDNFKGVNDNLGHAVGDRVLVEAAKTISGIFREADIVSRFGGDEFVIFATHISDMSFMEEKAVKLCSELRKSYRDGGIVQNISASIGIACFPVHGFTYDELFKCADKALYTVKKQGKNGFAIYSDKHTEVSHGEEED

SEQ ID NO: 47679 - DNA, 1548 bp, Unknown
  Obtained from environmental sample
  misc_feature (1)..(1548): n is a, c, g, or t
atggcggatgacgaaccttctgttatatatcaactggacacttccgagggatttgagttatttgccctgaaagttcatgccattattgaacgcgagggactcaaggctttttatgtgtttgactgcctgagcgacctgctggaaagctggtgttccgacatgatggtcggcaactttttccgcataacctgcccttttctgtttgtgcttgataccatcgcctatttcgcccttatccgcggcgcccacacccatgacacgattgcccgcatacgcgaaaccacccagctcttgctggatgtgtaccacgttgacgataaattttatattcatccgcttaaagtatgggagcggtattcgcctacgatgttttttccgcatttgattgacggcgataaggctgtttcccttacctccagcgccgacgcggcgactttgttttcacgcgtcagccgcggcggacaaccccgtgatcattggcatattacctttgatcacgcgcgttcatatttaacccgcgatgaaaaatcccaggaagatgtaaaaaagcttcttattggctggattatcggcaaagaattacgcataactaatcttattatgaagtattttacgctgagagatatctttgacattgcgggaagggaaataggaaccggttttatcggcggaaaaagcgtcggtatgcttcttgccagaaaaattctggaaaaagacgcgggagacattatacgaaaccattgggagccgcatgactcatactatcttggctctgatgttttctatacttacattgtgcataacggattgtgggatctgcggatgaggcagaaaacanccgagggatattttacccttgcaaaagaactgcatgaaaaaatgctccagggaaaattcccggatatcataagagagcagtttaaacagatgcttgagcattttggacaatcgcccattattgtccggtcaagctccctgcgtgaggacaatttcggcaacgccttcgccggaaaatacgaaagtgttttttgcgccaaccagggcactcccgaacggcgttacgcggcgtttgaacaggcggtgcgtacggtctacgccagcacaatgaacgaagacgccctggcttacaggcaaaaccgcggccttaccaatcttgacgagcagatggccatactcgtccagcgcgtttccggaaaccattacggggatttatttttcccgcatatagccggcgtgggcaactcatccaatttgtatgtgtgggacaaaagcatgaatccggacgcgggcatgctgcggatcgttttcgggctgggaacccgcgccgtggatcgcgtgtcaggcgattacgcgaggctggtttttctggatcagccggaaaaaacgcctcctgtcagtcacaacgatgaaaggagattttcacagcataacgccgacgtccttaacctgtcaggcaaccaactggaggaagtccccctggacaagttatccaaccttgatttaaaaacggacagcggtattttttcagcgtggatacggagacgataa

SEQ ID NO: 47680 - protein, 515 aa, Unknown
  Obtained from environmental sample
  misc_feature (1)..(515): Xaa is any amino acid
MADDEPSVIYQLDTSEGFELFALKVHAIIEREGLKAFYVFDCLSDLLESWCSDMMVGNFFRITCPFLFVLDTIAYFALIRGAHTHDTIARIRETTQLLLDVYHVDDKFYIHPLKVWERYSPTMFFPHLIDGDKAVSLTSSADAATLFSRVSRGGQPRDHWHITFDHARSYLTRDEKSQEDVKKLLIGWIIGKELRITNLIMKYFTLRDIFDIAGREIGTGFIGGKSVGMLLARKILEKDAGDIIRNHWEPHDSYYLGSDVFYTYIVHNGLWDLRMRQKTXEGYFTLAKELHEKMLQGKFPDIIREQFKQMLEHFGQSPIIVRSSSLREDNFGNAFAGKYESVFCANQGTPERRYAAFEQAVRTVYASTMNEDALAYRQNRGLTNLDEQMAILVQRVSGNHYGDLFFPHIAGVGNSSNLYVWDKSMNPDAGMLRIVFGLGTRAVDRVSGDYARLVFLDQPEKTPPVSHNDERRFSQHNADVLNLSGNQLEEVPLDKLSNLDLKTDSGIFSAWIRRR

SEQ ID NO: 47681 - DNA, 1320 bp, Unknown
  Obtained from environmental sample
  misc_feature (1)..(1320): n is a, c, g, or t
gtgcttgaaaccgtacgcaatatgttcaagatcgcggagctgaggaagaaaatcttcttcacgctcgcgattgtttttatttacaggcttggcgggcacgtgccgacgccgggggttaacgccgaggtgctcagaaacttcatggcgtccaacatggacgggctcttcgggctgtacgatatgttcgtgggcggtaacttcggccgtttcacggtattcgcgctcggtatcatgccgtacatcacggcgtccatcatactgcagcttatggggacgatcttcccgtacttccacaagttgcagcgcgagggcgctgaagggcgtaaaaaactgacgcagtacacccgttacggcaccgttatcttcggcgcgatacaagctgcgggtatatcaatattcatatcaagcatccaagacaacggtgtgtccgccgttatcccgcagatgaagggtttcttgtttatgttcacgacggtcgtgtcgcttaccaccggtacggttataacgatgtggttgggcgagcagatcacggcgcgcggtatcgggaacggtatatcgttgctgatatttataggtattgtggccaggattccgaatcagatactcaccgaggttcagcagatcatggccgataggatgcacattgccaagtcgcttgccattttcgcggtggtcgtggccgccacggtggcggttgtgataatgacgcaggccatgaggcgcattcccatccagacgcccaagaaggtcgtgggggcgaagatgtacgccgggcagaatacggtgctgccgttgcgtttgaatatggccggtgtgatacccatcatcttcgcgtcgtccatcatgacgtttccggggatgatcattaggagctttgccggagcggattcgtcggttatggacgaggtgttccgttggtttaggcctgacggcgcgatttactcaatattggtcggggtgttgatcatattcttcacctacttttacacggctatggtttcaattccggttgatatcgccgacaacttgaagcgtcagggcggtttcattccgggaatccgtccgggcaagaagacggcggagtttttggagaatgtgttggctaggatcacgttgcccggttcggtgtttctggcgctcattgccgtgttgcccataatgataatgcgcgggttcggcggcgggttttactttggtggcacgagcatattgattgtggtgggcgtggctttggatacgttgcagcagttggagtctcacctgcaagcgcgtaattacgacggctttatgaagaaggggagtttgcgcgggagaaggtag

SEQ ID NO: 47682 - protein, 439 aa, Unknown
  Obtained from environmental sample
  DOMAIN (71)...(416): eubacterial secY protein
  misc_feature (1)..(439): Xaa is any amino acid
MLETVRNMFKIAELRKKIFFTLAIVFIYRLGGHVPTPGVNAEVLRNFMASNMDGLFGLYDMFVGGNFGRFTVFALGIMPYITASIILQLMGTIFPYFHKLQREGAEGRKKLTQYTRYGTVIFGAIQAAGISIFISSIQDNGVSAVIPQMKGFLFMFTTVVSLTTGTVITMWLGEQITARGIGNGISLLIFIGIVARIPNQILTEVQQIMADRMHIAKSLAIFAVVVAATVAVVIMTQAMRRIPIQTPKKVVGAKMYAGQNTVLPLRLNMAGVIPIIFASSIMTFPGMIIRSFAGADSSVMDEVFRWFRPDGAIYSILVGVLIIFFTYFYTAMVSIPVDIADNLKRQGGFIPGIRPGKKTAEFLENVLARITLPGSVFLALIAVLPIMIMRGFGGGFYFGGTSILIVVGVALDTLQQLESHLQARNYDGFMKKGSLRGRR

SEQ ID NO: 47683 - DNA, 1020 bp, Unknown
  Obtained from environmental sample
  misc_feature (1)..(1020): n is a, c, g, or t
gtggcggtagaaattaaggccgagtcggcggtcgcgggcaaggtcaagctcaaggagataatagacataaaggaggggcactgggccgactcaaaccggtcgttattaaaactgtatgagtggatagcgcaatactaccaatgcccggtggggagggtctttcgaccggtcgtcggaaaggccataatcaataaaaaggccaaaaccgttacggtttacagatgcgttgatattgacggtgataacggtatcaatgcaaatcgtccgattctcaaggataaccaacgcgccgccctcgaaaaaataaaggcccgccccgaaccgctgagcgccgcccaaatagaagccctcttcggcattaccgcgtcaaccctcgcctccctacgcaaaaagggctatctctccaaagaggtaaaaacagtgctccgcgacgccgacgaactctcctatctctccgccggcgaggaaaatatcaccctctccgccggacagcgcgcctgcgtggatcgcgtcgccgcctccttcgccgcgccggacaaaccgtttttgctctacggcgtcacggggagcggcaagacgcacgtgtacaccgaactggccaagcgtgttttggccgcaggacgcggcgtgataatcctcgtgccggagatcagcctcacgccgcaaactatctcccgcttccgcgccgccatcggcgacgccgtcacggtgatccacagccgcatgtccgacggcgagcggcgcgacagcctccaagagatagtcaccggccgccgccgcgccgtggtcggcgtgcgaagcgcgctcctttgcccgatggaagacgtaggccttattgttgtggatgaggaacacgacggatcgtacaagcagagcgacaccgacccccggtacaacgcccgcgacgcggcgggatgcgcgggcgcttgcagggcgccgcggtcgtgctgggcagcgccacgccgggcctcgaaagctaccacaacgccctcaccggcaagtaccacctgcttactctga

SEQ ID NO: 47684 - protein, 339 aa, Unknown
  Obtained from environmental sample
  DOMAIN (161)...(336): DEAD/DEAH box helicase
  misc_feature (1)..(339): Xaa is any amino acid
MAVEIKAESAVAGKVKLKEIIDIKEGHWADSNRSLLKLYEWIAQYYQCPVGRVFRPVVGKAIINKKAKTVTVYRCVDIDGDNGINANRPILKDNQRAALEKIKARPEPLSAAQIEALFGITASTLASLRKKGYLSKEVKTVLRDADELSYLSAGEENITLSAGQRACVDRVAASFAAPDKPFLLYGVTGSGKTHVYTELAKRVLAAGRGVIILVPEISLTPQTISRFRAAIGDAVTVIHSRMSDGERRDSLQEIVTGRRRAVVGVRSALLCPMEDVGLIVVDEEHDGSYKQSDTDPRYNARDAAGCAGACRAPRSCWAAPRRASKATTTPSPASTTCLL

SEQ ID NO: 47685 - DNA, 633 bp, Unknown
  Obtained from environmental sample
  misc_feature (1)..(633): n is a, c, g, or t
ttgcaggatataaaactcttgactttaccaagtttttacagtatactgaaaaaagaagggaaaagcatgatagatcggcctgaatatctaaaaaaattgctcattttcaaggataaacagcttattaagatagtaaccggcattcgccgatgcggtaaatctaccttgtttgaactgtaccagagcgaactattaagacttggcgtgaaacctgagcaaatccaaagcattaacctggaagaacccgattaccgggaatttcttgattgggaaaaactttacgatactattaacgcccggcttataaaaaacaggcaaaactatatttttttggatgagattcaaaatgtgaaagatttccagcgcgctgcggatgggctgtttatcaaaaaaaacgttgatttgtaccttaccgggtcaactccaaaatgcagtccggcgaatgggcgacgcttctttccggccgttatgtggagatccacatgtttccgttatcatttaaggaatacatttcatcggatgttttcggactgtcacgcgatcaattattcgcgcattatcttgaatacggctcctttccttttttgtttaattttcgcaatccttcacataacgccggctgggataaactaa

SEQ ID NO: 47686 - protein, 210 aa, Unknown
  Obtained from environmental sample
  misc_feature (1)..(210): Xaa is any amino acid
MQDIKLLTLPSFYSILKKEGKSMIDRPEYLKKLLIFKDKQLIKIVTGIRRCGKSTLFELYQSELLRLGVKPEQIQSINLEEPDYREFLDWEKLYDTINARLIKNRQNYIFLDEIQNVKDFQRAADGLFIKKNVDLYLTGSTPKCSPANGRRFFPAVMWRSTCFRYHLRNTFHRMFSDCHAINYSRIILNTAPFLFCLIFAILHITPAGIN

SEQ ID NO: 47687 - DNA, 861 bp, Unknown
  Obtained from environmental sample
  misc_feature (1)..(861): n is a, c, g, or t
atgcagtccggcgaatgggcgacgcttctttccggccgttatgtggagatccacatgtttccgttatcatttaaggaatacatttcatcggatgttttcggactgtcacgcgatcaattattcgcgcattatcttgaatacggctcctttccttttttgtttaattttcgcaatccttcacataacgccggctgggataaactaagtattcgcgattacctttccggtatctatagcaccattgttttaaaggatattgtcgagaacaaaaaaataaaagaagccggaaggctggagcgggttattaaattcatggctgacacgattggctcggaaacttcgataaaacggataagcgatatgctgacttccgatggaattaaaattctgccgcttaccgttgaaagttatcttgacgctttccgtgacagctatattctgtacaaagcggacagatacgacgttaaaggcaggaaactcttaaaaacgctcaataaatattacatggttgatatggggctgcgccgtctcctgcttggcgataaagctgttgacagcggacatatactggagaatattgtttatcttgaacttctgcgccggggctataaagtctatatcggcaaagttgacgacaaagaagtagatttcgcggcggaaggtccggacggtactgaatattatcaggtatctgaaactgtacgcggcaaggaaacacttgcgcgggaacttgccccgcttgaaatgatacgcgatcataaccctaaatttctgcttacccgtgattacgaaccaaatatatcgcataacggcataaagcagataaatgtactggactggctggtgtgggatggcagatag

SEQ ID NO: 47688 - protein, 286 aa, Unknown
  Obtained from environmental sample
  misc_feature (1)..(286): Xaa is any amino acid
MQSGEWATLLSGRYVEIHMFPLSFKEYISSDVFGLSRDQLFAHYLEYGSFPFLFNFRNPSHNAGWDKLSIRDYLSGIYSTIVLKDIVENKKIKEAGRLERVIKFMADTIGSETSIKRISDMLTSDGIKILPLTVESYLDAFRDSYILYKADRYDVKGRKLLKTLNKYYMVDMGLRRLLLGDKAVDSGHILENIVYLELLRRGYKVYIGKVDDKEVDFAAEGPDGTEYYQVSETVRGKETLARELAPLEMIRDHNPKFLLTRDYEPNISHNGIKQINVLDWLVWDGR

SEQ ID NO: 47689 - DNA, 816 bp, Unknown
  Obtained from environmental sample
  misc_feature (1)..(816): n is a, c, g, or t
atgagtttggctcgttatgcggaaaaaaagaaaaacgcctttttccgtttgttaagggatgcggtacaaaaacgaatctgttatgtttttttggcgccctttgcgattgtctttggcctgttttttgtagcccccctggtaatttcgctcttttacagctttacttattataatattcttgaacctccccggtttatcggtttaagaaactatataaacctgcttctgggagacgacgtattcctgaaatcagtgaagaacacttttatcatggccgcgataaccgggccaatcgggtatattatggcgtttctgtttgcctggtttatccatgagctgccccggtatgtacgagcctttgtcaccctggtattttacgcgccgtctatttccggcgcggtgtacatgatctggactattttattttccggcgacgcctacggctatatcaacgggcttttattgaatctgaagattgtgaatcaaccggtattgtggctgagcgaccccaggtttatgatgccggttgtgttggtggttattctgtggatgagtctggggacaggctttcttgcctttatagccgggctttccacaatcgacgtaacgctctacgaggccggcctgatggacggcattaaaaaccaggtggcaggaactgtggtacattacccttcccaatatgaaaggaatgttgatgttcggcgcggttatggcaattactcatcatttcggagttgcggatgttaccgtcgcgcttgccggctctccaagtacggattatgccgtgcataccgtagtcaaccatcttgttga

SEQ ID NO: 47690 - protein, 271 aa, Unknown
  Obtained from environmental sample
  misc_feature (1)..(271): Xaa is any amino acid
MSLARYAEKKKNAFFRLLRDAVQKRICYVFLAPFAIVFGLFFVAPLVISLFYSFTYYNILEPPRFIGLRNYINLLLGDDVFLKSVKNTFIMAAITGPIGYIMAFLFAWFIHELPRYVRAFVTLVFYAPSISGAVYMIWTILFSGDAYGYINGLLLNLKIVNQPVLWLSDPRFMMPVVLVVILWMSLGTGFLAFIAGLSTIDVTLYEAGLMDGIKNQVAGTVVHYPSQYERNVDVRRGYGNYSSFRSCGCYRRACRLSKYGLCRAYRSQPSC

SEQ ID NO: 47691 - DNA, 585 bp, Unknown
  Obtained from environmental sample
  misc_feature (1)..(585): n is a, c, g, or t
atggacttcaacgccgtaagtatctgtgaccctccagcggcctgttcttccaccgcgttgttcactgtcgagaaggcatcgcccatgttctttatcgcggtgaatatgttttccatggtttccatagttttattagagaccgaggtcatcagggcgatcccttcttccatttttttgacctcgtcggaaataccgttcgattccttgcttgacagttccgcaagcgtacggatctcacccgcgactacagcaaagcctttaccggtctcgcccgcatgtgccgcctctatagcggcgttcatcgcaagaagattggtcttggcggcaatatcagaaatagtcttgttcgcgttttgcaaggtcgctgactgctcatggatccgcttgacttcctgcgccagcttggccagcatggtattccctgccgccgatgaattggcaagagtgtccatgatgttttttgaactctgcatggtcgaacgtatggcgtcgatgttagtgaccattttttctatagacgaggaggacgtgcctatatgggatacctgggtctgcaccgcgacattcagggaatcaattgactga

SEQ ID NO: 47692 - protein, 194 aa, Unknown
  Obtained from environmental sample
  misc_feature (1)..(194): Xaa is any amino acid
MDFNAVSICDPPAACSSTALFTVEKASPMFFIAVNMFSMVSIVLLETEVIRAIPSSIFLTSSEIPFDSLLDSSASVRISPATTAKPLPVSPACAASIAAFIARRLVLAAISEIVLFAFCKVADCSWIRLTSCASLASMVFPAADELARVSMMFFELCMVERMASMLVTIFSIDEEDVPIWDTWVCTATFRESID

SEQ ID NO: 47693 - DNA, 765 bp, Unknown
  Obtained from environmental sample
  misc_feature (1)..(765): n is a, c, g, or t
gtgcagacccaggtatcccatataggcacgtcctcctcgtctatagaaaaaatggtcactaacatcgacgccatacgttcgaccatgcagagttcaaaaaacatcatggacactcttgccaattcatcggcggcagggaataccatgctggccaagctggcgcaggaagtcaagcggatccatgagcagtcagcgaccttgcaaaacgcgaacaagactatttctgatattgccgccaagaccaatcttcttgcgatgaacgccgctatagaggcggcacatgcgggcgagaccggtaaaggctttgctgtagtcgcgggtgagatccgtacgcttgcggaactgtcaagcaaggaatcgaacggtatttccgacgaggtcaaaaaaatggaagaagggatcgccctgatgacctcggtctctaataaaactatggaaaccatggaaaacatattcaccgcgataaagaacatgggcgatgccttctcgacagtgaacaacgcggtggaagaacaggccgctggagggtcacagatacttacggcgttgaagtccattcaggacgcgaccgagcaagtacggggcggaaccagaacaatccacgatcaaagcggtttaatccacagtgaagtcgaaacggtgcagcaaatttccaaaaacgtagcaacgcaggctcatgaagtgaaatccgccggcatgaatattttctcacacttgaagcaggcaaaagaaatcgcccaatccggaaagggtgatctcaaataa

SEQ ID NO: 47694 - protein, 254 aa, Unknown
  Obtained from environmental sample
  DOMAIN (3)...(216): Methyl-accepting chemotaxis protein (MCP) signaling domain
  misc_feature (1)..(254): Xaa is any amino acid
MQTQVSHIGTSSSSIEKMVTNIDAIRSTMQSSKNIMDTLANSSAAGNTMLAKLAQEVKRIHEQSATLQNANKTISDIAAKTNLLAMNAAIEAAHAGETGKGFAVVAGEIRTLAELSSKESNGISDEVKKMEEGIALMTSVSNKTMETMENIFTAIKNMGDAFSTVNNAVEEQAAGGSQILTALKSIQDATEQVRGGTRTIHDQSGLIHSEVETVQQISKNVATQAHEVKSAGMNIFSHLKQAKEIAQSGKGDLK

SEQ ID NO: 47695 - DNA, 558 bp, Unknown
  Obtained from environmental sample
  misc_feature (1)..(558): n is a, c, g, or t
atgaaccctgggcggtctggtctccacgattctcagcctgcgcaccaaagacgaagtgacgctggaagcctcaaggcggctgcttgcaaagcccccggccccgcagagcttgccgcattaagcgaggatcaggttgcccgccttgcctatccggcggggttttaccgcacaaaatcggcaagccttaaaaanatcgccgcaatccttcttgaacaatacaatggcgaagtgcctgccgacatggacgcgcttctggccctgcccggcgtcggcagaaaaaccgccaatctggtattaatcgaagccttcgatctccccggcatctgcgttgacgtccatgttcaccgcatatccaaccgctgcggctggctgtcaaccaaaacgcctgaggaaaccgagatgacactgcgtgagatactgccaaaaaaatactggaaagggataaacgcccttttggttctctacggacaaaatctctgccgccccgtcagcccctggtgttcccgctgcgttattaaggcccattgcaaacgggtgggaatggggaaaagcaggtag

SEQ ID NO: 47696 - protein, 185 aa, Unknown
  Obtained from environmental sample
  DOMAIN (72)...(101): Helix-hairpin-helix motif
  misc_feature (1)..(185): Xaa is any amino acid
MNPGRSGLHDSQPAHQRRSDAGSLKAAACKAPGPAELAALSEDQVARLAYPAGFYRTKSASLKXIAAILLEQYNGEVPADMDALLALPGVGRKTANLVLIEAFDLPGICVDVHVHRISNRCGWLSTKTPEETEMTLREILPKKYWKGINALLVLYGQNLCRPVSPWCSRCVIKAHCKRVGMGKSR

SEQ ID NO: 47697 - DNA, 423 bp, Unknown
  Obtained from environmental sample
  misc_feature (1)..(423): n is a, c, g, or t
atggccgagaattggatccgcgcgtcgaaatttgacgaggttgttcttcggggccaggcgccaaattccggttatcaggcaggggacggcggttacctgccccggagcatggaggccgcgcagattgtagggcaggaatttatcaccaccgcttttaacctcaagcagggtgaagtttccagattgatggaaggcgtgcggggttatcagatcattaaagttaccgaaacctacgcccagaaaaaccttgaattggatgatatttttcagttaggcagccgtattactgtccgcaattatattggcaactccatattgcaggaacggcagatggaggctcttaaaaaagctaccgaggaactggtagccgaattgcgggcgggcaggacttttcagatatttgaaagaaatctgtcctggtaa

SEQ ID NO: 47698 - protein, 140 aa, Unknown
  Obtained from environmental sample
  misc_feature (1)..(140): Xaa is any amino acid
MAENWIRASKFDEVVLRGQAPNSGYQAGDGGYLPRSMEAAQIVGQEFITTAFNLKQGEVSRLMEGVRGYQIIKVTETYAQKNLELDDIFQLGSRITVRNYIGNSILQERQMEALKKATEELVAELRAGRTFQIFERNLSW

SEQ ID NO: 47699 - DNA, 573 bp, Unknown
  Obtained from environmental sample
  misc_feature (1)..(573): n is a, c, g, or t
atggcggcaatagcatcacgcagaaaaggccgcattctggcattccaggcgctgtactgctgggaatcaaatcaagtttcttctgacgagttaatgacgttttcatggctggaaaacgagaagctggctgaacttgacgaaagtatcgccgctttttcacgtttattaataattggcactattgagaatattcaaccgattgacgaaatgatcaaaaaccatttgcagcattgggatatttcacggcttaaccgggtggatcttgccatactcaggatgagcgtatatacattgatgtatcagagggaaattgccccgtcaatagtgatagatgaagcgattggtatttcaaaagaatacggaaccgatgattcatatcgttttatcaacggggttttggatagtatccatcacacgattctggcacagacggaaaaaggagccgtccttacaaaaatgcgttataattacggaccgtattcacgtcattgctgcagattgcgtttattccggttttatgctggtattgctgctgggcggcttgtttgccggcgtgtatttcagccgctataa

SEQ ID NO: 47700 - protein, 190 aa, Unknown
  Obtained from environmental sample
  DOMAIN (8)...(140): NusB family
  misc_feature (1)..(190): Xaa is any amino acid
MAAIASRRKGRILAFQALYCWESNQVSSDELMTFSWLENEKLAELDESIAAFSRLLIIGTIENIQPIDEMIKNHLQHWDISRLNRVDLAILRMSVYTLMYQREIAPSIVIDEAIGISKEYGTDDSYRFINGVLDSIHHTILAQTEKGAVLTKMRYNYGPYSRHCCRLRLFRFYAGIAAGRLVCRRVFQPL

SEQ ID NO: 47701 - DNA, 807 bp, Unknown
  Obtained from environmental sample
  misc_feature (1)..(807): n is a, c, g, or t
atgcgtgtggctcgccaagaaggccctgctccgccccgtgggcagccgcaacccctctcccttctactcaaacatggaaacagatctgctggagaaaataaacaaccttggcataggccccatgggaacgggcggcaggatcaccgccctggacgtgcatgtcgaatactgtccatgtcatataacagccctgcccgtggcagtaaacctccagtgccacgccagccgtatcgccaggacggaattataatggaaacaaagattatacagctaacaaccccgttaataccttcagatattactgctcttgaaatcggggatgtcgttgaactgagcgggtttatctacacggccagggacgccgcccacaagcgcatggagagcgcgtggaaacagggattgcccctgcccgtcgaccttaagggacagcttgttttttacgcgggaccctgccccgccaaaccgggacacgccgtgggttccatagcccccacaaccagtatgcgcatggacggctttgtcgagatgacctttgaactgggccttatcggcatgattggcaaaggggatcgttccgacttcgttcctgatctctgcaaaaaatacggtggtatttatttcctcggcatcgggggcgcctcggcgctgatctcaaaacaggttaaaagctgcgaagttgtcgcctgggaagatttgggaacagagtccgtcaaaaagctggaagtcgaaaaattacgcctgatagtggggatagactctcaagggcgggtttttcaggacagggagatcgctaaatatcgccgctga

SEQ ID NO: 47702 - protein, 268 aa, Unknown
  Obtained from environmental sample
  DOMAIN (55)...(264): Fumarase C-terminus
  misc_feature (1)..(268): Xaa is any amino acid
MRVARQEGPAPPRGQPQPLSLLLKHGNRSAGENKQPWHRPHGNGRQDHRPGRACRILSMSYNSPARGSKPPVPRQPYRQDGIIMETKIIQLTTPLIPSDITALEIGDVVELSGFIYTARDAAHKRMESAWKQGLPLPVDLKGQLVFYAGPCPAKPGHAVGSIAPTTSMRMDGFVEMTFELGLIGMIGKGDRSDFVPDLCKKYGGIYFLGIGGASALISKQVKSCEVVAWEDLGTESVKKLEVEKLRLIVGIDSQGRVFQDREIAKYRR

SEQ ID NO: 47703 - DNA, 561 bp, Unknown
  Obtained from environmental sample
  misc_feature (1)..(561): n is a, c, g, or t
atgggggttcgccgtggctacgaggaaggctacctcagaaaatcaatggtggccgatccctttgacagaatcaacaccggagacaatacgccggcaatgctgcacacggagatcgtgccggacgacagggtgactgtcaccgtaatgcccaaaggcggcggttgcgagaacatgggagccttctgtaccctgttgccctccgatggggcgcagggggtaaaggactttgtgatacaaactattgataaggccggcggaaagccctgccctcccctgcttgtgggcgtagggatcggcggcagtatggacaaatgcgtgtggctcgccaagaaggccctgctccgccccgtgggcagccgcaacccctctcccttctactcaaacatggaaacagatctgctggagaaaataaacaaccttggcataggccccatgggaacgggcggcaggatcaccgccctggacgtgcatgtcgaatactgtccatgtcatataacagccctgcccgtggcagtaaacctccagtgccacgccagccgtatcgccaggacggaattataa

SEQ ID NO: 47704 - protein, 186 aa, Unknown
  Obtained from environmental sample
  DOMAIN (1)...(186): Fumarate hydratase (Fumerase)
  misc_feature (1)..(186): Xaa is any amino acid
MGVRRGYEEGYLRKSMVADPFDRINTGDNTPAMLHTEIVPDDRVTVTVMPKGGGCENMGAFCTLLPSDGAQGVKDFVIQTIDKAGGKPCPPLLVGVGIGGSMDKCVWLAKKALLRPVGSRNPSPFYSNMETDLLEKINNLGIGPMGTGGRITALDVHVEYCPCHITALPVAVNLQCHASRIARTEL

SEQ ID NO: 47705 - DNA, 525 bp, Unknown
  Obtained from environmental sample
  misc_feature (1)..(525): n is a, c, g, or t
atgaacgtggcttacgacgtgcagaccgccacccctaacgcggacggaactccgctcagacaggaatttgtcctggatttgggacaggtcggcggctttacccgttccatcacccagtacgccgaacaaagctcttccaaagcggtcgagcaggacggcagaacgatgggctatcttgagaacttcaagatcgattcatcaggcgtgattaccggcgttttctccaacggtaccaccagggcgctggcccaggtagccgtagccacttttgccaatcagggagggttggaaaaagcgggcgataacactttccgtatgtccaacaactccggccttgccaatatcgggccgtcaggcgccgccggcaaagctgaaattgtcgccggcgttttggaaatgtccaatgttgacatggcggatcagttcaccgacatgatcgtcacccagaggggcttccaggccaactcgcggacgatacaaaccgcggatcagcttttgcaggaactgctgagcctgaagcggtaa

SEQ ID NO: 47706 - protein, 174 aa, Unknown
  Obtained from environmental sample
  DOMAIN (134)...(172): Domain of unknown function (DUF1078)
  misc_feature (1)..(174): Xaa is any amino acid
MNVAYDVQTATPNADGTPLRQEFVLDLGQVGGFTRSITQYAEQSSSKAVEQDGRTMGYLENFKIDSSGVITGVFSNGTTRALAQVAVATFANQGGLEKAGDNTFRMSNNSGLANIGPSGAAGKAEIVAGVLEMSNVDMADQFTDMIVTQRGFQANSRTIQTADQLLQELLSLKR

SEQ ID NO: 47707 - DNA, 876 bp, Unknown
  Obtained from environmental sample
  misc_feature (1)..(876): n is a, c, g, or t
atgatgcgatcattgttttccggcgtttccggacttcagaaccaccagacaagaatggacgttattggtaacaatatagccaatatcaatacaacgggctttaaacgcaatagagttaattttcaggacataatttaccagcagcttcaaggcgcggctcgtcctacggaagacttaggcggcgtaaaccccaaagaagtcggtcttggaatgtctatcgcgtcaattgacacgcttcacattcagggaagcttgcaatcgacgggtaacccgaccgacctcgcaatcgtaggaaacggttttttcgttcttgacgacgcgggaacgcagttgttcacaagagcgggagccttctccattgacgccgacggcatcatggtaaatccggcaaacggaatgaaagttcagggctggatggcgagagaagtcgacggctataacgctcttgatgtttcagctccggttgagcagattgtaatacctgtcggaggcaaagaccccgcgaaagcgacaacgatggttcaatttgcgtgtaaccttgacaaacgtattcccgaactgccggaaaatcccacaggggcgcaggttcgtgacgcgacatggtctacaactatggatatttacgattcattcggcgataaacacgttttacaggttcaatttaccagagtggcgggaacagcaaacagctggaacgccgcggtaaatgtcgatcctcagaatcaaactccaaccaacgctacaatcggtttcggcgcggaagctccggcggcgggcggacctacaaattttgttgttaacttttcaaataacggcactttgcttcagcggaagacggggcgggcaatgtttccggcaccggccaggtacagatga

SEQ ID NO: 47708 - protein, 291 aa, Unknown
  Obtained from environmental sample
  DOMAIN (189)...(281): Flagellar basal body protein FlaE
  misc_feature (1)..(291): Xaa is any amino acid
MMRSLFSGVSGLQNHQTRMDVIGNNIANINTTGFKRNRVNFQDIIYQQLQGAARPTEDLGGVNPKEVGLGMSIASIDTLHIQGSLQSTGNPTDLAIVGNGFFVLDDAGTQLFTRAGAFSIDADGIMVNPANGMKVQGWMAREVDGYNALDVSAPVEQIVIPVGGKDPAKATTMVQFACNLDKRIPELPENPTGAQVRDATWSTTMDIYDSFGDKHVLQVQFTRVAGTANSWNAAVNVDPQNQTPTNATIGFGAEAPAAGGPTNFVVNFSNNGTLLQRKTGRAMFPAPARYR

SEQ ID NO: 47709 - DNA, 465 bp, Unknown
  Obtained from environmental sample
  misc_feature (1)..(465): n is a, c, g, or t
atggaactagcatttaaaccgacgttaagctcggatgaaagactccaacttgacaaatttgttcatgactacaacgtcggactgaatccgacgcgtcagccgcagcaaaacttgggtaaagatgatttcttaaaaatccttattacccagctttcttatcaggacccgacagcgccgatggaagacaaggaattcatcgcgcagatggcgcaattttcaacattggaacaaatgacagggatggcaaaagatttttccaagcttacttctatgctcatggggaacgaggcgtcaagcgctttgggaaagagcgttgaaataattgagggggaacgcactgtacaaggagttgttaaggcggttaccaggggagaagcacctgaggtgttggtaaacggaaacttttatgattggaaccatgtaatcaaggtttttgcagatgaaaaggagagagtagacttatga

SEQ ID NO: 47710 - protein, 154 aa, Unknown
  Obtained from environmental sample
  DOMAIN (4)...(148): Flagellar hook capping protein
  misc_feature (1)..(154): Xaa is any amino acid
MELAFKPTLSSDERLQLDKFVHDYNVGLNPTRQPQQNLGKDDFLKILITQLSYQDPTAPMEDKEFIAQMAQFSTLEQMTGMAKDFSKLTSMLMGNEASSALGKSVEIIEGERTVQGVVKAVTRGEAPEVLVNGNFYDWNHVIKVFADEKERVDL

SEQ ID NO: 47711 - DNA, 714 bp, Unknown
  Obtained from environmental sample
  misc_feature (1)..(714): n is a, c, g, or t
atgggtagcgtaagaatacagcttaggaagaccagctttgttgactatcctgggcgtatttcgtcggctttttttttctgcggctgtaatttacgttgcccgtggtgccataaccgccagttaatcatcggcggagatgaagagaatatcagcatagaagcagggtttgaccacttacggaagcggcggcaggttcttggcggggtggtattaagcggcggagagccctgcctttgtaatgagctcccgggcatcgtcagtgaaataaaaaaaactggcctgcctgtaaaattggacacaaacgggatgtttccctcgcttcttgaagaacttttctatcgggaagaaagtcggcctgattatatagcccttgacctgaaaatcgctccaaaccgttacagagacctattgcctcagggcgcacagacgcccgaccccgcttcgcttttgacgcaaagcgccctgttaatccgccaggccggcataagccacgaataccgcagccttgcgctgggcggctcttatttcggcgaaagcgatgtcgaggagcttgcccccctggctgataactccccctggtatttcaggcccttttcaggcggaaactgccttgaccccgcctgggatgccctggagagcccatctgctatggaagtaaaggctttggcaaagaaagcaagggagctaggtaaagcaggaatagcgataaactga

SEQ ID NO: 47712 - protein, 237 aa, Unknown
  Obtained from environmental sample
  DOMAIN (23)...(188): Radical SAM superfamily
  misc_feature (1)..(237): Xaa is any amino acid
MGSVRIQLRKTSFVDYPGRISSAFFFCGCNLRCPWCHNRQLIIGGDEENISIEAGFDHLRKRRQVLGGVVLSGGEPCLCNELPGIVSEIKKTGLPVKLDTNGMFPSLLEELFYREESRPDYIALDLKIAPNRYRDLLPQGAQTPDPASLLTQSALLIRQAGISHEYRSLALGGSYFGESDVEELAPLADNSPWYFRPFSGGNCLDPAWDALESPSAMEVKALAKKARELGKAGIAIN

SEQ ID NO: 47713 - DNA, 1278 bp, Unknown
  Obtained from environmental sample
  misc_feature (1)..(1278): n is a, c, g, or t
atgcaggaggctatctcgatcctggaaggaatcaagcccaagtttgaagaataccataacgtacaatattccaaatccgcgatcaaggcggcggtggatctctcgatgcgctttataagcgaccgccgcctccccgataaggcaatcgacgtactcgacgaagccgccgccgccgtgcatctgcttcccaacaggcaggaggggcgccatcgtatttccgtttcggagatcgaggccgttgtttcactgatggcgcgcgtacccgtaaccactcgggcaaatactctcggcgaggcgctcgcgctgttaccggagaaacttgagcacgcggtctttggtcaggcggaagccatctccgcgctctgccggtcattgcggcgatacggcgcgggtctggggcatcccgatcacccgctggggagcttcctttttaccgggccgagcggcgtcgggaaaacggagttatgccggcagcttgcgtccggcctggggattgagttcatctgctttgacatgagcgagtacgccgagaagcacgccgtcgccaaactgatcggttcgccgccgggttacatcggctatgatcagggcggtctcttaacggaagcaatacgcaagcatccgcacgcggtattgctgctcgacgagatagaaaaggcgcacgaagatgtattttccatactcctgcaagtgatggatcatgccacgctgaccgactcgcacgggcgcaaggccgacttccgccacgtcatactcatcctcacaaccaacgcgggttccaagagcgtgaaccagcgcggattggggttttctggcgcaggcaatgccaagggtgccaaaagtgccaaaggggcaatagaaaaggttttcagcccagagttccgcaacaggctggacgcgatactttacttcaaccccttggggcggcaggagatgctgcgcgtcgttgacaagttcgccgccgagctacagtcattattggccgaaaaaaaggtggagctgggcttcactggcgcggcaagagaatggctggccgacaagggcttcgacccaagcatgggcgcccgcccgatggccagggtcttcgaggaacacgttaagcgcccgctggcagaagaaattctatttggcaaactgaagcatggcggccatgcgatagttgacgcgcacaaagacaaactgacggtgagcgcaaagtgcgccgatggcgctgacactgccaaggcagcagtgaagccccgcagggccaaaaaatcaaagattgcaacagaagcctga

SEQ ID NO: 47714 - protein, 425 aa, Unknown
  Obtained from environmental sample
  DOMAIN (141)...(354): ATPase family associated with various cellular activities (AAA)
  misc_feature (1)..(425): Xaa is any amino acid
MQEAISILEGIKPKFEEYHNVQYSKSAIKAAVDLSMRFISDRRLPDKAIDVLDEAAAAVHLLPNRQEGRHRISVSEIEAVVSLMARVPVTTRANTLGEALALLPEKLEHAVFGQAEAISALCRSLRRYGAGLGHPDHPLGSFLFTGPSGVGKTELCRQLASGLGIEFICFDMSEYAEKHAVAKLIGSPPGYIGYDQGGLLTEAIRKHPHAVLLLDEIEKAHEDVFSILLQVMDHATLTDSHGRKADFRHVILILTTNAGSKSVNQRGLGFSGAGNAKGAKSAKGAIEKVFSPEFRNRLDAILYFNPLGRQEMLRVVDKFAAELQSLLAEKKVELGFTGAAREWLADKGFDPSMGARPMARVFEEHVKRPLAEEILFGKLKHGGHAIVDAHKDKLTVSAKCADGADTAKAAVKPRRAKKSKIATEA

SEQ ID NO: 47715 - DNA, 1158 bp, Unknown
  Obtained from environmental sample
  misc_feature (1)..(1158): n is a, c, g, or t
gtgtggggttcaatgaataacggcttgctttggcccggcaatagttggcaaccaggttataatgtgggttattttgcgcccgcatggtataaaatattcaacgattttgattcccaaaaaagaaattggacaaatgcagtaaataaaagttatgaatttataaaagcaaattcaagctatgatattggcatggtgccagactggaatcaaataaatggaacgccaggccttggcgggggtgctggatataatggatatgatggcggtaaaacttttttcaaagatgcaatcagggttttatggcgagtagcaaacgatgcgatatggtttaacgagccgaaggcaaaagagtttttaacaaattcgctaactttcataaagagcaaaggtggccctgatgcggcgaatttttaccagcttgaaggagcaaacaaaggtaaacttcttccagagatggataaatggactgaatttaacaataaagataattcaaacacttggcgctacaggcgggaacacagttggctgactgttgggcagtggataacggcggttatggcagttggtacagatgaagagaaaattgcttggagcaaaaaaatggcgaaattttatgaatatgatgtaaataaggataaaaattataagccggatttttttggtttaaaagaagacccaacaaaaggcaattacgagacttccagatacgaagacaccacgcacaacgaaatgtattttgaccagtttttggcttggtttggcgttagccttatgagcggaacttgggtgaatgtcgtagcacttttggataatcccgttgcaaatacaccgggcattccgggtagcccattccctgaactagtagagcttcctccagagcctcctcaacctcctatagaacctccttcagactcattagaacccataatagtaaagaacaatgcacggttcggcattcaagtgacccaaactggaaatggtttgcgattgcaatcaaaaagcgatgtcacgtggaaaatccacaatttgcaaggaaagctcctattcagctcaagttcaagagaaattgtctggaacgcaggcaatttcaaaggaacagccattgtaagcgcagccagcaggtctggcacggcgcgaaaactagtcgttcttcgttag

SEQ ID NO: 47716 - protein, 385 aa, Unknown
  Obtained from environmental sample
  misc_feature (1)..(385): Xaa is any amino acid
MWGSMNNGLLWPGNSWQPGYNVGYFAPAWYKIFNDFDSQKRNWTNAVNKSYEFIKANSSYDIGMVPDWNQINGTPGLGGGAGYNGYDGGKTFFKDAIRVLWRVANDAIWFNEPKAKEFLTNSLTFIKSKGGPDAANFYQLEGANKGKLLPEMDKWTEFNNKDNSNTWRYRREHSWLTVGQWITAVMAVGTDEEKIAWSKKMAKFYEYDVNKDKNYKPDFFGLKEDPTKGNYETSRYEDTTHNEMYFDQFLAWFGVSLMSGTWVNVVALLDNPVANTPGIPGSPFPELVELPPEPPQPPIEPPSDSLEPIIVKNNARFGIQVTQTGNGLRLQSKSDVTWKIHNLQGKLLFSSSSREIVWNAGNFKGTAIVSAASRSGTARKLVVLR

SEQ ID NO: 47717 - DNA, 534 bp, Unknown
  Obtained from environmental sample
  misc_feature (1)..(534): n is a, c, g, or t
atgatcacgtccgcgtcgcaccacttcgcgatggcgtgctgggtcatggtctttccggtgccgaagcctcccggtatggcggcggttccgcctttggaaatcggaaaaaaaacgtcgattaccctttggcccgtaattaggggcgtatcgggagaaagccgctcggcgcttggcctgggaatgcgtacaggccaccactgggcaagggttatttccctgccctcgtctgtcctggccacaacggaagacacagtatgttccccctgcgggctaagctccgttatcttgtcaacatgcgccgaacgtgtattcggcgtaggcaccatgattttacaggtaacgctctctgtttcctttacagtaccaagcacaaggccgggaacggcggaaactttttcgcctgccgccactttcgcggccaaagcgggatcgggaacaaaaggccactttttttccgcgtccagcggctcgccacggctgcctgattccatgaacgccccgtttttctcaaagagtttctcaagcgggcgctga

SEQ ID NO: 47718 - protein, 177 aa, Unknown
  Obtained from environmental sample
  misc_feature (1)..(177): Xaa is any amino acid
MITSASHHFAMACWVMVFPVPKPPGMAAVPPLEIGKKTSITLWPVIRGVSGESRSALGLGMRTGHHWARVISLPSSVLATTEDTVCSPCGLSSVILSTCAERVFGVGTMILQVTLSVSFTVPSTRPGTAETFSPAATFAAKAGSGTKGHFFSASSGSPRLPDSMNAPFFSKSFSSGR

SEQ ID NO: 47719 - DNA, 645 bp, Unknown
  Obtained from environmental sample
  misc_feature (1)..(645): n is a, c, g, or t
atggaagagctgagaacaaccgaagtgctgggcaatgaaatccttgaggatgcccggaagaaagcccacaagatcttaaaaacctctgaggataccctcgccgcgcaaaaccgggattgggaaaagaaaataaagcgttcggtggactccatccggaaaacattcgcggagcggacaaaaaaaaccaacgaggagattcaggcccgtcttcccctggacaagcgcaggcttcgatccgaaaccaccgaaagttttttggtcaaggctatggatgattttctgcggacattgagccgggaaaagctccttcttgtcctggagcgggagcttaaggcgcgcttaaaagtctgtgccgatgatcttgccaaacaccgccctgtagtccgctattcaggccttaatcttgacgaagccaaagcggttcttgaaaaggtaagcggcgccctggaagctacggacttcctggtcagccccgaatgggaattcaggacggattcggttgtccgtgaattccctttaatatttgttgaattaaaaacattaagaataattgcttcggtgaaaagcaccgcaaaagctttgctgagagacaagcgtgcggaattggccgccgcccttctgggcgagggagtactaaatgactag

SEQ ID NO: 47720 - protein, 214 aa, Unknown
  Obtained from environmental sample
  misc_feature (1)..(214): Xaa is any amino acid
MEELRTTEVLGNEILEDARKKAHKILKTSEDTLAAQNRDWEKKIKRSVDSIRKTFAERTKKTNEEIQARLPLDKRRLRSETTESFLVKAMDDFLRTLSREKLLLVLERELKARLKVCADDLAKHRPVVRYSGLNLDEAKAVLEKVSGALEATDFLVSPEWEFRTDSVVREFPLIFVELKTLRIIASVKSTAKALLRDKRAELAAALLGEGVLND

SEQ ID NO: 47721 - DNA, 402 bp, Unknown
  Obtained from environmental sample
  misc_feature (1)..(402): n is a, c, g, or t
ttgcctttggggtttccttgtggccctgctaattttggtgataaactaggctcccattcaatggactattttttcatcggagaagcggaactggttacagctttccgttttgcaggcattagcggaatttcagtgcaaaactcaggcgacacccttgacgcgttccgcagaattaccgaaaactacgacgaaacctcgggaactgttctgccggacatggagttttgccgcgtgcttatcatcacggaggaagtggccgactggcttggggatacccttgtccaatggcagcttaaagatcgctatcctttgattgtggaaatcccgggacttttgggaaggcaggcgggccgcaaaacactggtggaatccatcagggaagcaatcggagtcagagtctaa

SEQ ID NO: 47722 - protein, 133 aa, Unknown
  Obtained from environmental sample
  DOMAIN (26)...(128): ATP synthase (F/14-kDa) subunit
  misc_feature (1)..(133): Xaa is any amino acid
MPLGFPCGPANFGDKLGSHSMDYFFIGEAELVTAFRFAGISGISVQNSGDTLDAFRRITENYDETSGTVLPDMEFCRVLIITEEVADWLGDTLVQWQLKDRYPLIVEIPGLLGRQAGRKTLVESIREAIGVRV

SEQ ID NO: 47723 - DNA, 306 bp, Unknown
  Obtained from environmental sample
  misc_feature (1)..(306): n is a, c, g, or t
atgatgaagcgtcttatttttgttctggcactggtttttatagcctcggcttttatttttgcccaggaagcccaggaatctgaagattcatcggcatcaatgtggaagtacattgccgccgccgctgctgtaggaatttcctgcatcgccggcggtttggctgtaggtaagattggagcagcggcgatgggcgcaatgagcgagaatcctgagctttcgggaaaggccataccgtatgtcggccttgctgaaggaatttgcctttggggtttccttgtggccctgctaattttggtgataaactag

SEQ ID NO: 47724 - protein, 101 aa, Unknown
  Obtained from environmental sample
  SIGNAL (1)...(21)
  DOMAIN (35)...(100): ATP synthase subunit C
  misc_feature (1)..(101): Xaa is any amino acid
MMKRLIFVLALVFIASAFIFAQEAQESEDSSASMWKYIAAAAAVGISCIAGGLAVGKIGAAAMGAMSENPELSGKAIPYVGLAEGICLWGFLVALLILVIN

SEQ ID NO: 47725 - DNA, 801 bp, Unknown
  Obtained from environmental sample
  misc_feature (1)..(801): n is a, c, g, or t
atgatagcccgcttaatggaagaagcccgaaaaatcgtactcaagtttggttccaataccctggcagccgcagacgggaaaatcaattctgtgattttggatgaatttgccgctcagattgcagacttggtcaggagcggaaaacagattgtcattgtttcttccggtgcgcaagtggcggggctttctaccatggacaaatgggcacgcaaaaaagacattcactacaggcaggccctctgcgcggtgggccaggttgagctcatgaaggcgtggggacgggcgtttgaaaaaactggccttcacattgcccaaatactccttacccaggaagatttcgccgattccatccgtacactcaatatgcgaaacacgctctttaccctggtggacgaggaggtcattccggtaattaacgagaacgacaccgtatcggtggcggaaataaaaatcggcgacaatgataccctggcggcccagtcggccatactatggagcgcggatcttcttatccttttcagcgacatcgacgggctttacaccaaaaaccccaaagagttctccgacgcggaactggtggaagaagtttttgacataaaggcggttagggagaaggtgactatcggcagttccaacgcgctgggtacggggggaatcgcaacaaagatatcagccgccgaaagaaccataccctacaacattcccactattattaccaatggctcaaagcccagggcactggaatccctggccgcagggaaacagcgcggcacggcctttatgcctgaggggaaaaaatga

SEQ ID NO: 47726 - protein, 266 aa, Unknown
  Obtained from environmental sample
  DOMAIN (10)...(240): Amino acid kinase family
  misc_feature (1)..(266): Xaa is any amino acid
MIARLMEEARKIVLKFGSNTLAAADGKINSVILDEFAAQIADLVRSGKQIVIVSSGAQVAGLSTMDKWARKKDIHYRQALCAVGQVELMKAWGRAFEKTGLHIAQILLTQEDFADSIRTLNMRNTLFTLVDEEVIPVINENDTVSVAEIKIGDNDTLAAQSAILWSADLLILFSDIDGLYTKNPKEFSDAELVEEVFDIKAVREKVTIGSSNALGTGGIATKISAAERTIPYNIPTIITNGSKPRALESLAAGKQRGTAFMPEGKK

SEQ ID NO: 47727 - DNA, 690 bp, Unknown
  Obtained from environmental sample
  misc_feature (1)..(690): n is a, c, g, or t
atgttgcggcgaataaaaaacgcagccgaagatgatacacccgttattataggcgacngcgctgccaggggaatgcgctccggccagatagtcaatttaggcatcgcctttcctgaaatggtgggaatatacgcttcaaaaatgggcatcttaaaagatataaccattactgttgaggccggcggcataggcgggcttccagcgcctggctttgcgttcggcgcaacaatcggcgcggatataatcaccgatatggcgacccagtttgatttttatgacgggggcggccttgacatctgctttttgggaggattggaagccgacagggaaggcaacgtgaacgcccacaagctggaagggagttacgccggaatcggcggcttcgccaacatcacccacgccaccaaaaccatagtgttctgcatgagttttacaaccaaagggcttctcacaacaaacgagaatggcaaaatacagataaaacaggaaggctcaataatcaaattcaagaaaaaagtttccgcgatcagtttttccggcaaacacgccttcagccgagggcaaagagtgttgtacgttaccgaacgctgcgtattcgagctgacagaaaaaggactcaggttgaaagaagtattccccggaattgacgaaatgcgccagattcgcaatatgctggatttcgagtgctga

SEQ ID NO: 47728 - protein, 229 aa, Unknown
  Obtained from environmental sample
  DOMAIN (15)...(223): Coenzyme A transferase
  misc_feature (1)..(229): Xaa is any amino acid
MLRRIKNAAEDDTPVIIGDXAARGMRSGQIVNLGIAFPEMVGIYASKMGILKDITITVEAGGIGGLPAPGFAFGATIGADIITDMATQFDFYDGGGLDICFLGGLEADREGNVNAHKLEGSYAGIGGFANITHATKTIVFCMSFTTKGLLTTNENGKIQIKQEGSIIKFKKKVSAISFSGKHAFSRGQRVLYVTERCVFELTEKGLRLKEVFPGIDEMRQIRNMLDFEC

SEQ ID NO: 47729 - DNA, 1572 bp, Unknown
  Obtained from environmental sample
  misc_feature (1)..(1572): n is a, c, g, or t
gtgcccataacggtggcttactttgaacggctgaaatttcaggcgtccctttccgcgccggcggcggcgataataagcggcgatgacattaaccttaagttacaggcgacttacctatcaggcggcagtctgtccggcgcttcatgggagagcgcgtggtacgatgagatgtcggtctttcagccaaaaacacccgaaactaaaggttatatgttcgggccccgccgcgtctgggacagcaagcgtaacatcgcttcaaatgaaggagttctcggagggcagggaaccgcgaccctcagccagaaaacaggcggcggcaaaataaccggcgccgcgtatctttaccaggctgaggccagggtaaccgacatcagcaatcagatggtaagcgcctaccgctcggtaatggttcatcccgcccgtttttacataggcctgcgccacaaggccggcggtttcgcgcggaaaggacaggaattatcatacgattacataaccgttaataccacgggtgaaaaaacagcgaataacgggcttttcctgcaaacaggggaaaacgccggacagcttaaggttgagcttatccgggaagaatggaggcgcgtccagcagaggggagtgaacggttatatttatgacgaatattcaccggaacaggtaatcgacagcgttcaaaatatagcgattagaaacggcggaggttcaatcaagattaccccaagtagcgcggggtatcatatcttacgggtttccgcgcaggacagggaaggcagaacagccctgacggaattgaatttttatgtcaccggttcgggcggctactggaacatgagcaaccccagcgaactaaggcttacgccggatcaggaaatgtataaccccggcgacacggcgaagattctgctgcaaagcacgcttcccgaaggccggtatttaatcacggtggagcgggaaggcatattcaccgaggaagtccggcattttaccgagccggtttcggtgattgacattcccattgcgcgtaactatgtgccggtggtctatgtggcggtttcgtcctattcggtgcgatccggccctcccacccatgaatatggcagccccgacctggacaagcccaaaggttatttcggcgtaacgcggctcagcgtgaatccccgggcgcgggccttttcggtaaaggtggaaagcaacaagaaaacctaccgtcccggcgaggaagttaccatgacccttaccgcgaccaaagacggcaaacccctgtccagcgcggaacttaccctgatggcggtagaccgtggcgtattggatcttatcaattaccatgtgcccgacccgatacagtatttttataatgaagaccgcttccccctcatggtagcgggcggcgattcgcgcgcgtggcttatggatcctgtaacctacagcgtcaagaacctcgccggcggcgacgcggaaggcgacagcaaaattgaggaacgcaaggactttaaccccaccgcggtatttgagcctatgttgataaccgatgattcgggcaaggtaccgcaaatcaagctcccctcgcgataa

SEQ ID NO: 47730 - protein, 523 aa, Unknown
  Obtained from environmental sample
  DOMAIN (279)...(441): Alpha-2-macroglobulin family N-terminal region
  misc_feature (1)..(523): Xaa is any amino acid
MPITVAYFERLKFQASLSAPAAAIISGDDINLKLQATYLSGGSLSGASWESAWYDEMSVFQPKTPETKGYMFGPRRVWDSKRNIASNEGVLGGQGTATLSQKTGGGKITGAAYLYQAEARVTDISNQMVSAYRSVMVHPARFYIGLRHKAGGFARKGQELSYDYITVNTTGEKTANNGLFLQTGENAGQLKVELIREEWRRVQQRGVNGYIYDEYSPEQVIDSVQNIAIRNGGGSIKITPSSAGYHILRVSAQDREGRTALTELNFYVTGSGGYWNMSNPSELRLTPDQEMYNPGDTAKILLQSTLPEGRYLITVEREGIFTEEVRHFTEPVSVIDIPIARNYVPVVYVAVSSYSVRSGPPTHEYGSPDLDKPKGYFGVTRLSVNPRARAFSVKVESNKKTYRPGEEVTMTLTATKDGKPLSSAELTLMAVDRGVLDLINYHVPDPIQYFYNEDRFPLMVAGGDSRAWLMDPVTYSVKNLAGGDAEGDSKIEERKDFNPTAVFEPMLITDDSGKVPQIKLPSR

SEQ ID NO: 47731 - DNA, 693 bp, Unknown
  Obtained from environmental sample
  misc_feature (1)..(693): n is a, c, g, or t
atgacagatcggccgagagacggatttcttgcatatactcaagtatttattggtattaaagctaaaacagagggagaattagagcttaaaaagttctataattggtttaaagataataatgatgtattacgttcttgccttcatttagttggcggacgattgttaacatctagatctacagcatctcaagaaagtgatattatgaatttaccttgtccagaagatcataattttgatttatcaacatgggaaaaagaattattagatgatataaacaattttatagctgaatatgtcagagttgggcaagattccaggttattaaaaaatattgcatcagaaaaaaatataaagaattactcacaaacctttcttcgtcagatgaataatatatatcccaaaatggtaaatagcagaaatattttcaatgataatttcagacttatagttttttctttttatggggatataaatattttaccggaattaaataatccaaatgttttggataatctgtctgaattaattcctaaggacaaaggcgaatttcttaggacacaaagagttgtacgaatacttacaggagatgcaattattatcattaaaccaaacaagctacgttactggatacaatctacagcgattcaggatgccgatgacataataatggacatctttaaaggtgggaattaa

SEQ ID NO: 47732 - protein, 230 aa, Unknown
  Obtained from environmental sample
  misc_feature (1)..(230): Xaa is any amino acid
MTDRPRDGFLAYTQVFIGIKAKTEGELELKKFYNWFKDNNDVLRSCLHLVGGRLLTSRSTASQESDIMNLPCPEDHNFDLSTWEKELLDDINNFIAEYVRVGQDSRLLKNIASEKNIKNYSQTFLRQMNNIYPKMVNSRNIFNDNFRLIVFSFYGDINILPELNNPNVLDNLSELIPKDKGEFLRTQRVVRILTGDAIIIIKPNKLRYWIQSTAIQDADDIIMDIFKGGN

SEQ ID NO: 47733 - DNA, 519 bp, Unknown
  Obtained from environmental sample
  misc_feature (1)..(519): n is a, c, g, or t
gtgatagatttatattaccatattaaaataatagtttcggttctttctaaagagttacagaaggaatttccccggaataaagggttttctgaacgaaatttatggcttatgacccagttttacaatgaataccaaaatgttgaatttctgcaaccactggttgcagaaattagctggactagncatattacaataatgagcaaatgtaaggataaccaggaacggcgtttttatatcatggcaactaaaaatttcggctggtcgaaaaatgtccttatccaccaaatagaaaacaaaacctatgaaaaatacctgttgggtcagacaaattttgatacaacccttcctgacagcatcaaaaatcaggcggttctggcgataaaagatgaatacacctttgacttcatggatctggccgataatcacagcgaacggcagttggaggcggcattagtcaacaatgtccgttcttttctgctggaaatgggttcacaattttcggctcttctgggaatatag

SEQ ID NO: 47734 - protein, 172 aa, Unknown
  Obtained from environmental sample
  DOMAIN (1)...(172): Protein of unknown function (DUF1016)
  misc_feature (1)..(172): Xaa is any amino acid
MIDLYYHIKIIVSVLSKELQKEFPRNKGFSERNLWLMTQFYNEYQNVEFLQPLVAEISWTXHITIMSKCKDNQERRFYIMATKNFGWSKNVLIHQIENKTYEKYLLGQTNFDTTLPDSIKNQAVLAIKDEYTFDFMDLADNHSERQLEAALVNNVRSFLLEMGSQFSALLGI

SEQ ID NO: 47735 - DNA, 1671 bp, Unknown
  Obtained from environmental sample
  misc_feature (1)..(1671): n is a, c, g, or t
gtgtcagataacggttccggcatggacagggaaaaccttgagaaatgctatcttccccacgcgacaagcaaaatccgttcccttgatgatttggataccgtggaaacgctcggtttccgcggcgaggccctggctgccgccgccgcggtcgctcaactggaaattatcagcagcaccggaaacggcgccaccacaggtggcggcgccattggaaatggcgaggcctggcggcttgaagcgggccccggcgaagaaagacgcgcgcacatcagcaccgccaacaggaccaggggcactacggtacgcgcaatcgatttgtatgaaagcatacccgcgcgtaaaaaatttcttaaaagggacggaagtgaggccgcacagtgccgccagatgtttatcgacaaagcgctcgcctttccggaaataaccttccgctttacccaggacggcaagccaaaagatttccttcccgccgcaaattcaaagaaggaacgttttgccgccgccgtgggcgccgccatgccggaagccaatgaaggaaaatttctccacgagattaatgtttcaggcgaaggattttctgttgatgtcgtaatcggcggcccggagctttttcgcactgacaggcgcatgttatacgtctttgccaatggaaggcgaattcaggactattcgcttataaacgcgatggagtacggaacccagggctggttccccaacggaacccaccctgtgggagcggtgtatgtggacatagatcccgctcttgccgatttcaacatacaccccgccaagaaagaggcccgttttaaggatccgggggcgatccaccacgcgataagcgcggggctaagggatttctgccgccgccatgtacttaaatcaggtatggatgaaccgcaaaaacctaaaatacataatgacaattttattaacaatatagggagcggggttcttaatagcaatacagagtggttaacgcaatctaagcggcaacgcgacgcgggtgccggagggatacttgcgatgaaggccattttagactcgccccccgctttcgcgcctttgccgggacaggcgcaaaacgccgctgccgcgaattacgcgggcgaagacgcccccttatacggagaaccgcgttactcaggctgtgttttcggcgtgtttattttgcttgaatggggcgacaaactgttcatcatagaccagcacgccgcccacgagagaatcctctataaccgttttctttcacagcccgtacccgcccaggaattgctggtccccatcgctttcactaccgaaagcgaagaagacgataattttcttgaggtaaaaaaagaagagctttccgccctggggattgtaattgaaaaggatgaaaacagctggcagataaccgcgcttccgtcggactggcgtttgacggacgcgcagactgtaaaagaaatcatcgctttacgcgaggccggcgaaaatatcgccgaacgctgggccgccaccatgagctgccatcaggcggtacgggacggcgaacgtcttgacgagtcctcggcgctggccctggcaaaagaggcgcttgcgctgcccgagccccgctgcccccacggccgcccgatatggaccgaggtcagcagagaagcgctatacaaagccgtaaggcgaagtaaaaaatag

SEQ ID NO: 47736 - protein, 556 aa, Unknown
  Obtained from environmental sample
  DOMAIN (178)...(288): DNA mismatch repair protein, C-terminal domain
  misc_feature (1)..(556): Xaa is any amino acid
MSDNGSGMDRENLEKCYLPHATSKIRSLDDLDTVETLGFRGEALAAAAAVAQLEIISSTGNGATTGGGAIGNGEAWRLEAGPGEERRAHISTANRTRGTTVRAIDLYESIPARKKFLKRDGSEAAQCRQMFIDKALAFPEITFRFTQDGKPKDFLPAANSKKERFAAAVGAAMPEANEGKFLHEINVSGEGFSVDVVIGGPELFRTDRRMLYVFANGRRIQDYSLINAMEYGTQGWFPNGTHPVGAVYVDIDPALADFNIHPAKKEARFKDPGAIHHAISAGLRDFCRRHVLKSGMDEPQKPKIHNDNFINNIGSGVLNSNTEWLTQSKRQRDAGAGGILAMKAILDSPPAFAPLPGQAQNAAAANYAGEDAPLYGEPRYSGCVFGVFILLEWGDKLFIIDQHAAHERILYNRFLSQPVPAQELLVPIAFTTESEEDDNFLEVKKEELSALGIVIEKDENSWQITALPSDWRLTDAQTVKEIIALREAGENIAERWAATMSCHQAVRDGERLDESSALALAKEALALPEPRCPHGRPIWTEVSREALYKAVRRSKK

SEQ ID NO: 47737 - DNA, 1377 bp, Unknown
  Obtained from environmental sample
  misc_feature (1)..(1377): n is a, c, g, or t
ttggccgagaaatggaaagtactggtctttacagcgcaaacgcgcgcggatgccgatattgatcttggaaacggttttataaccgcgttcggggttcaggagctttattcgctgtggaagcagacaggcgatattagtcttgattttatagaagtaaaaatcgaaagacttcttgaaagtaaaaataacgaactatcgacgcccgagaaagagaaattattattatttaaggatattccgaatgccgccattatcatgccgaggagttacaagcttgatgtgcttaatcagggttttaccacttccgtttacggccttgtggaatacaaaagcccgaatcagaaaataggggcggaactcggtttacgtttggatcatctgtattttttgggaaaggattttaacattcaaacaactccggccctgaatccccgtttaaatgtcgactttaacatttttaaaaataaaggcatttttgattcgcttgatattacgctgggaaccggcctgttctcgtcaatagacaaactgctcagttttatcagcccgaatttcggcaacggcgatctggaaattaaattcaacagggcatggacttcgttgattggatttaaaactgacatagccgggggttacagttttaatattgaaggttattacaaaagggtatttgaccgggcctatattaccgccgacaccgtttcaggcaataatataaaacctgatttcaattttgacggagtcggaaatgtttgggggtttgatttacaactgcaaaaactggagtccagatactgggacggctggatttcctactcgtttaactgggcgaagtaccacgatccgtcggcgggcggtgaaggtttaagcatgggaagcgccgatactatcggggatacatggtactatccgtcctttcaccgttttcacaattttaaccttgtgcttaatattaagcccctgctctggttcaatataggccttcgtttcgggttcgcgtcgggacagccgagggataaacgggacgataaaccgccggaaccttatcccgtattgttattcaacgaagatgaaaatggaaataacaaggtggatattctgcagaaatacaggcgcgattcatggtatgatgaaaacgagcgggctccgtggtctttcccgctcgacataaaattttcattcttccccgccaataaaaaaggcagggcaagcatggaaatatacgcggcaggagaaaatatgatgtcgctcttctacactccccccgctcgtacgacttttaactcgtactcgggcaaggaagacaaaggcggcggttcaagctctttcgacctgcccataccaatgatttctttcggcattaaatggaggtattaa

SEQ ID NO: 47738 - protein, 458 aa, Unknown
  Obtained from environmental sample
  misc_feature (1)..(458): Xaa is any amino acid
MAEKWKVLVFTAQTRADADIDLGNGFITAFGVQELYSLWKQTGDISLDFIEVKIERLLESKNNELSTPEKEKLLLFKDIPNAAIIMPRSYKLDVLNQGFTTSVYGLVEYKSPNQKIGAELGLRLDHLYFLGKDFNIQTTPALNPRLNVDFNIFKNKGIFDSLDITLGTGLFSSIDKLLSFISPNFGNGDLEIKFNRAWTSLIGFKTDIAGGYSFNIEGYYKRVFDRAYITADTVSGNNIKPDFNFDGVGNVWGFDLQLQKLESRYWDGWISYSFNWAKYHDPSAGGEGLSMGSADTIGDTWYYPSFHRFHNFNLVLNIKPLLWFNIGLRFGFASGQPRDKRDDKPPEPYPVLLFNEDENGNNKVDILQKYRRDSWYDENERAPWSFPLDIKFSFFPANKKGRASMEIYAAGENMMSLFYTPPARTTFNSYSGKEDKGGGSSSFDLPIPMISFGIKWRY

SEQ ID NO: 47739 - DNA, 846 bp, Unknown
  Obtained from environmental sample
  misc_feature (1)..(846): n is a, c, g, or t
ttggctatgacgatatccttaacgaaaaggaagccacgttttcaatacaaaaagcagtatttcgccttgaagacgcggatcaattccattatgtgggataatgatgacggcttttaccatgacattgacaagcacgaaaagcgcctcccggtaaagaccttggcaggctattggcccctgcttgcggaaattcccaacgacgacaaggcagagcggatcattagcaggctttctgacccgaaatatttcggggcgccgcatcccttcccctgtgtggctataaacgaaaagtcttttgacgaaagcggcaatggctacaggggttctgttttcccgcaccttacatttatggttataaaaggccttgaaaggtaccagcgctgggatctctcaagggacagcgccataaggcacctgtattttatccttgactccatgagtcccgacggtaaccaccataaagacaggctttgggaggcctaccttccaatgaaagaagggcctgcacaatggccggggagagatgattttccccggccgcaataccttacctacgccgccctttccacaatctgccttaccatagaaaacattataggtcttttaatatccctgccgcgaaagactgttgactggatcatcccgaatctggaaataatggggatagaaaatctttcgctaaaaaagaatatgatcacaatcctgtcgaataagagcgggcggggttgggaaatccatatggaaagcgaaaagctttattattttacgattaatatattaggaaaaaagaaaaaaaccctgccaattccatcgggcaagtgctcaatgctgattgacaagttataa

SEQ ID NO: 47740 - protein, 281 aa, Unknown
  Obtained from environmental sample
  misc_feature (1)..(281): Xaa is any amino acid
MAMTISLTKRKPRFQYKKQYFALKTRINSIMWDNDDGFYHDIDKHEKRLPVKTLAGYWPLLAEIPNDDKAERIISRLSDPKYFGAPHPFPCVAINEKSFDESGNGYRGSVFPHLTFMVIKGLERYQRWDLSRDSAIRHLYFILDSMSPDGNHHKDRLWEAYLPMKEGPAQWPGRDDFPRPQYLTYAALSTICLTIENIIGLLISLPRKTVDWIIPNLEIMGIENLSLKKNMITILSNKSGRGWEIHMESEKLYYFTINILGKKKKTLPIPSGKCSMLIDKL

SEQ ID NO: 47741 - DNA, 456 bp, Unknown
  Obtained from environmental sample
  misc_feature (1)..(456): n is a, c, g, or t
atgggaatgaacaggcgtgaacggatgttgctggaattagcggcaatggttcacgatataggaatgtatataagggcggcagagcataatctgcatggacagtacatcatagccaattccgagatcttcggcctcaggcgggaagaactggatataataggcaatgttattcgctatcaccggggaccgcctccgtctccgaccgacatcgactacattgcccttcagagggaagaacgtatccttgtactaaaaatggttgccatactgagggttgcggacgcgctggacaggggacattcccagcaggtaaaaataaaagcagtagagaaaaaaggcgaaattctggtgcttaatactgacacgaccctggatctttccctggagcttatggggctggaggaaaagagcggcgtgtttcaggatgtgtttggctataaagtagtgataaattga

SEQ ID NO: 47742 - protein, 151 aa, Unknown
  Obtained from environmental sample
  misc_feature (1)..(151): Xaa is any amino acid
MGMNRRERMLLELAAMVHDIGMYIRAAEHNLHGQYIIANSEIFGLRREELDIIGNVIRYHRGPPPSPTDIDYIALQREERILVLKMVAILRVADALDRGHSQQVKIKAVEKKGEILVLNTDTTLDLSLELMGLEEKSGVFQDVFGYKVVIN

SEQ ID NO: 47743 - DNA, 1002 bp, Unknown
  Obtained from environmental sample
  misc_feature (1)..(1002): n is a, c, g, or t
gtgcgtctgctgaccgacgccacgggcattgacgacaagtcattcaacgcggcggcatggcgaggcattctggaattctacggagacacctggaataacacgacaaagcggggcgctctctacgatgtggtgaccgcgcaaacccaggatatgtacatacccaacctcaggcagaccaccgatgagggttacgatcttatcgtcaccactggttttacctgggccgacgcgcttgccgaagtcgcgaaaggcaaccctcagcagaagtatatgatcgtagacactaactggctgcaaggggcgaatataatgcaggccgcctatgccgagcatgaaggttcctatcttgtcggcgcggcagcggccttaaaagcgaaagaagataaagtccccaatccgcgtttcggctttattggcggcgttccgggcgccctgataaccaggtttgaagtaggctatgtgcagggcgtattgtccgtttttccgaatgcccagattgttgactactatgttaacagttggggcgagccggcgcttgcgaaaacccaggcgaaaaactggtacgatgccggcgtgtacgcgatttactccgcggcaggcggcagcggcaacgggaccatcgcccaagccaaggaataccggtccgcgggcaaggatgtctgggccatcggcgttgattccgaccaacatgaagagggcctgtacaacgacaaggactcggcggtgctgacttcaatgctgaagctggttgaaaccagcctggtctacgcgttgaattccattaagaataacacttatcagggcgagacaatcacttttgaccttgcgaaagacggcgttggttattcaaccaccaaccccctgcttgacgcttccataanaaccgaacttgaaacnaatcaacaaaagatcataaaaggcgagattaaaattgcttcatccaacgccgaagcgaaaaagctcccccggctcccgcagaattttaaggcggtagacgactaa

SEQ ID NO: 47744 - protein, 333 aa, Unknown
  Obtained from environmental sample
  DOMAIN (4)...(315): Basic membrane protein
  misc_feature (1)..(333): Xaa is any amino acid
MRLLTDATGIDDKSFNAAAWRGILEFYGDTWNNTTKRGALYDVVTAQTQDMYIPNLRQTTDEGYDLIVTTGFTWADALAEVAKGNPQQKYMIVDTNWLQGANIMQAAYAEHEGSYLVGAAAALKAKEDKVPNPRFGFIGGVPGALITRFEVGYVQGVLSVFPNAQIVDYYVNSWGEPALAKTQAKNWYDAGVYAIYSAAGGSGNGTIAQAKEYRSAGKDVWAIGVDSDQHEEGLYNDKDSAVLTSMLKLVETSLVYALNSIKNNTYQGETITFDLAKDGVGYSTTNPLLDASIXTELETNQQKIIKGEIKIASSNAEAKKLPRLPQNFKAVDD

SEQ ID NO: 47745 - DNA, 927 bp, Unknown
  Obtained from environmental sample
  misc_feature (1)..(927): n is a, c, g, or t
atgaaccttgaagcttttattctcggctgcggcggaatgatgcctttgcccaaccgccatcttacatcggtgcttttaagaagggaaggcgacctttttttgtttgactgcggcgaaggtacccaggtatcgctaaggcggttgaacctaaggtggaaaaaaatctccgtcatttttgtcagccacacccacgccgatcacgttactggaatccccggccttcttatgctttcctcacaggtggacagagacgatcctctttacataatcgggccgccgaggattgccgaatacattgaaagcagccgccgtgtgctggatatgtacatcaactacgagattgttgtcaaggaagttactgcgccgggagtggtttatacaggcgatggttttcatgtgcgggcttttcccttgaggcacacaaagccctgctacggctatactttggaagaggacaagcgccccggggaattccacgtcgaaaaagccgaggctctgggcgttaagcgcgggccaaagtgggctgcccttcagtcaggccagatcgttcaggccgaagacggaacagacgtactgccggcacaggttttgggcccggaaagaacggggaggaaattttcttttgttaccgacaccctggctttccgggaaatagcggacgaggtagcgggctcggatctttttgtctgcgaaggaatgtttgagaaggcccttgaagaaagcgccagggaaaaaaggcacatgacagccgaacaggcagcctgcatagccaaggcagccaccgtaaaaaagcttgcgcttattcactacagtccgcgttacaccgagtacgagcttaagcaggtgataagggaagcggaagcagttttcccttccacggttctgtcgaaggatagaatggtttttccgattgaatatgttgattaa

SEQ ID NO: 47746 - protein, 308 aa, Unknown
  Obtained from environmental sample
  DOMAIN (20)...(225): Metallo-beta-lactamase superfamily
  misc_feature (1)..(308): Xaa is any amino acid
MNLEAFILGCGGMMPLPNRHLTSVLLRREGDLFLFDCGEGTQVSLRRLNLRWKKISVIFVSHTHADHVTGIPGLLMLSSQVDRDDPLYIIGPPRIAEYIESSRRVLDMYINYEIVVKEVTAPGVVYTGDGFHVRAFPLRHTKPCYGYTLEEDKRPGEFHVEKAEALGVKRGPKWAALQSGQIVQAEDGTDVLPAQVLGPERTGRKFSFVTDTLAFREIADEVAGSDLFVCEGMFEKALEESAREKRHMTAEQAACIAKAATVKKLALIHYSPRYTEYELKQVIREAEAVFPSTVLSKDRMVFPIEYVD

SEQ ID NO: 47747 - DNA, 453 bp, Unknown
  Obtained from environmental sample
  misc_feature (1)..(453): n is a, c, g, or t
ttgagatttctcgccgcccttaccggggaagaagggctgcgccgctgcatggctaattcatcaatgctttcctgtgacgtaagccccgcttttgatccttcgtacgcgagcgtttatgaaaagcggaattcgtcttatatggggaaaggcctggttcttaccaagtacaccggttcaaagggaaaatatggcgcatcagacgcaaacgcggaattctgtgccagggtgcaggccgtaatggacaaaaacaaaatccagtggcagtttggcgaaatgggcaaagtggacaagggcggcggcgggacaattgcccttcatgcggcaaaatacggcattgaagtacttgactgcggtatccctgttttatcgatgcattcccccttcgaggtaatcagcaagatcgatctttattacgcgttaaagggatacgctgcctttttaagggagatttaa

SEQ ID NO: 47748 - protein, 150 aa, Unknown
  Obtained from environmental sample
  misc_feature (1)..(150): Xaa is any amino acid
MRFLAALTGEEGLRRCMANSSMLSCDVSPAFDPSYASVYEKRNSSYMGKGLVLTKYTGSKGKYGASDANAEFCARVQAVMDKNKIQWQFGEMGKVDKGGGGTIALHAAKYGIEVLDCGIPVLSMHSPFEVISKIDLYYALKGYAAFLREI

SEQ ID NO: 47749 - DNA, 819 bp, Unknown
  Obtained from environmental sample
  misc_feature (1)..(819): n is a, c, g, or t
ttgcctggttttattcttcccgttttaataatattggcagttttaggcggcggcggttggcttgtccgttctataattattaataggcagaataatcccattcaaaaaaaaaccgatagccaaacatccaccgaatatgtaatggacggcaattccatgaaacggcgcttatacaaaaatgacactgttttaattaccgtagataatgaaacatacaaactggaactttacaatatgggcgaagctgtaacaattcgcactccggcgggtcaggaaatactggatttaagccaggaaataaccatcgatcttaacaacgacggtattcctgaattgcgcgtaacgttaatagattttgccaaaaataaagccgatatgggtgcattactcgatttctacctgatggatgccgccgcttacacaggcacggaaccggaacaaaatgttcagcgtagggataatacggtaaccgccgcaagcactactatttttcccgcttcaccaagcgcgtatcctttcactttacagatcgcttttcagggatattgcatgttccgctgggaaattcttaatgagagggatcgcaaaggctctacccagcgttatttccagcggtcagaagtgcttgatatttcagctcagaaacgcatccgtatttgggcgtctaacgcccaggctgcgaaacttcaggtaattggcgccggacgtgtggtaccagcggaaatcggttctgcgggcgaagttgtcgtagctgaaatccgctgggtaagagacgatgaaaaccgttaccgtcttgttctgagtcggctggaaccataa

SEQ ID NO: 47750 - protein, 272 aa, Unknown
  Obtained from environmental sample
  misc_feature (1)..(272): Xaa is any amino acid
MPGFILPVLIILAVLGGGGWLVRSIIINRQNNPIQKKTDSQTSTEYVMDGNSMKRRLYKNDTVLITVDNETYKLELYNMGEAVTIRTPAGQEILDLSQEITIDLNNDGIPELRVTLIDFAKNKADMGALLDFYLMDAAAYTGTEPEQNVQRRDNTVTAASTTIFPASPSAYPFTLQIAFQGYCMFRWEILNERDRKGSTQRYFQRSEVLDISAQKRIRIWASNAQAAKLQVIGAGRVVPAEIGSAGEVVVAEIRWVRDDENRYRLVLSRLEP

SEQ ID NO: 47751 - DNA, 1380 bp, Unknown
  Obtained from environmental sample
  misc_feature (1)..(1380): n is a, c, g, or t
atgcgctattttcttgatcccttcggctgtgtaaaaaatcaagttgacgctgaaaatatgatggctcatcttaacaaagagggatgggaaagcgtatcagaagcggaacaggcggacttaattatcgtcaactcctgcggatttattgaaagcgccaagcgcgaatcaattaacgcggtctttgaatggcgtaaactctaccccggcaaaaaaatactccttgcaggctgtcttgcgcaacgttatgcgaaagagttgggcgaaagtatgccggaaatagacggtttttttggagtggaaaatcttgcgcaaataacccaaatagctgcaaacattgtaaagggcaaagctaaattatcacataacgcggttttaccattgggagaacgcccgcttttatcactgcccggttcagcttatgtaaaaatcagcgaagggtgtaacaaccgctgttcttactgcgccattccgctcattcgcggcggccttgtaagccgaacaatacccgatatattaaaagaatgtaatgcgctattggatcgcggtattagggaattatgcatcattggacaggacattggcgcttttgggacagataccgttaaagactccacctncactttgggcacagaagccgccgcaaaattgcccgaactgcttgaggcgatttcttcgctgaaagggaaggggcatttttgggtgcgcctgttatacattcaccccgatcattttcctcttaaaatcctcgatctcatggaaaaagattcgcgcttccttccctactttgacattccattccaacacgcctcttccaaaatactgagcgccatgaatcgtcacggcaatacggaagaatatcttgcgttactcaaaataattcgcgcaaaactgccgaacgctgttatacgctctacttttctgctgggctttccaggtgaaacagagcaagattttgcgcagttactggattttcagcaaaaagccaatttagactggcttggctgttttgtgtattcaagagaggaaggaactgcggcgtactcaatgaagggacgcgcttccgctaaaaccgcaaaagagcgaaaacaaataattgaggagcgtcaaatcccgattacggaaaaaaatatggatcgttttgttaatcaaaatttggatgtgttagtcgaagaagaaattgccgcaagcgaaaccggttccgcttcatcagaagaaaatgaaactctttggctgggacggttatactgccaagccccggacatagacggcgcggcggttatcgtaaaaagcgaggcaagcgaaataaatcctcagttgggaacttttacaaaatgcaaagttatgtcacgccgcgggtttgatcttgaagtgagtgtttaa

SEQ ID NO: 47752 - protein, 459 aa, Unknown
  Obtained from environmental sample
  DOMAIN (141)...(325): Radical SAM superfamily
  misc_feature (1)..(459): Xaa is any amino acid
MRYFLDPFGCVKNQVDAENMMAHLNKEGWESVSEAEQADLIIVNSCGFIESAKRESINAVFEWRKLYPGKKILLAGCLAQRYAKELGESMPEIDGFFGVENLAQITQIAANIVKGKAKLSHNAVLPLGERPLLSLPGSAYVKISEGCNNRCSYCAIPLIRGGLVSRTIPDILKECNALLDRGIRELCIIGQDIGAFGTDTVKDSTXTLGTEAAAKLPELLEAISSLKGKGHFWVRLLYIHPDHFPLKILDLMEKDSRFLPYFDIPFQHASSKILSAMNRHGNTEEYLALLKIIRAKLPNAVIRSTFLLGFPGETEQDFAQLLDFQQKANLDWLGCFVYSREEGTAAYSMKGRASAKTAKERKQIIEERQIPITEKNMDRFVNQNLDVLVEEEIAASETGSASSEENETLWLGRLYCQAPDIDGAAVIVKSEASEINPQLGTFTKCKVMSRRGFDLEVSV

SEQ ID NO: 47753 - DNA, 522 bp, Unknown
  Obtained from environmental sample
  misc_feature (1)..(522): n is a, c, g, or t
gtgcagcggcggcgcgtccggcggcggcgacccgatgcaggaggttatcgagattgtggaggatatctcggcggcgcttatccttgtcgatcctaccgacaatcaggcgctcgccgtaggcattcactccaagctcgagaagttgcgcggcgcctccgaagacgccaatgtgcaggcggcggcgaacgaatgtgtcgcgatggtggagaagatcatcttccaggagatcaagccggaagaggggattgcgaagatcgcggagaggctcacaacgttgcgccgcgggttccagtacgtggagggcgcgtctgtcccgttggaagagggaggcgccggcgcgtcaggcggcggcgacctagccaaggatttggatttcgatatggacgccgacgagggcgattcgacgcccaagccggcggcggcgccgctcaagcaggatgccgacggtttcttcgtcgacacctcggcaaaggccaagccggaggtgaagttcagaagagaaatcgacgtatccacgcttga

SEQ ID NO: 47754 - protein, 173 aa, Unknown
  Obtained from environmental sample
  misc_feature (1)..(173): Xaa is any amino acid
MQRRRVRRRRPDAGGYRDCGGYLGGAYPCRSYRQSGARRRHSLQAREVARRLRRRQCAGGGERMCRDGGEDHLPGDQAGRGDCEDRGEAHNVAPRVPVRGGRVCPVGRGRRRRVRRRRPSQGFGFRYGRRRGRFDAQAGGGAAQAGCRRFLRRHLGKGQAGGEVQKRNRRIHA

SEQ ID NO: 47755 - DNA, 804 bp, Unknown
  Obtained from environmental sample
  misc_feature (1)..(804): n is a, c, g, or t
atgcaggaggttatcgagattgtggaggatatctcggcggcgcttatccttgtcgatcctaccgacaatcaggcgctcgccgtaggcattcactccaagctcgagaagttgcgcggcgcctccgaagacgccaatgtgcaggcggcggcgaacgaatgtgtcgcgatggtggagaagatcatcttccaggagatcaagccggaagaggggattgcgaagatcgcggagaggctcacaacgttgcgccgcgggttccagtacgtggagggcgcgtctgtcccgttggaagagggaggcgccggcgcgtcaggcggcggcgacctagccaaggatttggatttcgatatggacgccgacgagggcgattcgacgcccaagccggcggcggcgccgctcaagcaggatgccgacggtttcttcgtcgacacctcggcaaaggccaagccggaggtgaagttcagaagagaaatcgacgtatccacgcttgacgcgtcgctgctcaccgagttcatagccgaggcgcaggagcacttcgcgaacgccgacgcggcactgctcaggcttgaggtcacacccgccgacgtcgacatcataaacgagttgttccgcgtcttccacaccataaagggcgtcgccggcttcttatcgctcgacgccatacaagcgctcgcccacgccaccgagagcctcatggacaaggcgcgggagaaggtattcgtgctcaacagcgcggccatagacctcatattctccacggtcgatactctgaagaaagagggtggagtcgctcaccttggcgcttga

SEQ ID NO: 47756 - protein, 267 aa, Unknown
  Obtained from environmental sample
  DOMAIN (165)...(259): Hpt domain
  misc_feature (1)..(267): Xaa is any amino acid
MQEVIEIVEDISAALILVDPTDNQALAVGIHSKLEKLRGASEDANVQAAANECVAMVEKIIFQEIKPEEGIAKIAERLTTLRRGFQYVEGASVPLEEGGAGASGGGDLAKDLDFDMDADEGDSTPKPAAAPLKQDADGFFVDTSAKAKPEVKFRREIDVSTLDASLLTEFIAEAQEHFANADAALLRLEVTPADVDIINELFRVFHTIKGVAGFLSLDAIQALAHATESLMDKAREKVFVLNSAAIDLIFSTVDTLKKEGGVAHLGA

SEQ ID NO: 47757 - DNA, 666 bp, Unknown
  Obtained from environmental sample
  misc_feature (1)..(666): n is a, c, g, or t
gtggagaatatgaggtctatggccgcgctgttgagcacgaataccttctcccgcgccttgtccatgaggctctcggtggcgtgggcgagcgcttgtatggcgtcgagcgataagaagccggcgacgccctttatggtgtggaagacgcggaacaactcgtttatgatgtcgacgtcggcgggtgtgacctcaagcctgagcagtgccgcgtcggcgttcgcgaagtgctcctgcgcctcggctatgaactcggtgagcagcgacgcgtcaagcgtggatacgtcgatttctcttctgaacttcacctccggcttggcctttgccgaggtgtcgacgaagaaaccgtcggcatcctgcttgagcggcgccgccgccggcttgggcgtcgaatcgccctcgtcggcgtccatatcgaaatccaaatccttggctaggtcgccgccgcctgacgcgccggcgcctccctcttccaacgggacagacgcgccctccacgtactggaacccgcggcgcaacgttgtgagcctctccgcgatcttcgcaatcccctcttccggcttgatctcctggaagatgatcttctccaccatcgcgacacattcgttcgccgccgcctgcacattggcgtcttcggaggcgccgcgcaacttctcgagcttggagtga

SEQ ID NO: 47758 - protein, 221 aa, Unknown
  Obtained from environmental sample
  SIGNAL (1)...(17)
  misc_feature (1)..(221): Xaa is any amino acid
MENMRSMAALLSTNTFSRALSMRLSVAWASACMASSDKKPATPFMVWKTRNNSFMMSTSAGVTSSLSSAASAFAKCSCASAMNSVSSDASSVDTSISLLNFTSGLAFAEVSTKKPSASCLSGAAAGLGVESPSSASISKSKSLARSPPPDAPAPPSSNGTDAPSTYWNPRRNVVSLSAIFAIPSSGLISWKMIFSTIATHSFAAACTLASSEAPRNFSSLE

SEQ ID NO: 47759 - DNA, 753 bp, Unknown
  Obtained from environmental sample
  misc_feature (1)..(753): n is a, c, g, or t
ttgctgactttcgtggaagaggtaaggcaggaagggggaatcaaccggcatgaggagcagatgatccgtcaggccattgaatttgacgacatcaccgcggcggagattatgaccccaaggatggatctggcggctgtatctgagaccgacacggcgcagcatattgattcgttgtttgagaatacgggattttcccgcctgcccgtttaccgcgacaatattgataatattaccgggatcatactgcttaaggattttcaccgcgaggtaattaaaaaaggtaaatccccttcagaagttataaagcccgcggttctcgtcaccaagacgatgaaaatacacaggcttttacaaacccttaaggaaaaacagtcccacatggcggtactggtagacgaattcggcggtaccctgggaatagttaccgttgaggacatactggaggaactggtaggtgaaatctgggacgaacatgaccgcgtggtggaacctgttaagcgtaacgccgacggcagtttttccgcgcttggcagtttgcagtttcaggatatggtaaattttattggcaacaatacgtctgacaatgatttgtctgaaggcgacgagatgccggaaactacggtcggcaactgggtaatggagacaaagggcaccctgccccgcgtgggggagcagtttgactggcataagctgcgcatcagggtatcgcgcgttcaacgccaccggggtaatggaggtagttgtcacttatga

SEQ ID NO: 47760 - protein, 250 aa, Unknown
  Obtained from environmental sample
  DOMAIN (37)...(151): CBS domain pair
  misc_feature (1)..(250): Xaa is any amino acid
MLTFVEEVRQEGGINRHEEQMIRQAIEFDDITAAEIMTPRMDLAAVSETDTAQHIDSLFENTGFSRLPVYRDNIDNITGIILLKDFHREVIKKGKSPSEVIKPAVLVTKTMKIHRLLQTLKEKQSHMAVLVDEFGGTLGIVTVEDILEELVGEIWDEHDRVVEPVKRNADGSFSALGSLQFQDMVNFIGNNTSDNDLSEGDEMPETTVGNWVMETKGTLPRVGEQFDWHKLRIRVSRVQRHRGNGGSCHL

SEQ ID NO: 47761 - DNA, 612 bp, Unknown
  Obtained from environmental sample
  misc_feature (1)..(612): n is a, c, g, or t
atgctctctgccgtaagcaccatacacacagataaaatctgcaaaacatacagcggcagaaccgttgttagggatgtttctttgagcgtttccagaggcgaaattgttgggcttttgggtcctaacggagctgggaaaacaacttccttttatatgatagtcgggcttgttaagccagacaaagggcacgtgtttttagactctcaagatataagctatttgccaatgcacagccgcgcaaaattagggctaggctatcttccgcaagaggcttctatttttcgcaagctctctgtggaaaacaatataatggcaattttggaaacgcttaaattgaatcgcaagcagcgcaaagagagattggagcaactgcttgaagaatttaaaattacgcatataagaaagaccatttctcacagctgctctggaggcgagcgcagaaggctggagattgcgcgttcactagcgagcgaacccggctttcttttgctagacgaaccctttgctggcatagaccctattgctgtggatgatatcaaatccataataagcaatttgagggctaaaggcatgggaattttaataacagaccacaatctcggccgattctga

SEQ ID NO: 47762 - protein, 203 aa, Unknown
  Obtained from environmental sample
  DOMAIN (33)...(203): ABC transporter
  misc_feature (1)..(203): Xaa is any amino acid
MLSAVSTIHTDKICKTYSGRTVVRDVSLSVSRGEIVGLLGPNGAGKTTSFYMIVGLVKPDKGHVFLDSQDISYLPMHSRAKLGLGYLPQEASIFRKLSVENNIMAILETLKLNRKQRKERLEQLLEEFKITHIRKTISHSCSGGERRRLEIARSLASEPGFLLLDEPFAGIDPIAVDDIKSIISNLRAKGMGILITDHNLGRF

SEQ ID NO: 47763 - DNA, 924 bp, Unknown
  Obtained from environmental sample
  misc_feature (1)..(924): n is a, c, g, or t
atggaatgggctcccgttggtggcgcagcttatgatttacacaagcacccactacccgaaagcacaattaaagttgcagaagccgctggggctatactatttggctcggttggtgggccaaaatgggaaaaactgccgccggaactccaacccgaaaggggcgcgcttttgccgcttcgcaagcattttaaactttattgcaatttgagaccagcaagagtgtacaaagctctcgctagtgcttgcccgctgagagcagatattgtaggcgatggctttgatattctctgcgttagggaattgacgggagatgtctattttgggcagccaaaaggcagagagggtactggagaaaacgaaaaaggctttgacacaatggtttatagccgctacgaggtggaacgcatagcccgctttgcttttgaagccgctaccctccgcagaaaaaaacttgcaagcatagacaaagccaatgttttgactactagcgttttttggcgtgaagttgttaaagaaatatcaaaagaatacccccaagttgaattagaacatatatacgtggacaatgcggctatgcagctcataaaacgcccgcgagactttgacgttatgctctgccccaacctatttggcgatattctaagcgacgaatgtgcaatgctcacaggctctatgggtcttttgcctagcgcaagcatagcagaaggtgcctttgggctttacgaacccgcaggcggttccgccccagacatcgctggcaagggcatagcgaatccaatagcgcaaatactctcggctgcccttatgcttcgctacacctttaaagaagaggcagcggcaaaggcaatagagcagtcggtgaagatgttatctcaaaaggtgtgcgcactggagatatttgggttgaaggctgcaaaaaggtaa

SEQ ID NO: 47764 - protein, 307 aa, Unknown
  Obtained from environmental sample
  DOMAIN (2)...(305): Isocitrate/isopropylmalate dehydrogenase
  misc_feature (1)..(307): Xaa is any amino acid
MEWAPVGGAAYDLHKHPLPESTIKVAEAAGAILFGSVGGPKWEKLPPELQPERGALLPLRKHFKLYCNLRPARVYKALASACPLRADIVGDGFDILCVRELTGDVYFGQPKGREGTGENEKGFDTMVYSRYEVERIARFAFEAATLRRKKLASIDKANVLTTSVFWREVVKEISKEYPQVELEHIYVDNAAMQLIKRPRDFDVMLCPNLFGDILSDECAMLTGSMGLLPSASIAEGAFGLYEPAGGSAPDIAGKGIANPIAQILSAALMLRYTFKEEAAAKAIEQSVKMLSQKVCALEIFGLKAAKR

SEQ ID NO: 47765 - DNA, 417 bp, Unknown
  Obtained from environmental sample
  misc_feature (1)..(417): n is a, c, g, or t
atgcttacacttaaaagcgagagaggtcgcaaggcagaaacttatatttgcgcttatttgctgcgcaaaggttgcaaattattcgcaaggaattacagatatacaagaggtgagcttgatatagtggctaaagataaaaacagcgtttggctttttgtggaagtaaaatccgtttgggaaaattcttatggttctccagacacaagagtaaataaagaaaaacagagaaaaatttggcaaaccgcacttcactttttgcacaataacggcgggcttgagcaaaattcacgctttgacgtggctgctatggattttagattcaaacgaggcgcaataagatattacgaaaacgcttttgtggcaccaacggttattccagatttaaggataaaaaataggaaaggaaatgcttactaa

SEQ ID NO: 47766 - protein, 138 aa, Unknown
  Obtained from environmental sample
  DOMAIN (11)...(104): Uncharacterised protein family UPF0102
  misc_feature (1)..(138): Xaa is any amino acid
MLTLKSERGRKAETYICAYLLRKGCKLFARNYRYTRGELDIVAKDKNSVWLFVEVKSVWENSYGSPDTRVNKEKQRKIWQTALHFLHNNGGLEQNSRFDVAAMDFRFKRGAIRYYENAFVAPTVIPDLRIKNRKGNAY

SEQ ID NO: 47767 - DNA, 480 bp, Unknown
  Obtained from environmental sample
  misc_feature (1)..(480): n is a, c, g, or t
ttgcaaggggaattttcaagcataatatttatttgcaacctgaaaaaaggagacgaatctccatatcttggcacaatagctaaaagcgatttttgcatagaaggtggcccgcaagcacacggaacgcttgatgcagaactctttttaaaagtggagagaattgtttttagatttttggaactcatagaatcttggaataatggaactttgccaaaaataagcaattttgaaacattcacagaaaaacgaagcattgattacccaagagatttggggggcaatataaccgctattatacaccccgctttgcaaggcaaggatttttgcgaacttaaaaacggaatgcctgtatttatgggctttgacggtaaagaaattctttgggaaggcgaaacctgctatcccacctttataaacgaagccgcatattacgaaaaaggaattgcgatgagtttagcggagagatttctacattcataa

SEQ ID NO: 47768 - protein, 159 aa, Unknown
  Obtained from environmental sample
  misc_feature (1)..(159): Xaa is any amino acid
MQGEFSSIIFICNLKKGDESPYLGTIAKSDFCIEGGPQAHGTLDAELFLKVERIVFRFLELIESWNNGTLPKISNFETFTEKRSIDYPRDLGGNITAIIHPALQGKDFCELKNGMPVFMGFDGKEILWEGETCYPTFINEAAYYEKGIAMSLAERFLHS

SEQ ID NO: 47769 - DNA, 492 bp, Unknown
  Obtained from environmental sample
  misc_feature (1)..(492): n is a, c, g, or t
atgcccattcttgaccatgaagtctttggccccatcatcggaataattccttttgatagtgacatcgaagctttaaatatcgccaacgactctcactatgcgctgacggcgtccgtctggtcaaaaaaccacaaacgcgcgaaaaaaatggcagctaacatcaacgccggttcaatcatgataaatgatcacctaatgtctcacggtcttgctgaaacgccgtggggaggctttggcgattcagggcttggaagaacgcacggcgaaaacggattccgcgaaatgctcaaggtaaaagtgattattgacgacgtactgcccggcgcaaggcgcgaaccttggtggcagccttattcgcaaaaaatttacaaaggccttgccgctcttggaactttacttggagagcgcaatccgttcaaacaattaggcgcgcttcccgctattgttggctttttcatggcggcgtggaaaaaaaatggggtaaaaaagtaa

SEQ ID NO: 47770 - protein, 163 aa, Unknown
  Obtained from environmental sample
  misc_feature (1)..(163): Xaa is any amino acid
MPILDHEVFGPIIGIIPFDSDIEALNIANDSHYALTASVWSKNHKRAKKMAANINAGSIMINDHLMSHGLAETPWGGFGDSGLGRTHGENGFREMLKVKVIIDDVLPGARREPWWQPYSQKIYKGLAALGTLLGERNPFKQLGALPAIVGFFMAAWKKNGVKK

SEQ ID NO: 47771 - DNA, 732 bp, Unknown
  Obtained from environmental sample
  misc_feature (1)..(732): n is a, c, g, or t
gtgtcttttgcttacgggcgcatcttcggcccgcgctttttggccctttttccccttggcgggatcaacatccaccccagccttctccccaaatatcgtggggcgtctcccattccggcggttattttatacagggaaaaggagacaggtatttgcattcaaaagcttgcggcagaaatggacagtggagacataattgcctctttgaaaatcgagctttcggggcgtgaaaccactgccttactaagcgaaacggtaagcgaaaaagcagcgcttcttttgcgggaattgctgttggattttggccccagagccgcagccgcgaggccgcaagatggtgaagccgtttactgccgcgagataaaaaaagaagctggtcttattgactggggcaaaagcgccgccgagatcgatgcgcagatacgcgcctttacgccctggccgctctcttttaccaagcagggaaaggatacgcttatcattcttgaagcacagtgcgcgttggcgcatgccgcgcctgttgcggccccgcagacggatgccctacctgggactgtgcttggtacggacagccggggaatacttatccaaaccggagacggcatcctggcggttacaaggcttcagtggcagacgaaaaaggcgctggaatggaaggcgttttgtaacggcgagcggggttttgtgggggtcaggctggagtcaataaaggcgactgaggcaataacctaa

SEQ ID NO: 47772 - protein, 243 aa, Unknown
  Obtained from environmental sample
  DOMAIN (1)...(98): Formyl transferase
  misc_feature (1)..(243): Xaa is any amino acid
MSFAYGRIFGPRFLALFPLGGINIHPSLLPKYRGASPIPAVILYREKETGICIQKLAAEMDSGDIIASLKIELSGRETTALLSETVSEKAALLLRELLLDFGPRAAAARPQDGEAVYCREIKKEAGLIDWGKSAAEIDAQIRAFTPWPLSFTKQGKDTLIILEAQCALAHAAPVAAPQTDALPGTVLGTDSRGILIQTGDGILAVTRLQWQTKKALEWKAFCNGERGFVGVRLESIKATEAIT

SEQ ID NO: 47773 - DNA, 1038 bp, Unknown
  Obtained from environmental sample
  misc_feature (1)..(1038): n is a, c, g, or t
gtgggggagctaaaaaaagaactggggaatcagcgccttttagggctggactattattcaggcggccaccttacacacggctatcgctacaatatttcgtcaaggttgttcgatgtttcaacctattcggtttccaaagaaaccggtcttctcgattacgatgtgattgaaaaacaagctaaagagctaaagcccctgattctgcttaccggctattccgcctatcccagaaagattgattttaggaggatgaggcagatcgctgattcggtcggggcggtgttcatggtggatatggcgcactttgcgggccttgtggcgggcaaggtttttacaggcgaatatgatccggttccgcacgcccacgttgttacgactaccacccataaaaccttgcgggggcccagggccggtctgatactttccaccagggaatttgccgaggccctggacaagggatgccccttaactatgggcggccccctgccccatgtgatcgccgcaaaagcggtggctttaagggaagcatcaaaacccgaatttcgggattactcgaaaaagatcgttgacaattgccaggccttagccgccgcttgtatcaacaacggtttaacggtactgacaggcggcactgacaaccatatgttcctggtaaatgtgcatgtgcttggcttaacaggacgccagtcagaaagcgcccttcacgaatgtgcagttacgctaaaccgcaacagcattccatttgatcccaacggcccctggtatacctccggcttgaggatcggcaccgctgcggtttcgactttgggcatgggaaaagcggagatggatgaacttggaagcatcatcgcgctggtgcttaaaaatacaaaccaggcgccggatgccaaggacgcgacaaaaaagagcaaagccaaatatatcattgacgaaaaggccaaggccgaagctctggatcgcgtaaagaaacttcaagaccgtttcccggtgtatccggagcttgacctaaagctgcttaaagaagcgtttgtggaataa

SEQ ID NO: 47774 - protein, 345 aa, Unknown
  Obtained from environmental sample
  DOMAIN (4)...(283): Serine hydroxymethyltransferase
  misc_feature (1)..(345): Xaa is any amino acid
MGELKKELGNQRLLGLDYYSGGHLTHGYRYNISSRLFDVSTYSVSKETGLLDYDVIEKQAKELKPLILLTGYSAYPRKIDFRRMRQIADSVGAVFMVDMAHFAGLVAGKVFTGEYDPVPHAHVVTTTTHKTLRGPRAGLILSTREFAEALDKGCPLTMGGPLPHVIAAKAVALREASKPEFRDYSKKIVDNCQALAAACINNGLTVLTGGTDNHMFLVNVHVLGLTGRQSESALHECAVTLNRNSIPFDPNGPWYTSGLRIGTAAVSTLGMGKAEMDELGSIIALVLKNTNQAPDAKDATKKSKAKYIIDEKAKAEALDRVKKLQDRFPVYPELDLKLLKEAFVE

SEQ ID NO: 47775 - DNA, 780 bp, Unknown
  Obtained from environmental sample
  misc_feature (1)..(780): n is a, c, g, or t
atgcgcgggttcatactagccgccggtttcggcacacgtcttaaacccatcaccgataagcttccgaaggctttggtgccggtgtgcggcgagccgcttttggctcataatttgcgggtgctgcatagatcgggagcgttttcggcgttaggcgtcaattcgcattatttgcatgaattgatggagcgattccggcgtgaatcatccataccgtttgaattgttttatgagagcgataagataagggggacgggcggggcgcttgatttcgctcgtgattttttgagcggggatgatgcttttcttatcgctaatgttgatataattcacaaatttgatattgcggagttggcgtcacggtttattgacagcgggcggatttgctctcaagtgtcaatccctatcgatagtttagggactattttgtatgatagcgctacaggtgattatctaggcgtttctgacgatagggaaacgttgatagcatctatacatgatgttgattctgtaggggcgaactgcgttcgccagtccgttggcggcattttggaagctgaatttacaggcgtggcgttttataaacgggaatttttagacttcgtcaataaagacgacttttcaatcgtacctatatggaaaagggcggctttagccggacacgcccccggcattatcaccccgaaaaaagaagcttcgtggtggatggatatcggcacgcgcgaggcgctggcgaaaatagaggccgaagtcaacggcgggaggatcgatttatggaattga

SEQ ID NO: 47776 - protein, 259 aa, Unknown
  Obtained from environmental sample
  DOMAIN (2)...(253): Nucleotidyl transferase
  misc_feature (1)..(259): Xaa is any amino acid
MRGFILAAGFGTRLKPITDKLPKALVPVCGEPLLAHNLRVLHRSGAFSALGVNSHYLHELMERFRRESSIPFELFYESDKIRGTGGALDFARDFLSGDDAFLIANVDIIHKFDIAELASRFIDSGRICSQVSIPIDSLGTILYDSATGDYLGVSDDRETLIASIHDVDSVGANCVRQSVGGILEAEFTGVAFYKREFLDFVNKDDFSIVPIWKRAALAGHAPGIITPKKEASWWMDIGTREALAKIEAEVNGGRIDLWN

SEQ ID NO: 47777 - DNA, 615 bp, Unknown
  Obtained from environmental sample
  misc_feature (1)..(615): n is a, c, g, or t
atgcacagcgaaactcttagcatcggcggaatgacctgcgccgcatgttccgcgcgggttgaaagggccctcaaaaaactggaaggcgttgaaagcgccgtggtaaaccttgccacggaaaaggcgacggtggttttcgatccgcgcgctttgcgtctttcggcgataaaagaagccgttgtaaaagcggggtaccaggtgcttgaggtttcctccgatactgcggacgaggacaaacgccgcaaggaaaaggaaatcaaaaccctatggataaaatttatcgtagccgcttctttgggacttcccctgttgtatatcgccatggcccccatgattaaatggatcagcctgccctttccaaaatttcttgcccctatgcattcccccatgctatacggcctcgtggaactggcgctggttatacctataataatcgcaggctacaggttttataccgttggcttcagaaccttctgcaccgcagccctaacatggattcgctcattgcggttgggacaacggcggcggtggtttacagtgtttataatttgtttcgtattgccggaggggatcatcacgctgttgacgctttatactttgaaaccgccggtgtaa

SEQ ID NO: 47778 - protein, 204 aa, Unknown
  Obtained from environmental sample
  DOMAIN (5)...(69): Heavy-metal-associated domain
  misc_feature (1)..(204): Xaa is any amino acid
MHSETLSIGGMTCAACSARVERALKKLEGVESAVVNLATEKATVVFDPRALRLSAIKEAVVKAGYQVLEVSSDTADEDKRRKEKEIKTLWIKFIVAASLGLPLLYIAMAPMIKWISLPFPKFLAPMHSPMLYGLVELALVIPIIIAGYRFYTVGFRTFCTAALTWIRSLRLGQRRRWFTVFIICFVLPEGIITLLTLYTLKPPV

SEQ ID NO: 47779 - DNA, 996 bp, Unknown
  Obtained from environmental sample
  misc_feature (1)..(996): n is a, c, g, or t
atggatcagcctgccctttccaaaatttcttgcccctatgcattcccccatgctatacggcctcgtggaactggcgctggttatacctataataatcgcaggctacaggttttataccgttggcttcagaaccttctgcaccgcagccctaacatggattcgctcattgcggttgggacaacggcggcggtggtttacagtgtttataatttgtttcgtattgccggaggggatcatcacgctgttgacgctttatactttgaaaccgccggtgtaattatcgccctgatccttctgggtaagtcccttgaagcggtgtccaaaggacgcaccagcgaggcaataaaaaaacttatgagccttgctcccaaaacggccatcattattgataacggagaagagaaggaaattcccattaaagaggtaatgccaggcgatattatcgtggtgaaaccgggcgcgaaaattcccgtggatggcttggtaaccgaggggcaaagcgctgttgatgagtccatgctcaccggggagagtatgccgattgacaagaagtccggcgatccggtctacgcggctaccattaacagtaacggtgttctccgctttaaggcggagaaggtcgggggcgaaaccgcgctggcgcaaatcataaaactggttgaagacgcccaaagctccaaagcgcctattgcgcaaatggcggatattgtggccggttactttgtgcctgttgtctgcgccattgcgcttatagctggtatcgcgtggttcgtaacggcgtctatcggcgttgtaaatttgccacacgggaaaaccgtaacggaattcgccctgacgatttttatctccgtgctggtcatcgcctgcccctgcgccctcggccttgcgacgcctacggcgataatggttggaaccggcaagggcgcggaaaacggcattttgattaaggcggcgaggcgctggaaactgccgggaaaatcaaacgattgtngttga

SEQ ID NO: 47780 - protein, 331 aa, Unknown
  Obtained from environmental sample
  DOMAIN (92)...(320): E1-E2 ATPase
  misc_feature (1)..(331): Xaa is any amino acid
MDQPALSKISCPYAFPHAIRPRGTGAGYTYNNRRLQVLYRWLQNLLHRSPNMDSLIAVGTTAAVVYSVYNLFRIAGGDHHAVDALYFETAGVIIALILLGKSLEAVSKGRTSEAIKKLMSLAPKTAIIIDNGEEKEIPIKEVMPGDIIVVKPGAKIPVDGLVTEGQSAVDESMLTGESMPIDKKSGDPVYAATINSNGVLRFKAEKVGGETALAQIIKLVEDAQSSKAPIAQMADIVAGYFVPVVCAIALIAGIAWFVTASIGVVNLPHGKTVTEFALTIFISVLVIACPCALGLATPTAIMVGTGKGAENGILIKAARRWKLPGKSNDCX

SEQ ID NO: 47781 - DNA, 555 bp, Unknown
  Obtained from environmental sample
  misc_feature (1)..(555): n is a, c, g, or t
gtgtggcaaatttacaacgccgatagacgccgttacgaaccacgcgataccagctataagcgcaatggcgcagacaacaggcacaaagtaaccggccacaatatccgccatttgcgcaataggcgctttggagctttgggcgtcttcaaccagttttatgatttgcgccagcgcggtttcgcccccgaccttctccgccttaaagcggagaacaccgttactgttaatggtagccgcgtagaccggatcgccggacttcttgtcaatcggcatactctccccggtgagcatggactcatcaacagcgctttgcccctcggttaccaagccatccacgggaattttcgcgcccggtttcaccacgataatatcgcctggcattacctctttaatgggaatttccttctcttctccgttatcaataatgatggccgttttgggagcaaggctcataagtttttttattgcctcgctggtgcgtcctttggacaccgcttcaagggacttacccagaaggatcagggcgataattacaccggcggtttcaaagtataa

SEQ ID NO: 47782 - protein, 184 aa, Unknown
  Obtained from environmental sample
  misc_feature (1)..(184): Xaa is any amino acid
MWQIYNADRRRYEPRDTSYKRNGADNRHKVTGHNIRHLRNRRFGALGVFNQFYDLRQRGFAPDLLRLKAENTVTVNGSRVDRIAGLLVNRHTLPGEHGLINSALPLGYQAIHGNFRARFHHDNIAWHYLFNGNFLLFSVINNDGRFGSKAHKFFYCLAGASFGHRFKGLTQKDQGDNYTGGFKV

SEQ ID NO: 47783 - DNA, 867 bp, Unknown
  Obtained from environmental sample
  misc_feature (1)..(867): n is a, c, g, or t
atggccgagcttcatagcggaaacctgcggctcctggacaggctcggcaggcaaattcacagtatccccattgatccattgggcagagttactgagtcttctttgttaaagactctgacgcaatacgataatgtccgttttgcggcaataatggctgtaaataacgaaacagggacgacaaacgacattgtaaacctgcgtaagattgcggttaacaaagaaccgcccgtacattttcactgtgacatggtgcaggctgtgggtaaaattcccattgacattgcgggttggggcatagattcagcctcattgagcgcccataaaataggcggaccgcggggtatcggccttttgtatctgcgaaagccgctggaagtcctgtatacgggcggaggccaggaaagaaacatacggcccggaaccgaaaacgtcagcggggcgcttgccctggcgcattgccttgaaacctacgccctgccggaaattgttgccgccgaatacgccaaggcaaaagcccgctggaagcggctgctctgtgcgttaaaagaaattgaccgttgccgtctgatcccggcggaaagagaaagcgctgaatatgcctccggtttttctccgtatatagtgcaggcggcctttaatgacatccccggcgaagtgatggtcagggccctggacgatctcggctttgccgtttccaccggctcggcctgttcgtccgcaaagccggaacgccctgttctggccgctatgggtattgacgacaaactcggccttgagggaatccggatttcccacggctggtcaaccacggatgaagagatagaccttctgcttgaggcaatccgggaggtgctgagattcctttga

SEQ ID NO: 47784 - protein, 288 aa, Unknown
  Obtained from environmental sample
  DOMAIN (1)...(277): Aminotransferase class-V
  misc_feature (1)..(288): Xaa is any amino acid
MAELHSGNLRLLDRLGRQIHSIPIDPLGRVTESSLLKTLTQYDNVRFAAIMAVNNETGTTNDIVNLRKIAVNKEPPVHFHCDMVQAVGKIPIDIAGWGIDSASLSAHKIGGPRGIGLLYLRKPLEVLYTGGGQERNIRPGTENVSGALALAHCLETYALPEIVAAEYAKAKARWKRLLCALKEIDRCRLIPAERESAEYASGFSPYIVQAAFNDIPGEVMVRALDDLGFAVSTGSACSSAKPERPVLAAMGIDDKLGLEGIRISHGWSTTDEEIDLLLEAIREVLRFL

SEQ ID NO: 47785 - DNA, 1539 bp, Unknown
  Obtained from environmental sample
  misc_feature (1)..(1539): n is a, c, g, or t
atgcaaaagaaaacaatcatgcttggaaccgttgaaaccgctcattttcgcaataacgcgtttctttgcgtcggaacaggcagaatggggcttgctcttcaaaaagaatattttgaacaattaaaacttgtacagaaaattatcggttttaaatggatacgcgggcacggtctctttaacgaagacatggctatttatcaagagtataaaacggaagacggtactgtacgccccgaatacaattttacatatcttgactttgtaatagacagttatctggaactcaatattcgtccttttattgagctcggcttcatgccgcacgcaatagcgtcgggggagcagtcggtattttactggcgagggaatattacgccgccgaaagattatgcgcaatggaacaaacttgtcgcagcgacgcttcgtcacttaatagaccgttacggtgaaaatgaagcgacttcttggcttgtcgaagtttggaatgagccgaacctcgcccacttttggaaagacgccgacagaaaagaatattttacgcttttccgtgaatcaataaaaaccgtaaaatccgtcagtaaaaaattccgtgtgggcggtcccgccatctgcggcgttgacgatatttcatggttaaaagattttttgaatttctgccgtgatgaaaaactcccccttgattttataacacggcatttgtataacattacaatccccgaacacgacggcaaatacggctatccgaaaatcagtccgcttgcaaaagcgtttgcggaaacaaaccgctcccgtgaaatcatcgacagttaccccgaataccgaggcatggaaatgcacgtaacggaattcaacacatcttattcgccgcgcacgcctatgcacgatacaaaccttaacgccgcatacatcgcttaccagcttgcatttctcggcgacgcctgcgaatcatactcatattggacattcggggacatttttgaagaaacaggcgtgcctttcactcctttccacggaggcttcggacttgtcgcaaacgggaaaattttcaagccgacatattgggcgtttaagttttttaaggatttgggaaacggcgaatgtatccaccgttcagaggacacgattgttttaagaaaaaaagacggcagttaccgaggaattgcgtggaatatcattgcggctaacggttcttccgccgaagaaggcgataaattgacgctttgctttatgcctgaaaaaggagcgttcaaggagaatgaatactgcgttgttacaaaaacggtcgatgaagacgtatgtaatccgttaaaagtatggcacgatatcggagagcccgctaacccgtcgaacgaacaaataaaactgcttcgagaaagcgcaaaaccgcttatcgcaaccacaagaggctacggagcgcccgcaatagaactaacgctaggacgcaacgcacttgtatactttgaaatattccctgctcccataacaagcgaccgaggttttaactacgaccgagcggtaaacatagagtttgcggattaa

SEQ ID NO: 47786 - protein, 512 aa, Unknown
  Obtained from environmental sample
  DOMAIN (1)...(492): Glycosyl hydrolases family 39
  misc_feature (1)..(512): Xaa is any amino acid
MQKKTIMLGTVETAHFRNNAFLCVGTGRMGLALQKEYFEQLKLVQKIIGFKWIRGHGLFNEDMAIYQEYKTEDGTVRPEYNFTYLDFVIDSYLELNIRPFIELGFMPHAIASGEQSVFYWRGNITPPKDYAQWNKLVAATLRHLIDRYGENEATSWLVEVWNEPNLAHFWKDADRKEYFTLFRESIKTVKSVSKKFRVGGPAICGVDDISWLKDFLNFCRDEKLPLDFITRHLYNITIPEHDGKYGYPKISPLAKAFAETNRSREIIDSYPEYRGMEMHVTEFNTSYSPRTPMHDTNLNAAYIAYQLAFLGDACESYSYWTFGDIFEETGVPFTPFHGGFGLVANGKIFKPTYWAFKFFKDLGNGECIHRSEDTIVLRKKDGSYRGIAWNIIAANGSSAEEGDKLTLCFMPEKGAFKENEYCVVTKTVDEDVCNPLKVWHDIGEPANPSNEQIKLLRESAKPLIATTRGYGAPAIELTLGRNALVYFEIFPAPITSDRGFNYDRAVNIEFAD

SEQ ID NO: 47787 - DNA, 681 bp, Unknown
  Obtained from environmental sample
  misc_feature (1)..(681): n is a, c, g, or t
atgagggtaatggcggtgctaaatccaataaaggttgtgatagaaaactaccctgaagggcaagtagaggagttcgacgctctgaataatcccgaagacgaatctgcggggagccgcaaggtgccgttttcgcgggtgatatacatagaacgcgacgacttcatggaggatccgccaaagaaattctacaggctcgctcccggacgcgaagtgcggctgcgctacgcctactatatcacctgcaaagaggtcattaaagacggcggcgggaatatcgtagaactgcggtgcgcatacgacccgcagacacgcggcggcgccacgccgcccgacgggcgctctccaaaggccactatccactgggtctcggcgcaacacgccataggagcggaggtgcgcatatacgataacctctttacaaatgagaatcccatggaagcggagagcggaaactttttggataacatcaatccggaatcgctcaaagtaataacggattgcaaattggaaccgtcgttaacaaacgctaaggttggagagaagtaccagttcgaacggctggcttacttttgcgttgacgacgattctgcggagggtaaattagtgtttaaccggacggttacacttaaagacgcttgggcgcggatacagaaaaatacaaattctttaaaatctttttaa

SEQ ID NO: 47788 - protein, 226 aa, Unknown
  Obtained from environmental sample
  DOMAIN (2)...(193): tRNA synthetases class I (E and Q), anti-codon binding domain
  misc_feature (1)..(226): Xaa is any amino acid
MRVMAVLNPIKVVIENYPEGQVEEFDALNNPEDESAGSRKVPFSRVIYIERDDFMEDPPKKFYRLAPGREVRLRYAYYITCKEVIKDGGGNIVELRCAYDPQTRGGATPPDGRSPKATIHWVSAQHAIGAEVRIYDNLFTNENPMEAESGNFLDNINPESLKVITDCKLEPSLTNAKVGEKYQFERLAYFCVDDDSAEGKLVFNRTVTLKDAWARIQKNTNSLKSF

SEQ ID NO: 47789 - DNA, 1305 bp, Unknown
  Obtained from environmental sample
  misc_feature (1)..(1305): n is a, c, g, or t
atggaatattcatcaatagatattttttgccaatgcatagacaacttcggcgacgcgggggtggcttatcggtttgccaaggagtttaaggcggctcggcctgactgccgcgtcaggctgttcatcaacaatatgtatacgctccatgccgttgagagcggcatcgaccctgcaatggccgttcaggagtatgagtctgtcacctacgtccgcgtatggagggactttgatccggtggagagcgggatgggcgtggcggatgtcttggtggaggctttcgcctgcgatattcccgagaaagtgtttcggatggcgttgaatcacagcaagctgataatcaacttggagtacctatcggccgaggattgggtcgaggagtaccacctgttcgagtctctgctgggcggcggcaccgcccgtaaattctttttcatgcccgggttccgtgagaccaccggcgggctaatcatcaactctcggctgcgggccatgcgggagggcggcgggcttgacaggcttgccgtgataaacggggtcgtcggcggcctcggaatctccttaaagcaagaagacgagacgcttgtggggacggtcttcacctatgagcgcgggttcgacacgctcctcgccgacctcgtcgagttcgggcgcgatacgctgcttatagtgttcggcgagaagagccggttggggatggcggccgcgctcgggaggctttcgggcggagcgtcgtcgcccgaagagccgggggcgcgcaatacggatccgtgccatgtctacaaaaacgtccgcgtaatctacgcgccctttatcccgcagcacgactacgacgtcctgctgtgctgcgccgatttcaacattgtccgcggggaggattcgcttgcccgcgccgtcctctccggcaagccgtttatctggcacgcctacatacaggcggaaaagcaccagtgcgtcaaggccgaggcgctgctgaaagctatgcgcccgtactaccaagattgcgagtcggaagacgctttcgcccgatacagcgccctgatgacggccttcaacgatgccgccgccgcatccaccgatcaggttacgtcggagcggtacggagcttttttcaaagatttgaaaaaacatgagcgcgcggcgcgcgccattaattattttatgcaccaaagttgcgacctgatcgccaagctgcgcgattttctcgatcgctatccggaatcggcgccgcctgcggataaaagggcgaatatgcgggacccgttgcaattacgagaatatacaaccatcatcaataaaagaatttag

SEQ ID NO: 47790 - protein, 434 aa, Unknown
  Obtained from environmental sample
  misc_feature (1)..(434): Xaa is any amino acid
MEYSSIDIFCQCIDNFGDAGVAYRFAKEFKAARPDCRVRLFINNMYTLHAVESGIDPAMAVQEYESVTYVRVWRDFDPVESGMGVADVLVEAFACDIPEKVFRMALNHSKLIINLEYLSAEDWVEEYHLFESLLGGGTARKFFFMPGFRETTGGLIINSRLRAMREGGGLDRLAVINGVVGGLGISLKQEDETLVGTVFTYERGFDTLLADLVEFGRDTLLIVFGEKSRLGMAAALGRLSGGASSPEEPGARNTDPCHVYKNVRVIYAPFIPQHDYDVLLCCADFNIVRGEDSLARAVLSGKPFIWHAYIQAEKHQCVKAEALLKAMRPYYQDCESEDAFARYSALMTAFNDAAAASTDQVTSERYGAFFKDLKKHERAARAINYFMHQSCDLIAKLRDFLDRYPESAPPADKRANMRDPLQLREYTTIINKRI

SEQ ID NO: 47791 - DNA, 1359 bp, Unknown
  Obtained from environmental sample
  misc_feature (1)..(1359): n is a, c, g, or t
atgatgggtatgggcggaaacaacgccaataccggttctctgcgtatcaatctaaaaaaatacaaagaaagaatagaaagcgctaaccaaataaaagatattttacgtccttactttaatcagtttccgggcgtaattttttcttttagcggcggaatgcgcggcggaatgatgggcggcggtaacgcggtagacattgttttaagaacggacaacttggcaaaaggcaaggtaatcggagaaagaatttccgcattgttaaaagaaaggctttccgattatgtcacggaaccgcaggttgatttaaaagacggattaccacagtacgaaattgttcttgaccgcgaaaaaatgtatgcgcttggacttaacactaacacagtaggcagcgaaataaaagccgcagttgacggcgttactgtactaaccaaatacaagtcaagcggcaaagactacgatatagttttaattcttgcggaagcggatcgcagtacattgccaagccttgataaaatttttatcaacagccagatgtcaggcagggttcctctttccagttttgttcattacaaacagggaacgggacctttaacaattaaccgcgagaatcaaagccgtgttattcacgtaacggctggagctaagccgggagtaaaaacaaatcttatacaagaacttgtagaagatattgtaagaagcgagattcccattgaagatgatctgattatagaatacgccggcgcgaatgccgatatgataaaattattcggacgctttgtattaatcagtattgtagccatttttctggtcttcggcgttatggcgagcctctttgaatcattcagagacccgttcattatcgttctgacaattcctctttccatgattggaattgtagcaatctaccttataaccaatacgatctttaacgtactaaccgccgtcggtcttcttgtattgttaggcgtaattgtaaataacggtattgtattggttgactacacaaacctcttacgcaagaggggttacgggctaatcgacgcgtgtattgaagccgccggaaacaggcttcgtccgatattaatgacaacgctcactacggtactggggcttttaccgatggcgttcttccccggcgaaggcacggaacttgtcgctccaatcggcaaaaccgttcttggcggactttcattcggcacattaatgacattattcctgatgccggtaatttacgccgttatgaataaaaattcagacagacgagccgcgctggcgcaggaaagacgcgataaaatagccgccggcgaaaggcgagcgaaaactaaaatatccgcgcatgtagataaggagggattatga

SEQ ID NO: 47792 - protein, 452 aa, Unknown
  Obtained from environmental sample
  misc_feature (1)..(452): Xaa is any amino acid
MMGMGGNNANTGSLRINLKKYKERIESANQIKDILRPYFNQFPGVIFSFSGGMRGGMMGGGNAVDIVLRTDNLAKGKVIGERISALLKERLSDYVTEPQVDLKDGLPQYEIVLDREKMYALGLNTNTVGSEIKAAVDGVTVLTKYKSSGKDYDIVLILAEADRSTLPSLDKIFINSQMSGRVPLSSFVHYKQGTGPLTINRENQSRVIHVTAGAKPGVKTNLIQELVEDIVRSEIPIEDDLIIEYAGANADMIKLFGRFVLISIVAIFLVFGVMASLFESFRDPFIIVLTIPLSMIGIVAIYLITNTIFNVLTAVGLLVLLGVIVNNGIVLVDYTNLLRKRGYGLIDACIEAAGNRLRPILMTTLTTVLGLLPMAFFPGEGTELVAPIGKTVLGGLSFGTLMTLFLMPVIYAVMNKNSDRRAALAQERRDKIAAGERRAKTKISAHVDKEGL

SEQ ID NO: 47793 - DNA, 936 bp, Unknown
  Obtained from environmental sample
  misc_feature (1)..(936): n is a, c, g, or t
gtgccggatatgtacaatctccccgcgggtgtgccttattcctttaactctacattcgataaaaaagccggttataaaaccatttcaacgctgactttcccgctgatcaccgccgatgggcgtatattgggcgtcattcaggttatcaacaagatggatgataagggaaatgttattgtattttcccaggaagacgtattcctgatcacccatttcgcggctaatgctaccgtggcattgcagcaggcttatataaccagggccatgatcctccgcatgatcaggatggcggaactgagggatccgaaagaaaccggaacccatgtaaaccgtgtggcgggttacgcggttgagatttacgacaggtgggcgcataaccataacattcccgttgaggagcgtgaaagctttcgggatatccttaagataggctcgatgctccatgacgtggggaaggtggcaatctctgacatgatccttaaaaagccggcccgttttacgccggaagaattccaggtaatgcagcaccataccctgtacggcgccagtctgtttgacgacatccattcgaatatagacaggatggccaaagacatagccctgacccaccatgaaaactggaacggcacaggttatcccggctggatcgatccggtcagccgcgcgcccataaaaaccaatgattccgggcagcctttgggaagaaaggaagaggagataccgcttgccggaagaattgtcgccatagccgacgtgtatgacgcgctttgttccaagagggtttacaaggaaccctgggacgaggaaaaggtattggaagaaattcgccagctgtccgggactaaattcgatcctgacctggttgatattttttttgagatacttcccaatatcaagcagatccagcagctatatcccgacggcagctctgcttaa

SEQ ID NO: 47794 - protein, 311 aa, Unknown
  Obtained from environmental sample
  DOMAIN (105)...(256): HD domain
  misc_feature (1)..(311): Xaa is any amino acid
MPDMYNLPAGVPYSFNSTFDKKAGYKTISTLTFPLITADGRILGVIQVINKMDDKGNVIVFSQEDVFLITHFAANATVALQQAYITRAMILRMIRMAELRDPKETGTHVNRVAGYAVEIYDRWAHNHNIPVEERESFRDILKIGSMLHDVGKVAISDMILKKPARFTPEEFQVMQHHTLYGASLFDDIHSNIDRMAKDIALTHHENWNGTGYPGWIDPVSRAPIKTNDSGQPLGRKEEEIPLAGRIVAIADVYDALCSKRVYKEPWDEEKVLEEIRQLSGTKFDPDLVDIFFEILPNIKQIQQLYPDGSSA

SEQ ID NO: 47795 - DNA, 495 bp, Unknown
  Obtained from environmental sample
  misc_feature (1)..(495): n is a, c, g, or t
atgcaaattcttgtagatgcggactcatgcccgcgcatggccagggaaatgatactgcgcttttcagccaggctgggaattaagagcgtcttcgccgcaaaccgcaaaattccagggctcccggagccggttgaaggccaaaaacaggcaatgcctaaacctgcgattttcgagctttgcccgcccggcgaaggggcagcggacaggcgccttttagaactggccgaaaagggggatttggctatcacgcgcgatttgcccctggcagaacagcttgtcgatgcgggagtaacggttatagacgacaggggcagggcattcacaaaggaaaatatccgggaacatcgttccataagggactttacagtcggcctggccgatagcggcctggattttgacagaactccctcatatggaaaaaaagaactatcttcgcttgccaacagcctggatcgggaactttatagattaagcagagctgccgtcgggatatag

SEQ ID NO: 47796 - protein, 164 aa, Unknown
  Obtained from environmental sample
  DOMAIN (1)...(156): Uncharacterized BCR, YaiI/YqxD family COG1671
  misc_feature (1)..(164): Xaa is any amino acid
MQILVDADSCPRMAREMILRFSARLGIKSVFAANRKIPGLPEPVEGQKQAMPKPAIFELCPPGEGAADRRLLELAEKGDLAITRDLPLAEQLVDAGVTVIDDRGRAFTKENIREHRSIRDFTVGLADSGLDFDRTPSYGKKELSSLANSLDRELYRLSRAAVGI

SEQ ID NO: 47797 - DNA, 1122 bp, Unknown
  Obtained from environmental sample
  misc_feature (1)..(1122): n is a, c, g, or t
atgaaaaaaatttatgaggaagtaaaagaagccggcggcctgtatgtaatcggcaccgagcgccacgaaagcagacgtatagacaatcagcttcgcgggcgttccggcaggcagggcgatccgggacggagcaagttctttatttctatggacgacgagcttatgcggctctttggcggcgaaaaaatgaagaacataatgtccaaaatcggaatgacaaacggtgagcctattgttcaccctctgcttaacagaagtatagaaaacgcgcagaaaaaagtggaggagaggaactttgaaatccgcaaacaccttttggaatacgacgatgtattaaatcagcagaggaaatatatttacgagcagcgcgacgcgattctgatggataaggatttaaagaagcgggttaacgattctaccgccgtaatggtcggcgatattattgatgattttatttccgcgcaaagacgcgacttaaaagccgcggttaaggacatgaccgagaaactgcggacaatgttcggttatgcccttacggttgaaagcggggaaatcaaggatacggaacttttggaaaaacgcataatcgcggatcttgaaaaagacatgaacgacaaggaagctcttatcggttccgagaacttaaatatgattatccgcgaacattatcttcattctgtggaccgcaaatggctggatcatctggaaaacatggaagccctgcgcgaagcggtctatctgcgccattacgcgcaaaaaaatccgcttaccgaatacaaggtcgaaggctaccgtatttttgaaaccatgatcgatgagatcagacaggaaatcgcgtcgcgccttcaccttatccgcattcaggtgtcggaaggcgggccgcgcaggcctgtcagccgttccatcggcgcggttcaatcggcaagccacagcagtatgggcgcgtttgactcaaattctttgggaggagcgcctgcggcggcctcatcagcgtcgcgctcgatgaatgcggcaagccggcctgacggagcgactgtcataaggggtcagcctaaggtaggaaggaacgatccttgtccctgcggaagcgggaaaaaatataaacactgccacggacggtaa

SEQ ID NO: 47798 - protein, 373 aa, Unknown
  Obtained from environmental sample
  DOMAIN (355)...(373): SEC-C motif
  misc_feature (1)..(373): Xaa is any amino acid
MKKIYEEVKEAGGLYVIGTERHESRRIDNQLRGRSGRQGDPGRSKFFISMDDELMRLFGGEKMKNIMSKIGMTNGEPIVHPLLNRSIENAQKKVEERNFEIRKHLLEYDDVLNQQRKYIYEQRDAILMDKDLKKRVNDSTAVMVGDIIDDFISAQRRDLKAAVKDMTEKLRTMFGYALTVESGEIKDTELLEKRIIADLEKDMNDKEALIGSENLNMIIREHYLHSVDRKWLDHLENMEALREAVYLRHYAQKNPLTEYKVEGYRIFETMIDEIRQEIASRLHLIRIQVSEGGPRRPVSRSIGAVQSASHSSMGAFDSNSLGGAPAAASSASRSMNAASRPDGATVIRGQPKVGRNDPCPCGSGKKYKHCHGR

SEQ ID NO: 47799 - DNA, 951 bp, Unknown
  Obtained from environmental sample
  misc_feature (1)..(951): n is a, c, g, or t
atggccaaatctaagcccagtaccaagaggatctatatcggaaaagatatccaggacgtaatggaacttccggatcttatcgatattcagctcaattcctacgagcggtttcttcagcgtgataaattaaaaaaaggcgaaaaaccggaaatacaggggctggaagaggttttcaggtcaaccttccccatcgaaagcccgaacggagatatggtgcttgaatacgagtactatacccttgacgaagaaaacataaaattcggcgagcaggattgcaagcagaagggtcttagctatgcggtttcccttaaagcgcgcgtaaatcttatctttcagcaaactggtgagattcggcaaaaagatatttacatgggggatatcccaatcatgaccgagcggggaaccttcattatcaacggcgctgagcgggtggttgtttcgcagatccaccgttcgccgggcgtaatattcagccacgaaaagggagtttattcttcccgaataattccttacagaggttcctggttggaatttgagattgataataaaaaagagctgatttacgcgaaaattgacagaaaaaaaagaattttgggaaccattttcctgagggccttaggctacgaaaaccgcgaggaaataatccgcgctttctataaaacccagacccttaaggtaaaggatgacagcgaaaccagggagaaattctttggccgtgttttagcccaggcggtttgggtaaaggacccaaacaaaagcgatgaaggcggcgaagaaggcaaaaagaaactataccgggcgggagacaagcttcatccgcatgacgtggatgagcttcttgcaaacggcgtaaaaacggtagaggttatcaagtttattgatccggctgatcccaaaacgataaatccacgaacctttccctggattcaatgtgctgctgaactgttttga

SEQ ID NO: 47800 - protein, 316 aa, Unknown
  Obtained from environmental sample
  DOMAIN (25)...(240): RNA polymerase beta subunit
  misc_feature (1)..(316): Xaa is any amino acid
MAKSKPSTKRIYIGKDIQDVMELPDLIDIQLNSYERFLQRDKLKKGEKPEIQGLEEVFRSTFPIESPNGDMVLEYEYYTLDEENIKFGEQDCKQKGLSYAVSLKARVNLIFQQTGEIRQKDIYMGDIPIMTERGTFIINGAERVVVSQIHRSPGVIFSHEKGVYSSRIIPYRGSWLEFEIDNKKELIYAKIDRKKRILGTIFLRALGYENREEIIRAFYKTQTLKVKDDSETREKFFGRVLAQAVWVKDPNKSDEGGEEGKKKLYRAGDKLHPHDVDELLANGVKTVEVIKFIDPADPKTINPRTFPWIQCAAELF

SEQ ID NO: 47801 - DNA, 1248 bp, Unknown
  Obtained from environmental sample
  misc_feature (1)..(1248): n is a, c, g, or t
gtggcaatgaggttgtatagccggaggcaagtggtttttttctcgattcttagctgccttttaacggcttttattgtaataggcgccgggaaactgaccggaaagcgctcggatccgcaatatgaaacagtacagggaacctctgttgacgagatttccggtgacgaagtccaggttctcgcggtcgggccgcaggaaaatccgcccaggccaatcgaaatccagtccaacgcctcctacaccgaggatgagcgcgaaaatatttccgtttacgaacggcttaactccgcggtagtaaacatcaccactgagaccatggcgctcgactggttcttgaatcctgtgccgcaggaaggcggctcaggttccggttcgattatagatacgcggggctatgtgctgaccaacaaccatgtcatacggaacgccaacaaggtatatatcaaccttgccgacggcagccagtacgaggggacggtggccggttctgatccggaaaacgacctggcagtggtcaaattcgatcctccggccggaatcgtattgaagaccgtgccttacggcgattcgagcggcctgaaagtggggcagaaggtactggccatcgggaacccctttgccctggagaggacccttacagtcggcattgtttccgggcttggaaggccggtacagattacccgccagcacattgtgcgggacatgatccagaccgacgcttccattaaccccggcaactcgggcggccctctgctggactcccgcggcaggatgataggcatcaacacgatgatctactctccctcaggcggttccgtgggcataggttttgccgtgcccgtggacaccgcaaagcgggttgttaacgaacttatacagtacggcaaagtacggcgcggctggttcgacgcgacaatggtgcagctttttccggcgctggtgcgttacgcgaaatatcccgtcagttccggccttcttgtttcccgtacccggcgggggggcaacgcggaaaaggccgggttaaaacagggcagcgagcccgtgcagtacggacgcagcgtaatctacatagggggcgatataatcacctcggtggacggcatgaaaatcgccaccctgtccgatctttattccgcgcttgagcacagcaagcccggcgacaaggtcaaagtcggaatactgcgcggcgatgaaaacataacgctggaaattcaacttgcagacagggaagaggtaatgaacaattga

SEQ ID NO: 47802 - protein, 415 aa, Unknown
  Obtained from environmental sample
  SIGNAL (1)...(28)
  DOMAIN (108)...(288): Trypsin
  misc_feature (1)..(415): Xaa is any amino acid
MAMRLYSRRQVVFFSILSCLLTAFIVIGAGKLTGKRSDPQYETVQGTSVDEISGDEVQVLAVGPQENPPRPIEIQSNASYTEDERENISVYERLNSAVVNITTETMALDWFLNPVPQEGGSGSGSIIDTRGYVLTNNHVIRNANKVYINLADGSQYEGTVAGSDPENDLAVVKFDPPAGIVLKTVPYGDSSGLKVGQKVLAIGNPFALERTLTVGIVSGLGRPVQITRQHIVRDMIQTDASINPGNSGGPLLDSRGRMIGINTMIYSPSGGSVGIGFAVPVDTAKRVVNELIQYGKVRRGWFDATMVQLFPALVRYAKYPVSSGLLVSRTRRGGNAEKAGLKQGSEPVQYGRSVIYIGGDIITSVDGMKIATLSDLYSALEHSKPGDKVKVGILRGDENITLEIQLADREEVMNN

SEQ ID NO: 47803 - DNA, 591 bp, Unknown
  Obtained from environmental sample
  misc_feature (1)..(591): n is a, c, g, or t
atgagtttaataactaaatacctaccgaagaaattcacttgtccatattgttacgcggaacacgacattaacgattgtaaattaaaatgttcttacgaaattagaggtaaaacaaatacttgtaaatttggaggttccaaagatagcaacggatggattcggtctcaatccaaaacgatatgtcttaattgtgaaaatgcggcaaaacaacttttttgcgatgatgtagaaaaagaaatcccgcgagagcttttatcaggatcaagcttaccaattgctcttttaggggctaaagcatcgggaaaatccaactatatcggcgtgttaattaacgaaataaaaacgaaaatgagcggcccgtttaattgctcgctttcgatggcttgcgaagagtccaaacaagcctataatgaattgtattataggccgttgtatgaatgcggagtcacggttaaggcgaccgaccgcggtgcggtcccacccctaatatttccgttgagatttaataaaaataacgtagtcagtgtgttaactttctatgatacagcgggtgaggatcttgatgacaaaagcggtatgcacgtaatttag

SEQ ID NO: 47804 - protein, 196 aa, Unknown
  Obtained from environmental sample
  misc_feature (1)..(196): Xaa is any amino acid
MSLITKYLPKKFTCPYCYAEHDINDCKLKCSYEIRGKTNTCKFGGSKDSNGWIRSQSKTICLNCENAAKQLFCDDVEKEIPRELLSGSSLPIALLGAKASGKSNYIGVLINEIKTKMSGPFNCSLSMACEESKQAYNELYYRPLYECGVTVKATDRGAVPPLIFPLRFNKNNVVSVLTFYDTAGEDLDDKSGMHVI

SEQ ID NO: 47805 - DNA, 387 bp, Unknown
  Obtained from environmental sample
  misc_feature (1)..(387): n is a, c, g, or t
atgattcacatggacgagaaaattaccgaatacatcgtatcaattgtcaccgctacaaggcccgcgcagaccggggcgcggcatgcgggcgcgtcaaaggccgcttcgtcatctgcctcggcaaaatttgccggagcaaaaattgccgatgggctgtaccgttatgtgtcattcggcgcgtcgccccgcgcgtccatcgcgctttaccgctgttcaaggattctggccctgttctcgggcagggatttcgtcagccctgatgacgtaaaagccgcggcttaccccgcgcttaggcacagaatcgtattgtcatacgaagcggaggcagacgggctggatgccgacacggtaattacccgtattctctcccatgtccctattccgtaa

SEQ ID NO: 47806 - protein, 128 aa, Unknown
  Obtained from environmental sample
  misc_feature (1)..(128): Xaa is any amino acid
MIHMDEKITEYIVSIVTATRPAQTGARHAGASKAASSSASAKFAGAKIADGLYRYVSFGASPRASIALYRCSRILALFSGRDFVSPDDVKAAAYPALRHRIVLSYEAEADGLDADTVITRILSHVPIP

SEQ ID NO: 47807 - DNA, 642 bp, Unknown
  Obtained from environmental sample
  misc_feature (1)..(642): n is a, c, g, or t
atgagatgcggaattgcgaacctttggggaaaagaccagggtttaagcccctacgaacaggcattgataacagcggcgttaatcgctttttcatcagagcgcagcggccagcgggtcggcgctttcctttttgacagcgggattgacaaggtttttcctccgcgcaagggaaggcgcaatatactttcgtttgtttcgggggcgcttcactatcacaaccggcaggccggcgatgcaaaaagcagcaatctgggcgccgcacttgccggagccggacggatgctaaaacggcggagcatggtagtgcttttgtcagattttttaagttcgggttgggaaaaagagttatgcgatctaagccgcaggcatgatgttatcgcggtcagagtctacgatccaaaaaacaccgacctgccaaaactgggcctccttgatgcgcgggatccggaaaccggcctgcggattgctgttccctcaaattccgtttcgttcaggaatgcctgggccggatggcacaaggatcgctcggatcactggctgaaattgtgccgcagggccggagcgtcccatcttgagctttcggtagatgaggatgccgcaaaagtactgtccagattttttacagaaagaggcggccaatga

SEQ ID NO: 47808 - protein, 213 aa, Unknown
  Obtained from environmental sample
  misc_feature (1)..(213): Xaa is any amino acid
MRCGIANLWGKDQGLSPYEQALITAALIAFSSERSGQRVGAFLFDSGIDKVFPPRKGRRNILSFVSGALHYHNRQAGDAKSSNLGAALAGAGRMLKRRSMVVLLSDFLSSGWEKELCDLSRRHDVIAVRVYDPKNTDLPKLGLLDARDPETGLRIAVPSNSVSFRNAWAGWHKDRSDHWLKLCRRAGASHLELSVDEDAAKVLSRFFTERGGQ

SEQ ID NO: 47809 - DNA, 993 bp, Unknown
  Obtained from environmental sample
  misc_feature (1)..(993): n is a, c, g, or t
atgaggatgccgcaaaagtactgtccagattttttacagaaagaggcggccaatgaaatgaaaagagcaaatacaaaagagcaattagcaatgagcaagcgccaacaaagttggcgagagcaaagtaagagacgcccttcttttcttctttgctatttgctatttgctatttgctattttggttatgcccaggacaganacacggacgcattaatgattccctcaagggtatatgtcggggacagagcgtcgttgattctgcccttgccgggttttgccgtanatgaagactctgaaactgcttctatcgtctcagcgtcagccgacattgagatacaccgcgcgttacttgaacgccgtcctgtgggcagccgccttaccgtcgaattcaccgcttacacgcccggcattctggaattgcctccaattgttatcgcgggagaggttttcaacggccttacaatagagataagctctattcttgagcatgacgcctccggcagggtgttgtctgctcccgccccgcccttagccattccgggcaccagcctccttgtatacggaaccataatctcaatactttttttcctgtcgctggcgttctgggttttattatgggggcgcaagagcatcaaaggctggcttgccgtatgggaaaagaggcggctgcttaatggcatgaggggggttgaaaaacgcctgcgaagaaccatgtcaagaaacgatgacacgtacaggaatatcctggatacgctttcaagggaattccggagcttcctgtcccattttaccggagagcattgccgggcgatgaccgctgtagaatttgccaatagcgaaatgaaaataaacagggaattcctgaaagtttttttcaaacgctgcgacggaatccgctttaacggcggagaaataaacaaaaaagacgccctttcaatacttgatgatctgaaagaattccttgccggggaggttgaaacaattagcaattag

SEQ ID NO: 47810 - protein, 330 aa, Unknown
  Obtained from environmental sample
  misc_feature (1)..(330): Xaa is any amino acid
MRMPQKYCPDFLQKEAANEMKRANTKEQLAMSKRQQSWREQSKRRPSFLLCYLLFAICYFGYAQDRXTDALMIPSRVYVGDRASLILPLPGFAVXEDSETASIVSASADIEIHRALLERRPVGSRLTVEFTAYTPGILELPPIVIAGEVFNGLTIEISSILEHDASGRVLSAPAPPLAIPGTSLLVYGTIISILFFLSLAFWVLLWGRKSIKGWLAVWEKRRLLNGMRGVEKRLRRTMSRNDDTYRNILDTLSREFRSFLSHFTGEHCRAMTAVEFANSEMKINREFLKVFFKRCDGIRFNGGEINKKDALSILDDLKEFLAGEVETISN

SEQ ID NO: 47811 - DNA, 351 bp, Unknown
  Obtained from environmental sample
  misc_feature (1)..(351): n is a, c, g, or t
atgacaataaactactttgattcttcgtttttgcttactattttgatgaatgaacctctgtctgaagaggctttggctatttggcaaagcaataaaactagggtgagttctattatgctcagatttgaagcaaatattgttttgagaagaaattatagaaacagaatgaacaaagtaaatagtgattggcttacgtccagactgcaagacctcaataaatttttgagcgatattttttacaaagatatcactgaaaatcttgaaagttctatatccaaaaattatgatattttgtctaaatgcaaaagtttggatgcaattcatatagccacagccctacactcgcgataa

SEQ ID NO: 47812 - protein, 116 aa, Unknown
  Obtained from environmental sample
  misc_feature (1)..(116): Xaa is any amino acid
MTINYFDSSFLLTILMNEPLSEEALAIWQSNKTRVSSIMLRFEANIVLRRNYRNRMNKVNSDWLTSRLQDLNKFLSDIFYKDITENLESSISKNYDILSKCKSLDAIHIATALHSR

SEQ ID NO: 47813 - DNA, 357 bp, Unknown
  Obtained from environmental sample
  misc_feature (1)..(357): n is a, c, g, or t
atgaacgaaaatccaacagatgcaaaagagcagtacgagcttgggcttagttatgccaatggaaatggtgtaccgaaagatatggagaaggctacctattggtataccaaagctgccgaacagggatatgtaaatgcgcagtataaccttggagtttgttataaaaacggagatggcgtaccgaaagatatggagaaggctatttattggtttaccaaagccgcagagcagggcgacgctggtgcacaaaataatcttagaattattagaagtatgaaagaacagattgccaaatccaccgagcagagcaatacaaatgtngacaacgaaaggctaaatgctgaaaacaaaggctag

SEQ ID NO: 47814 - protein, 118 aa, Unknown
  Obtained from environmental sample
  DOMAIN (8)...(43): Sel1 repeat
  misc_feature (1)..(118): Xaa is any amino acid
MNENPTDAKEQYELGLSYANGNGVPKDMEKATYWYTKAAEQGYVNAQYNLGVCYKNGDGVPKDMEKAIYWFTKAAEQGDAGAQNNLRIIRSMKEQIAKSTEQSNTNVDNERLNAENKG

SEQ ID NO: 47815 - DNA, 717 bp, Unknown
  Obtained from environmental sample
  misc_feature (1)..(717): n is a, c, g, or t
ttggcggcggtcaagaagaaaaaagttgtaaccgttccgcgcgcgatggaaatactaagagccgaagaagccgaaaaacttgtagaccgcgacagggtaagcgacgaggcgcgccagcgcgtggaagaaacgggaataatcttcatagacgaaattgacaaaatcgcggtaaaaggcgacagaggcggcggtcccgacgtttcgcgcgaaggcgtacaacgcgacatccttcccattgttgaaggagcgacggttaacacaaaatggggacccgtcaatacggatcatattctctttatcgcggcgggcgcttttaatgtaagcaaaccgtcggacttaattcccgaattacagggaagattccccctgcgcgtggaattggattctctgggtaaggacgattttttgcgtattttaacggagcccaagaacgcgcttatcaaacagtacgttgctctgcttgggacggaaaatatcgagcttaattttactccggaagcgattgaacacatggcggcgctggcggcagaggttaactcgaagctggaaaatatcggggcaaggcggcttcatacaataatggagacccttttggaagagctttcatttgaagcgtccgatatagcccccgcgaaagttgacataaccgtggattatgtcaatcaaaagctggcggaaatcgtcaaggatcaggatcttggcaggtatattctatag

SEQ ID NO: 47816 - protein, 238 aa, Unknown
  Obtained from environmental sample
  DOMAIN (5)...(124): ATPase family associated with various cellular activities (AAA)
  misc_feature (1)..(238): Xaa is any amino acid
MAAVKKKKVVTVPRAMEILRAEEAEKLVDRDRVSDEARQRVEETGIIFIDEIDKIAVKGDRGGGPDVSREGVQRDILPIVEGATVNTKWGPVNTDHILFIAAGAFNVSKPSDLIPELQGRFPLRVELDSLGKDDFLRILTEPKNALIKQYVALLGTENIELNFTPEAIEHMAALAAEVNSKLENIGARRLHTIMETLLEELSFEASDIAPAKVDITVDYVNQKLAEIVKDQDLGRYIL

SEQ ID NO: 47817 - DNA, 861 bp, Unknown
  Obtained from environmental sample
  misc_feature (1)..(861): n is a, c, g, or t
gtggctttaaggaaccgcataaggcggctgaagcttgatcccgagttacgcgaagatatcgcgcccaagaacatccttatgataggtcctacaggagtcggaaaaacagaaatcgcgcgcagactcgcgaaacttgccggttctcccttcctgaaagtggaggcgacaaaatataccgaagtgggttatgtgggcagggatgtcgaatccatgatacgcgatcttatggccgccggttttcagatggtaaaacaggaaatgcaggaaaccgttttgcaggaagcgaagaaacgcgcggaagaagaattgctcgatttactgcttccgtccaacagcaaaaaaccgaaagagaaaaaaatgaaacctgtcgtaaggcctatgggcgctttttcgataaaccccgaacattcaaacggcagcattatagggacgactttgcaggtgggaattccttttatgaacaacaaggaagaaaatgaggaagagaagaacgccgaagcaaaagaagagtcggcaaacgagggcgaagatgaaaagttcaaggcaacaagagaaaaattcagggtaatgcttcacgaaggcaaacttgaagacaggccggtggagcttatggtaaaccagaacccccaatttccaatggtggaaatgatgggcgcgggcatggaagagcttgaaaacagcctttcgggaatagccggtttctttggcggcggtcaagaagaaaaaagttgtaaccgttccgcgcgcgatggaaatactaagagccgaagaagccgaaaaacttgtagaccgcgacagggtaagcgacgaggcgcgccagcgcgtggaagaaacgggaataatcttcatagacgaaattga

SEQ ID NO: 47818 - protein, 286 aa, Unknown
  Obtained from environmental sample
  DOMAIN (21)...(124): ATPase family associated with various cellular activities (AAA)
  misc_feature (1)..(286): Xaa is any amino acid
MALRNRIRRLKLDPELREDIAPKNILMIGPTGVGKTEIARRLAKLAGSPFLKVEATKYTEVGYVGRDVESMIRDLMAAGFQMVKQEMQETVLQEAKKRAEEELLDLLLPSNSKKPKEKKMKPVVRPMGAFSINPEHSNGSIIGTTLQVGIPFMNNKEENEEEKNAEAKEESANEGEDEKFKATREKFRVMLHEGKLEDRPVELMVNQNPQFPMVEMMGAGMEELENSLSGIAGFFGGGQEEKSCNRSARDGNTKSRRSRKTCRPRQGKRRGAPARGRNGNNLHRRN

SEQ ID NO: 47819 - DNA, 1359 bp, Unknown
  Obtained from environmental sample
  misc_feature (1)..(1359): n is a, c, g, or t
ttggataagcaggatacgggcgaatttaccgatgataagccaaatatcctttcaccggtggaaaatgaagcccgttataccgccgaacgtattaatacgctgctgcgggaaaagagcgcggacggcaaaccaaaataccagccgcacgacattgccattttgtttcgcagccgcaaacctcagtatctttttgaaaaacacctcatgctgctcaacattccctacgccagcgaagatttgaacggttttttttacggcggcccggtaaacgatcttatgtcggttctcaggcttgccgtttatccccgggacagggcggcctacgcgcagatgctgcgctcgccctttgccggactttctttttccgccctgggtatttgtcttgccgacatggacaatacttccgtcccttttggcaatgagccgcttccgcttctcggtgaggaagaccgccggaaatacagccacgggcagcgcgtctaccaaaagattctctacagcgcctgtacggaaaccatcagcgcgctggtaagcgaattatggtataatgaaggctaccgctacgaaaccgaatggaatcccaaaaccgccgcgtaccgcgaaatgtacgattatttgtttcaccttgcggcaaaagcggacggggagagcctgaccctcgccgcgtttaccgattacattcacgaattgtcaaaatcaggcgagcgtttaagcgatcttgaaataccgcttgaacgtcaaagcgccgtgcatcttttaacgattcataaaagcaaaggtcttgagtttcctgtggtgttcatttgctgctgtgataaacatggaaagagtgagcatagcgatgacatctttgaggctgaggataaaggtcttacactcaatccgcccctccccgaaaatttcgatggttcaaaatatattaagcgcagttttttctgggagcgttccgcggcgcttgagagagggaagagaaccgccgagctgcgccgcctcctttatgtggccatgactcgcgcggaaaatgaattattcctaagcggctgccttggacttgacagcggaaatgacgcggattttacccagtgtcttaaacgctatgtagaagggaagcttgagaaggcggaagaaaaaagaacaatttcgcgcgatacaattcgcgataacattgttgataaaattataaatgacgatacttttttcgggctttgtctccccgcgttttgctcccatatccgcgatgaagatcctgaaaaagagcagccgttttttaaaataaaaaaaatcccggcttatgatgaggattatcttctggaagcggaagggaaaggcgtaaggttctcaaatgacgaggccggctga

SEQ ID NO: 47820 - protein, 452 aa, Unknown
  Obtained from environmental sample
  misc_feature (1)..(452): Xaa is any amino acid
MDKQDTGEFTDDKPNILSPVENEARYTAERINTLLREKSADGKPKYQPHDIAILFRSRKPQYLFEKHLMLLNIPYASEDLNGFFYGGPVNDLMSVLRLAVYPRDRAAYAQMLRSPFAGLSFSALGICLADMDNTSVPFGNEPLPLLGEEDRRKYSHGQRVYQKILYSACTETISALVSELWYNEGYRYETEWNPKTAAYREMYDYLFHLAAKADGESLTLAAFTDYIHELSKSGERLSDLEIPLERQSAVHLLTIHKSKGLEFPVVFICCCDKHGKSEHSDDIFEAEDKGLTLNPPLPENFDGSKYIKRSFFWERSAALERGKRTAELRRLLYVAMTRAENELFLSGCLGLDSGNDADFTQCLKRYVEGKLEKAEEKRTISRDTIRDNIVDKIINDDTFFGLCLPAFCSHIRDEDPEKEQPFFKIKKIPAYDEDYLLEAEGKGVRFSNDEAG

SEQ ID NO: 47821 - DNA, 567 bp, Unknown
  Obtained from environmental sample
  misc_feature (1)..(567): n is a, c, g, or t
atgatggcagagacttcccccgccgagcagggacaggggcttaaagagaccatagtcgccatcgacggaatcgctgttattatgaacaacagcagccctgtgtcaaaccttactgtcgcccagataaaggatatctacacaggggccattaccgattggagccagattaccggcaacgcaaagcgcggaaaaatagcggttataagccgggaagaagggtccggcacaaggggcgcttttgaggaactggtaggctttcagggcaaactgcttgctggagccaatgagtcaacaagcaccggcgctatcaaagcaagtatcgcgcaaaaccctgaagccatcggttacatctcccttggctccgtggacagttctgtaaaagcgatttcagttaacggtgtcgcccctacaaatgaaaatgtcaagaaaggcacatacaaaatcgcgcggccttttatcgttcttacaggaaaaaatgtgcgcccggaaagcagcgcatttattaactggatgctcagtccagaaggacaagcaattgtttcaaaaagctggattacgattaagtag

SEQ ID NO: 47822 - protein, 188 aa, Unknown
  Obtained from environmental sample
  misc_feature (1)..(188): Xaa is any amino acid
MMAETSPAEQGQGLKETIVAIDGIAVIMNNSSPVSNLTVAQIKDIYTGAITDWSQITGNAKRGKIAVISREEGSGTRGAFEELVGFQGKLLAGANESTSTGAIKASIAQNPEAIGYISLGSVDSSVKAISVNGVAPTNENVKKGTYKIARPFIVLTGKNVRPESSAFINWMLSPEGQAIVSKSWITIK

SEQ ID NO: 47823 - DNA, 819 bp, Unknown
  Obtained from environmental sample
  misc_feature (1)..(819): n is a, c, g, or t
atgtttggcgtaataaaagattcagatatgctggttttaactgttccaagccaatttatggaaaatgttgcccagcagcttgggcagtgtccagctcctgaaaaaatccccatagtggttaatgcaacaaaaggcatttccgaacattcactaaaaagaatgagcgaaataattctctctcacgtacagtggctatccgaagaagaaatagccgttctaagcgggccaactcacgcagaagaaattgcaagagaggtttattctgcaatagtggcagcaagcaaaaatgaagtttgcgcaaaaattgtccaagaagcctttagcaacaaaacgctcagagtttatacctctcaagacgtggttggggttgagctttgtggcagcattaaaaacataatagccatagcaggtgggattatagacggtttgggaattggggttggcgacaacacaaaagccgcgctaatcacaagagggcaagcggaaatttgcaggctaggggaagtcttaggtgcaagcccgcgaaccttctccggccttgctggcattggcgatttgattgtgacttgtatgtctcatcacagcagaaaccgttttgttggcgaacagataggcaagggtaaaaccttgaacgaaaatttggcacatataaaaatggtggcagagggtgtttccacagcgcgcagcacttatgctcttgccaaaaaaatcaatgttgagatgcctattgtaaaccaggtttacgaagtgctttttgagcataaaaacccccgagacgccatcgaagcccttatgtccagagaactaaaagcggagtag

SEQ ID NO: 47824 - protein, 272 aa, Unknown
  Obtained from environmental sample
  DOMAIN (3)...(101): NAD-dependent glycerol-3-phosphate dehydrogenase N-terminus
  misc_feature (1)..(272): Xaa is any amino acid
MFGVIKDSDMLVLTVPSQFMENVAQQLGQCPAPEKIPIVVNATKGISEHSLKRMSEIILSHVQWLSEEEIAVLSGPTHAEEIAREVYSAIVAASKNEVCAKIVQEAFSNKTLRVYTSQDVVGVELCGSIKNIIAIAGGIIDGLGIGVGDNTKAALITRGQAEICRLGEVLGASPRTFSGLAGIGDLIVTCMSHHSRNRFVGEQIGKGKTLNENLAHIKMVAEGVSTARSTYALAKKINVEMPIVNQVYEVLFEHKNPRDAIEALMSRELKAE

SEQ ID NO: 47825 - DNA, 1665 bp, Unknown
  Obtained from environmental sample
  misc_feature (1)..(1665): n is a, c, g, or t
atggcgcacacatctcttagatatggttacagcgccgcgactatccttttgtcaagcaataacgccggttcttttgaatcctcaatgatgagaagttttgagcttgtggggcattgtttggacgttgaccgcgttcagatttggcgcaatgaaatgattgataacgaaatgcactatgttctcagatatgaatggctcagcgaatacggaaaaaaatgcaaaagcgttcctatggggcttcattttccctacagcatgaaaaaagaatgggaagaactgtttttatgcggcgatcatataaatatgccgcttaaggatatgtcgccggaagatcaagccttcctgggatattacgaaatgaaatccatcgttattatccccatgtttttggaaaaagaattctggggattcttcagtattgatgactgccgcaatgagcgcgtgttttcaagcgaggaaatcagcatattaacttccgcgggattaatgatgagcagcgccgtaaaccgcaatttgcagatgaataaaacgcacgaagccgacgagcgaatgcagttaatgatcgacgcggcgccgctttgcgcgcttttctgggataaagaccttaaaataatcgactgcaatcaggaagcgataaaaatgtttgagttatcaaacaagcaggaatttattgagaaattcgggttgttatcgccggactatcagccggacggcagactctcaggagagaaaggccctgctctagtaaaaaaagcgctggatgacggttattccaattttgagtggctgcaccaaaaactggacggggaacaaattccctcggaaattacttgtgttcgtgtaaaattcaaggatgaatatactgttaccgaatacataagagacttgcgcgagcaaaaagccaaacttgcggaaatgcgcaaagccgaaatcgccctggaaagcagtaaggcaaagagcgactttttggcgaagatgagccatgaaattcgcacaccgatgaacgcgattttgggtattacggaaattcaacttcaggatgaatctctgccaaaggcgacaaaagaagcgcttgaaaggatttataactccgccgaccttttgcttggaataattaatgacatactggacctttcaaagatagaggcgggtaaacttgagttagctcccatccaatatgatatagcgagccttattcacgacgttgttcaattgaacatgatgcgctatgaaagcaagcctatcgaatttaaacttaagattgatgaaaatattcccgttatgctgtttggcgacgaacttcgcattaagcagattttaaataaccttctttctaacgcgtataaatatacgcatgaaggctcaattagtcttgatgtttcatccaagtatgaatgggatgataatctaactgttgttttccgcgtcagtgacacgggacagggtatgacttccgagcaggtgcgtaaattgggaagcgattattccagatttaacatggaggcgaaccgcaagaccgaaggcaccggtcttggcatgagcattacgcgcaatcttatacggctaatgaatgggattattgatattgaaagcgagcccaatgtgggttccgtatttacggtgcgtctgcctcaaaaatgcgctaagcgcgatccaatcgggtaa

SEQ ID NO: 47826 - protein, 554 aa, Unknown
  Obtained from environmental sample
  SIGNAL (1)...(24)
  DOMAIN (24)...(168): GAF domain
  misc_feature (1)..(554): Xaa is any amino acid
MAHTSLRYGYSAATILLSSNNAGSFESSMMRSFELVGHCLDVDRVQIWRNEMIDNEMHYVLRYEWLSEYGKKCKSVPMGLHFPYSMKKEWEELFLCGDHINMPLKDMSPEDQAFLGYYEMKSIVIIPMFLEKEFWGFFSIDDCRNERVFSSEEISILTSAGLMMSSAVNRNLQMNKTHEADERMQLMIDAAPLCALFWDKDLKIIDCNQEAIKMFELSNKQEFIEKFGLLSPDYQPDGRLSGEKGPALVKKALDDGYSNFEWLHQKLDGEQIPSEITCVRVKFKDEYTVTEYIRDLREQKAKLAEMRKAEIALESSKAKSDFLAKMSHEIRTPMNAILGITEIQLQDESLPKATKEALERIYNSADLLLGIINDILDLSKIEAGKLELAPIQYDIASLIHDVVQLNMMRYESKPIEFKLKIDENIPVMLFGDELRIKQILNNLLSNAYKYTHEGSISLDVSSKYEWDDNLTVVFRVSDTGQGMTSEQVRKLGSDYSRFNMEANRKTEGTGLGMSITRNLIRLMNGIIDIESEPNVGSVFTVRLPQKCAKRDPIG

SEQ ID NO: 47827 - DNA, 1218 bp, Unknown
  Obtained from environmental sample
  misc_feature (1)..(1218): n is a, c, g, or t
ttggagtttcgtttctttgcacatgatagaataccgttcccctccttcgatgtactgttgccggtggggatttcattctatacttttcaggctctcggctattcgattgacgtttattatggacgtgtcagggctgagcggaatttcatcacctatgcgttatttgtaactttttttccacagttggtggcagggcctattgaacggacagggaacctcctgccccagtttaaggttaatcatgaatttgattatgatcgtgtaacttcgggactcaggctggccgcatggggaatgttcaaaaaagtggtgattgccgaccggctggcgatttatgtaaactgggtattcgggaatccatctgtttatccctccgcttctttggcgctggcggtatttttctttgcctttcagatttactgcgatttttccggctattccgatattgccatcggctgcgcacgggtattaggttttaacttgatgagcaacttccgccagccgtatttttcccgttccattacggagttctggcggcgctggcacatttcactttcaacatggctcaaagattatctttatatacccttggggggcaaccggaagggggaagtccggcgatgctttaatttgttgataacttttctgatctcaggcctttggcatggcgcggcatggcactttgtcgtatggggcgcgcttcacggcgtatttcagattatcgagcgaagtaccgctccgttccgtaacgcgataggcttcaaggttggtctgaccgaagaatcccgcttgagaaaagtaatacgggtttgtattacctttgcgctggtatgcttcgcatgggtcttcttccgggcaaacacaattgcggacgcttttttgataacggcgaagctgacggaacttccggcggaactggcggggtatgtcctaggacttttccaaaagggaattatcggaactatacgggatgcattccaattgggaatggatgttgcaaaccctattcagggtttcggactaaccaacctggggctctcaggattttttatttctatcttgagcatcaacgatgtattgatgcgaaaaaagccgaatgaaacgatcttgacacagaaaccgttagtattgcgctgggctggttattatgtgctgatacttacaattctgttgagctggaacgcaggatcatcacagtttatttattttacgttttaa

SEQ ID NO: 47828 - protein, 405 aa, Unknown
  Obtained from environmental sample
  DOMAIN (5)...(282): MBOAT family
  misc_feature (1)..(405): Xaa is any amino acid
MEFRFFAHDRIPFPSFDVLLPVGISFYTFQALGYSIDVYYGRVRAERNFITYALFVTFFPQLVAGPIERTGNLLPQFKVNHEFDYDRVTSGLRLAAWGMFKKVVIADRLAIYVNWVFGNPSVYPSASLALAVFFFAFQIYCDFSGYSDIAIGCARVLGFNLMSNFRQPYFSRSITEFWRRWHISLSTWLKDYLYIPLGGNRKGEVRRCFNLLITFLISGLWHGAAWHFVVWGALHGVFQIIERSTAPFRNAIGFKVGLTEESRLRKVIRVCITFALVCFAWVFFRANTIADAFLITAKLTELPAELAGYVLGLFQKGIIGTIRDAFQLGMDVANPIQGFGLTNLGLSGFFISILSINDVLMRKKPNETILTQKPLVLRWAGYYVLILTILLSWNAGSSQFIYFTF

SEQ ID NO: 47829 - DNA, 498 bp, Unknown
  Obtained from environmental sample
  misc_feature (1)..(498): n is a, c, g, or t
atgaaaaagtatacgctttttttcgtcttctgtttgatttcgctcgttgcggtagcagccgtttccgcgcagggctttacaggccccggcgcaaatccgcccccaccgcctccgccgcccggaggtcccggccattacccaccaccccctccgccgccccatggaggtcccggtcatcatccgcccccgccccccggaggcccccaagggtatgggttcaccggtccggcacaaaccgttactgtaaaacaagctcagtcttctggtcatagaacccctgtgataataaagggaaatatcgttcaggctataggcggcgatatgtttcaattccgcgattcttccggtgagattgtccttaaaataggccccagggaatggatgtattacggcgcaactatcagtccgcaggataccatcgaaatcagcggtgaagtatgctatgggaatggatgggagccggtacatgtgcatgcgcggtttatcaggaaaatatag

SEQ ID NO: 47830 - protein, 165 aa, Unknown
  Obtained from environmental sample
  SIGNAL (1)...(23)
  DOMAIN (1)...(164): Domain unknown function (DUF388)
  misc_feature (1)..(165): Xaa is any amino acid
MKKYTLFFVFCLISLVAVAAVSAQGFTGPGANPPPPPPPPGGPGHYPPPPPPPHGGPGHHPPPPPGGPQGYGFTGPAQTVTVKQAQSSGHRTPVIIKGNIVQAIGGDMFQFRDSSGEIVLKIGPREWMYYGATISPQDTIEISGEVCYGNGWEPVHVHARFIRKI

SEQ ID NO: 47831 - DNA, 555 bp, Unknown
  Obtained from environmental sample
  misc_feature (1)..(555): n is a, c, g, or t
atgagtgatatgcaaaaaaacacttacgaaagcccgttgctttccagatattcctcagaagaaatgctgcatttatttagcccgcagttcaagcatcaaacttggcgcaggctttggatttggcttgccgaaggcgagcgagaacttgggcttccaataaccgaagagcaaatatcagaactaaaaatttacgaaagcaatataaattgggaagatgccgcccaagaggaaaaacgccgccgccacgatgttatggcgcacgtgtacgcttttggcttgcaggctccaaaggcaaagggaataatacacctcggcgcgacaagtgcttatgttggcgacaacacagatttaatccaaatgcaacagggtttgattttcattcgccgccgtttgtgcagagtaatagacaatctctcaaattttgcattggaatataaagatatacccattttgggtcgcacgcattttcaagctgcacagctaacaaccgttggaaaaagagccgcgctttggattcaagatttgctaattgacttagaagaaataaatcattaa

SEQ ID NO: 47832 - protein, 184 aa, Unknown
  Obtained from environmental sample
  misc_feature (1)..(184): Xaa is any amino acid
MSDMQKNTYESPLLSRYSSEEMLHLFSPQFKHQTWRRLWIWLAEGERELGLPITEEQISELKIYESNINWEDAAQEEKRRRHDVMAHVYAFGLQAPKAKGIIHLGATSAYVGDNTDLIQMQQGLIFIRRRLCRVIDNLSNFALEYKDIPILGRTHFQAAQLTTVGKRAALWIQDLLIDLEEINH

SEQ ID NO: 47833 - DNA, 453 bp, Unknown
  Obtained from environmental sample
  misc_feature (1)..(453): n is a, c, g, or t
atggcattggtaggcatagttagcggctctgcatcggataagcctattgtggataaaataacctcggttttagacgaactgggcatagcttgggaatattccgttctctctgcccatagaactcctaacaaggttgctcgttattcaaaagaagctcagggtagaggcttggcagtgctggtaggcgttgctggtctctctgccgccttgcccggctgcctagctgcccactcaacgctccctgtaattggagttccttgcgatggtgggtatcttggaggtgcagatgcgctttactcggtggctcaaatgccgcccggaatacctgttgctgctgttggcataaacaatggcaaaaatgcggcatatctggcagcctccattctctccatttctcaaaccgaaataagagaaaaattgcaggcatacagaaaaagcttgggcgatgagtga

SEQ ID NO: 47834 - protein, 150 aa, Unknown
  Obtained from environmental sample
  DOMAIN (2)...(150): AIR carboxylase
  misc_feature (1)..(150): Xaa is any amino acid
MALVGIVSGSASDKPIVDKITSVLDELGIAWEYSVLSAHRTPNKVARYSKEAQGRGLAVLVGVAGLSAALPGCLAAHSTLPVIGVPCDGGYLGGADALYSVAQMPPGIPVAAVGINNGKNAAYLAASILSISQTEIREKLQAYRKSLGDE

SEQ ID NO: 47835 - DNA, 345 bp, Unknown
  Obtained from environmental sample
  misc_feature (1)..(345): n is a, c, g, or t
atgaaaaaatacaacggcggcaaacaaatgacgtctgtttggcggatcggtttatgtgtcggggaagaacgcttgaagggtgaagacgggaagaaagctcattccacccaaaaaccggaagagcttcttaagagggtgattttatctacgacaaaacagggggatgtcgtgcttgatccgttttttggaaccggcacaacgggcgctgtcgccaaaaagttaaaacgaaattacatagggatagagagggagccggaatatataaaactcgcggaaaacaggatcgccaatattaacgtatattttgaagaagccgactgggaagaaggatgcctcacacgttaa

SEQ ID NO: 47836 - protein, 114 aa, Unknown
  Obtained from environmental sample
  DOMAIN (4)...(93): DNA methylase
  misc_feature (1)..(114): Xaa is any amino acid
MKKYNGGKQMTSVWRIGLCVGEERLKGEDGKKAHSTQKPEELLKRVILSTTKQGDVVLDPFFGTGTTGAVAKKLKRNYIGIEREPEYIKLAENRIANINVYFEEADWEEGCLTR

SEQ ID NO: 47837 - DNA, 1119 bp, Unknown
  Obtained from environmental sample
  misc_feature (1)..(1119): n is a, c, g, or t
atggcgttaaattgcggcatngtcggtcttcncaatgtgggaaaaaccgcaatcttctcggctttaagttccatcatcgcggaaacggctaactaccagttctccaccaaaaacccgaatgtgggcatcgcggatgtcccggactcccggctgacaaggttaagcgaaattttcaaaccaaaaaaaaccattccggcgacagttgaatttgtggacattgccgggctggtaaaaggctcctcaaagggggaggggcttggaaaccagttccttgcccatatccgcgaagtggggattatcgcccatgtggtccgctgttttgacaaccccgatattatccatgtaagcgacaagattgatcccgaatccgatattgaaaccatcaatatagaacttgcccttgccgatctggaaacccttgccaagcgaaaagaaagggctgaaaaaacattgaaagttcagagcgagaaaaaaaacgccgagcttgtccttgccgtgttggataaaatcggccccttgcttgaagacggtaagcccgtccgtttagccaatttaaacgatgacgaaaaggcccttatttacgactgccattttatcaccgccaaacccattctgtatgtctgcaatgtggacgaggaagggatgaaaacagttatggccgatggaaaagttccttatgtggaagccgtgcggaaagtggccgtcgccgagggttctccggtagtggtcataagcggcaaattcgaagcggaactcatcgccatcgaggacccggcggaaaggctcgccttcctcgaagagcttggcctcaaagagccgggcctcgcccccctgatacgcgccgcttacgggcttttggggctcaggacttttttcaccgccggggaagacgaatgccgcgcctggactatccgcgccggggatcccgcgcccaaagccgcaagggccattcacactgactttgaaaaaggctttatcaaggccgaggtgtacacctgcgatgatattttcaaatacggcaccgaggcaaagatcaaggaagccggcaaataccgcattgaaggcaaggaatacattgtgcaggacggcgatgtaatgttcttcaaatttaacgtgtga

SEQ ID NO: 47838 - protein, 372 aa, Unknown
  Obtained from environmental sample
  DOMAIN (3)...(145): GTPase of unknown function
  misc_feature (1)..(372): Xaa is any amino acid
MALNCGXVGLXNVGKTAIFSALSSIIAETANYQFSTKNPNVGIADVPDSRLTRLSEIFKPKKTIPATVEFVDIAGLVKGSSKGEGLGNQFLAHIREVGIIAHVVRCFDNPDIIHVSDKIDPESDIETINIELALADLETLAKRKERAEKTLKVQSEKKNAELVLAVLDKIGPLLEDGKPVRLANLNDDEKALIYDCHFITAKPILYVCNVDEEGMKTVMADGKVPYVEAVRKVAVAEGSPVVVISGKFEAELIAIEDPAERLAFLEELGLKEPGLAPLIRAAYGLLGLRTFFTAGEDECRAWTIRAGDPAPKAARAIHTDFEKGFIKAEVYTCDDIFKYGTEAKIKEAGKYRIEGKEYIVQDGDVMFFKFNV

SEQ ID NO: 47839 - DNA, 675 bp, Unknown
  Obtained from environmental sample
  misc_feature (1)..(675): n is a, c, g, or t
atgttggggcatttgccccctgatgaaaaacatggggtttacacatctgcgtatagtcgcgccggaacatttgacgagagtaccctgctggcgcggactgttcacgccgaggatgtctggcgtaacgctgatttttttgacaccctcgccgaggccgcggccgactgctctcttgtggtaggtacaacccggcgcaggggcagaaggcgcaaaaccatcagcatggagccgcgcgcccttaccgcgtggcttaaagaacaggaacgcgcgcctgtagggtttgtttttggcaacgagcgcaccggacttgaagaagatgaacttgatttctgcaatgtcgcctcacacgttcccgtttccgattcctttccatcgctcaatctttcacacgccgtgcaaatatacgcctacgagctttttctcacttttggccgggtcggggaaaaccccgttaaaggtgaatgggttccgctggaatatccggcggttttaaagctaactgaaagcataaccaacacccttgctgaacttggtttttacaagcgtcccgggcgcgaggaacagacccggtttttgcgggatttaatctgccgcgccggtttgacggaaagggaaggccgctacctcaaagacatcttttccaaagctgcaagacttgggtataataaatcataa

SEQ ID NO: 47840 - protein, 224 aa, Unknown
  Obtained from environmental sample
  DOMAIN (11)...(137): SpoU rRNA Methylase family
  misc_feature (1)..(224): Xaa is any amino acid
MLGHLPPDEKHGVYTSAYSRAGTFDESTLLARTVHAEDVWRNADFFDTLAEAAADCSLVVGTTRRRGRRRKTISMEPRALTAWLKEQERAPVGFVFGNERTGLEEDELDFCNVASHVPVSDSFPSLNLSHAVQIYAYELFLTFGRVGENPVKGEWVPLEYPAVLKLTESITNTLAELGFYKRPGREEQTRFLRDLICRAGLTEREGRYLKDIFSKAARLGYNKS

SEQ ID NO: 47841 - DNA, 765 bp, Unknown
  Obtained from environmental sample
  misc_feature (1)..(765): n is a, c, g, or t
atgcacagaaagtcaaaggttcagataccngtacttcctctttcgcaacaagaggccgaaagtttcacaaaggcaaacaaaagtgctaacgtcacggtaactgggggtggaagtggcgttggcatttctgcattattagaaggcaccacggatattgcgcagtcttctcgcaaaataaaatttgaggaaaagcaaaaacttcaagaaaaagggaataaagtagttgaaaaaataatcgcctacgatgcccttgcggttattgtgcacccttcaaatccggttagcaaacttacccgcgaacaaatggaagatattttcacaggcaaaaccaccaactggaaagatgttggcggcccagatatgaaaataatcccctattcccgcgaaacatcttctggaacctacgagttttttaaagaacatgttttgaaaaacaaaaactatgtgaacggcataatgagcatgccagccactggcgccatagttcaatccataagccaaacaaaaggagctattggctatattggccttgcttatttagacaaaaaaataaaagcagttgaggtttcttttgatgctggaaaaacctacaccgcgccttctgtgaaaagcgctatggacgagacttacccaatagttcgcccgcttatttactattacacagaaaaatccgaagccacggtcaagccttttgttgactatgtgctttctgctcctgggcaaaaaatcgtgaaggacattgggtttattccaataagcaaataa

SEQ ID NO: 47842 - protein, 254 aa, Unknown
  Obtained from environmental sample
  misc_feature (1)..(254): Xaa is any amino acid
MHRKSKVQIPVLPLSQQEAESFTKANKSANVTVTGGGSGVGISALLEGTTDIAQSSRKIKFEEKQKLQEKGNKVVEKIIAYDALAVIVHPSNPVSKLTREQMEDIFTGKTTNWKDVGGPDMKIIPYSRETSSGTYEFFKEHVLKNKNYVNGIMSMPATGAIVQSISQTKGAIGYIGLAYLDKKIKAVEVSFDAGKTYTAPSVKSAMDETYPIVRPLIYYYTEKSEATVKPFVDYVLSAPGQKIVKDIGFIPISK

SEQ ID NO: 47843 - DNA, 1200 bp, Unknown
  Obtained from environmental sample
  misc_feature (1)..(1200): n is a, c, g, or t
atgagacgggtaattgagaaaatcatagaaaatatactgcgacttagcggtgcagctaccactatcatcattttgctgatggtggtttttttgttcaaagagggctttgggcttttcaaaaaccctgttgttgaaagggggcacgttctgtgcgttaatgcttccaacagcgttgattatttgaattccaaagaaataaaattgatatttgatggcgaaatagagaattggaataaattgggcggcaaagacttggctatagaagtttttaggttcaatgatattttcagacgctattcagaagaggaatttggaaatgattatgaaaaactgccggagaagttgggggaggttatatcttccacgcccggaataatagcttttataccgcagcaatatatgccttcttccatgcccaaagttaaaaaacttcaagatgagaaaataggcagtgcggatttttttggaggaacggaatggattccaacttctgtgccgtctccgcaatttggcgtgttgcctttggtgcttggaacgctatgggttagcctctttgcaattttaattgccctgcccttgggtttgggcgttgccgtttatctctccgagttagccaacgataaaatacgaaaaattttgaaacccgctgttgaattgcttgctggaataccttctgttgtctatggtttttttggcttggttgttttggttcctcttgtgcagagagcgtttaatttgcccgttggcgaaaccgcattcaccggcagtttggtgcttgctattatggcactccccacaatcataacggttgcagaagatgcaatgcgcagcacaccgagcgcaatgcgtgaggcaagcctcgctctgggtgcaactcattggcaaaccatatacagagtgattatcccttatgcttcgtctggaatttctgcggcggtgattctgggaataggcagggcagttggcgaaacaatggcggtgcttatggtaaccggaaacgctgccgttattccaacatccctatttgctccaattcgcacaattcctgcagccattgccgccgagcttggcgaggcacccgcaggtggcgcgcactatcaggctttgtttatgctgggttgcattttgtttatgataacacttgtgatgagcattgcgtctgaattgatttctaagcgagagccagggaagggggtgtaa

SEQ ID NO: 47844 - protein, 399 aa, Unknown
  Obtained from environmental sample
  DOMAIN (176)...(396): Binding-protein-dependent transport system inner membrane component
  misc_feature (1)..(399): Xaa is any amino acid
MRRVIEKIIENILRLSGAATTIIILLMVVFLFKEGFGLFKNPVVERGHVLCVNASNSVDYLNSKEIKLIFDGEIENWNKLGGKDLAIEVFRFNDIFRRYSEEEFGNDYEKLPEKLGEVISSTPGIIAFIPQQYMPSSMPKVKKLQDEKIGSADFFGGTEWIPTSVPSPQFGVLPLVLGTLWVSLFAILIALPLGLGVAVYLSELANDKIRKILKPAVELLAGIPSVVYGFFGLVVLVPLVQRAFNLPVGETAFTGSLVLAIMALPTIITVAEDAMRSTPSAMREASLALGATHWQTIYRVIIPYASSGISAAVILGIGRAVGETMAVLMVTGNAAVIPTSLFAPIRTIPAAIAAELGEAPAGGAHYQALFMLGCILFMITLVMSIASELISKREPGKGV

SEQ ID NO: 47845 - DNA, 471 bp, Unknown
  Obtained from environmental sample
  misc_feature (1)..(471): n is a, c, g, or t
atgcaaaaattatccgacagaacagccggatttaccgattctgtcattcgccgaatgactcgcatatcgctcaggcacggggcggtaaacctttcgcagggttttccggattttgacccgccaaaggaaattctggaccggctctctgaaatatcgcataccgggccgcaccagtattcaatcacctggggcgcgcaaaatttccgcgaggctctctccgaaaaacaatcgaaatggatgggcaggcaaattgacggcgaacgcgaaatcgttgtaacttgcggcagtaccgaggcaatgatggctgccatgatgacggtcgcgaatcccggtgacaaggcgatcgtattttctccgttttatgaaaactacggcgcggacacaattctgtcaggggcccagccaatctatgtgtcgctgcgcccggccggaattcgccttcgacgcaaacgaactggaagccgcttttaa

SEQ ID NO: 47846 - protein, 156 aa, Unknown
  Obtained from environmental sample
  misc_feature (1)..(156): Xaa is any amino acid
MQKLSDRTAGFTDSVIRRMTRISLRHGAVNLSQGFPDFDPPKEILDRLSEISHTGPHQYSITWGAQNFREALSEKQSKWMGRQIDGEREIVVTCGSTEAMMAAMMTVANPGDKAIVFSPFYENYGADTILSGAQPIYVSLRPAGIRLRRKRTGSRF

SEQ ID NO: 47847 - DNA, 876 bp, Unknown
  Obtained from environmental sample
  misc_feature (1)..(876): n is a, c, g, or t
atgattccggcgcttggtatattcgctaaaatgaacaaattaacctgcgatgattatataaagcgatttaagcacccgggcataaggaaactgctaaactttattccttctggctattccgcaagctccgcgatttttacgcttgcgacgctggaaacaggcgacggcggctacccggaaggcggttccctcgcaatgacggaaaggatggctcaagcttttagggaactgggcggcaaactcctgcttaactcaaaggtaaaaaaaattgaaatcgaaaacgggactgttaccggagtaaagctggaaaatgaaaccttgagcgccgatgcggtaatcgttacgcaggaaacaattgccgcgcttgtcagcctattcgacaccccgccgtgtgacgcgtggctgcgagagctgcgcgaaaaaacaaagcccgccgtttgcacttatatcagcatgggtatccgcgcgcaattgcctgatatcattccggtatggcagcttgacgagccaatagaatacgcgggtacgaaaatatccgaaatcgggtttggcaactacgccggatatgaaggttacgctccaaaaggctgcgcggcgcttactacagcgctcatgggcgatacttatgacttttggaaaaatgctaaagacgagggccgttacgatgaagaaaagcgcgttctggcggagcaaatcaaagccgcagtcagccggaaatacccacaggcggagggaaacatcgaggttatcgacattgccacaccattaacctacgagcgctataccggggcataccacggctcctggatgaccatccagggccctggcgataaaaccagaatatatccggggactgtgcaaaacgtccgcggttaa

SEQ ID NO: 47848 - protein, 291 aa, Unknown
  Obtained from environmental sample
  misc_feature (1)..(291): Xaa is any amino acid
MIPALGIFAKMNKLTCDDYIKRFKHPGIRKLLNFIPSGYSASSAIFTLATLETGDGGYPEGGSLAMTERMAQAFRELGGKLLLNSKVKKIEIENGTVTGVKLENETLSADAVIVTQETIAALVSLFDTPPCDAWLRELREKTKPAVCTYISMGIRAQLPDIIPVWQLDEPIEYAGTKISEIGFGNYAGYEGYAPKGCAALTTALMGDTYDFWKNAKDEGRYDEEKRVLAEQIKAAVSRKYPQAEGNIEVIDIATPLTYERYTGAYHGSWMTIQGPGDKTRIYPGTVQNVRG

SEQ ID NO: 47849 - DNA, 2082 bp, Unknown
  Obtained from environmental sample
  misc_feature (1)..(2082): n is a, c, g, or t
ttgcacccggaagacaaggaagcgacgctggacattttcaaaaggcatatacttgacaatacgggacaaacgccctacgacatagaataccgccttaagcgtaaaaccggtgaatacgcctattaccgcgcttgcggtgagtccattcgctaccaggacggtaatgccgtacacgtggccggtacgctcgtggatattacagaaaccaagaaaatgcttctggaaaaggagaggcaaacggaggaagcacaagccgccaaccgcgctaaaagcaccttccttgccaacatgagccatgaactgcgtacgcctctcaatgtggttatcgggcttaccggtttaataatggaagatgaaaacctggaaaaacatataacggataatctggtaaaaataagtaacgcgggaagcactcttcttaatattgtaaacgatattcttgatctttcaaaaatcgagtcgggcaagcttgaattaacccctgatgagtattacatggcaagtatgttgaacgataccgttacccttattcttgcccgcatcggagaaaaagaaataaagttccatttgaaaatagacgacaacctgccgtacaaacttatcggagacgatctgcgggtgaagcagatttttaccaacctgcttaccaacgccgtcaaatacaccaacgaaggaagcgtagaactcagcatacactgcgagcgtgaaggcgatacggtgtggatgaatgccgccatcagtgataccggcatgggcatgtccgaagatgatatgaaaaacctgttccttgattatcacaggatcgatacaaaatccaaccatcatgttgaaggtacgggtttgggcttgtccatcaccaaaaaatttgttgaaatgatgggcggggaaatcaaggtggagagcgagatcggcaaaggctcaactttcagtttccgcataaagcagggatttatcagcgacgaggttattggagcggatgtttcaaacaaactccgcaacttctgcttcagcgacgacaagcgcattgtctcgcaaaggcttgtaaagatcgatttgagttacgccacggtgcttgtagtagacgacattacgaccaatctggacgtagcggcgggcattttaggaagttacaaattgcatgttgactgtttaaccaacggaccggccgctatagaaagaatacggtcgggaacccccgtttacaacgcaatcttcatggatcacatgatgccgggaatggacggcatagaaacggtggacaaaatccgcgcgttaggtacggagtacgcgaagaaagtacccattatagcgcttaccgccaacgctattaagggaacggaaaagattttctttgaacatgattttcaggcgttcatatctaaacccatcgacgttacggagatggacgcagctttaaagaaatgggtgcgcgacgacacccgcgccgaagttgtaatcgaagacaaaatttccgataccgaccttncatttgaaaatctgattatagaaatccccggagtggacacgaataaagggctttccctctacgccggagcgaagaagatttatctgcccatgcttcgctcttacgcccacaacacgccgaaggtgctggaaaaactaaattccgtctcggcggagaatttgcacgactacgttatcaccgtacacgggctgaaaggcacgagcgccgccataggcgcggagcacatccgcaccgccgctttggaacttgaaaatctttcaagggccggcaacttgcagggcgttctcgccaaaaacgaccagctcattgtaaacacgaaaatagttgtcgccagcgttcaggagtggctggataaaaatgacattcgcgaggttaaaccgcacctgaaagcgcccgacagggaacttctttccaaactgcgggaaaactgtgaaagttacgacatggacgccgtggaagacgccatgaaagaactggaaaaagcggaatatgatgaagagggcgatcttgttacctggatgagggaatatgttgatatgtccaagttgggggatgtagcaaagaaactcgcagaagtattgaacgggaaaaaataa

SEQ ID NO: 47850 - protein, 693 aa, Unknown
  Obtained from environmental sample
  DOMAIN (1)...(69): PAS fold
  misc_feature (1)..(693): Xaa is any amino acid
MHPEDKEATLDIFKRHILDNTGQTPYDIEYRLKRKTGEYAYYRACGESIRYQDGNAVHVAGTLVDITETKKMLLEKERQTEEAQAANRAKSTFLANMSHELRTPLNVVIGLTGLIMEDENLEKHITDNLVKISNAGSTLLNIVNDILDLSKIESGKLELTPDEYYMASMLNDTVTLILARIGEKEIKFHLKIDDNLPYKLIGDDLRVKQIFTNLLTNAVKYTNEGSVELSIHCEREGDTVWMNAAISDTGMGMSEDDMKNLFLDYHRIDTKSNHHVEGTGLGLSITKKFVEMMGGEIKVESEIGKGSTFSFRIKQGFISDEVIGADVSNKLRNFCFSDDKRIVSQRLVKIDLSYATVLVVDDITTNLDVAAGILGSYKLHVDCLTNGPAAIERIRSGTPVYNAIFMDHMMPGMDGIETVDKIRALGTEYAKKVPIIALTANAIKGTEKIFFEHDFQAFISKPIDVTEMDAALKKWVRDDTRAEVVIEDKISDTDLXFENLIIEIPGVDTNKGLSLYAGAKKIYLPMLRSYAHNTPKVLEKLNSVSAENLHDYVITVHGLKGTSAAIGAEHIRTAALELENLSRAGNLQGVLAKNDQLIVNTKIVVASVQEWLDKNDIREVKPHLKAPDRELLSKLRENCESYDMDAVEDAMKELEKAEYDEEGDLVTWMREYVDMSKLGDVAKKLAEVLNGKK

SEQ ID NO: 47851 - DNA, 1467 bp, Unknown
  Obtained from environmental sample
  misc_feature (1)..(1467): n is a, c, g, or t
ttggctttccctggaatcggcggggactttccggcgaggcttataggcgacgagttgcgggtcaagcaggttttgaacaacctgctttcaaacgcggccaagtacaccgacgaagggactgttactctgtgcatggcgtggtcagcccacagtgccggaaaggtcaaattggcttttaccgtgcgggataccggaataggcatccgcgccgaagacataaaaaagctgttcgccagctacgcccagctcgataccggggcaaagcgcaaggccgggggaaccggcctggggcttgcaatcacaaaaaacctcgtggaaatgatgggcggcagcatcggcgtggaaagcgaatacggaaaaggctcggcctttactgcggagataatacagggcattgcggaatacaagcctatcggggatgaaacagccgaagccctgcgcaatttccgctaccaacccaggggacagactggcagcctcggcaaaaacatcgcccctttatggctggggccgcaagttcaagtattggtggtggacgacctgccagaaaacctcctcgtagcccaaggcttgcttgccccctacggcctgaaggtagataccgccgcttccgggcgggaagccgtggaattggccaaaagccatagctacggccttatattcatggatcacatgatgccggaaatggacggcatcgaagccgctggggccatccgcaaagtggaaggccatgcccatacccccattgtcgcgctgacggctaacgccctgcggggaatgagggaatattaccttgaacaaggctttgacgattacctttcaaagcccataagccccgaagcgttggacgcaatcatcaataaatggatcaatgaacaaataacaaataacagtgaacaattatcagagagccttggacagaatgcgaagccttctgatgacaactcattgttcattgctaatcgttcattgttaattgagattgaggagaaacgcatcgacaaactgaaccactaccgcgccgcctttgaaattagcaaaacttccggcgggctggaaatcgacgcggaatactacgggcggtttacggccttggtcggatctttcgacaatctgcccgacggtttacaggcggacaaggcgatgctgatggaagccggacggaacggagacgcgcaaaggatacgcgaaacgcttcccgctttttgcgaaagcctggcggccatgcaccggagcaaagcggacagcggcgggacggaagatgaaactgtgggcctgcttttccggcggcttaaaaaggcaatccgggacggcgatgccgccgcttccaagaaaatagtggcggagctgggcgcgaaaagcctaagcccccgcgagcgcgaactgtacctgaagctctacgatttgcggatggtaggcaatacccgaaaagcccctgnaangcatggaagctatgccngaagttga

SEQ ID NO: 47852 - protein, 488 aa, Unknown
  Obtained from environmental sample
  DOMAIN (173)...(287): Response regulator receiver domain
  misc_feature (1)..(488): Xaa is any amino acid
MAFPGIGGDFPARLIGDELRVKQVLNNLLSNAAKYTDEGTVTLCMAWSAHSAGKVKLAFTVRDTGIGIRAEDIKKLFASYAQLDTGAKRKAGGTGLGLAITKNLVEMMGGSIGVESEYGKGSAFTAEIIQGIAEYKPIGDETAEALRNFRYQPRGQTGSLGKNIAPLWLGPQVQVLVVDDLPENLLVAQGLLAPYGLKVDTAASGREAVELAKSHSYGLIFMDHMMPEMDGIEAAGAIRKVEGHAHTPIVALTANALRGMREYYLEQGFDDYLSKPISPEALDAIINKWINEQITNNSEQLSESLGQNAKPSDDNSLFIANRSLLIEIEEKRIDKLNHYRAAFEISKTSGGLEIDAEYYGRFTALVGSFDNLPDGLQADKAMLMEAGRNGDAQRIRETLPAFCESLAAMHRSKADSGGTEDETVGLLFRRLKKAIRDGDAAASKKIVAELGAKSLSPRERELYLKLYDLRMVGNTRKAPXXHGSYAXS

SEQ ID NO: 47853 - DNA, 1731 bp, Unknown
  Obtained from environmental sample
  misc_feature (1)..(1731): n is a, c, g, or t
atgcctctcgataaaaacattaaaaaagttttagtaatcggctccggccccattgttatcgggcaagccgccgaatttgattacgccggaactcaggcatgccgcgtgctgagggaagacgggatcgaaatcgtccttgtaaactcaaaccccgcgacaataatgaccgacaaaaatatcgcggataaaatttatattgagcctttaactcttattaccgtaaaacgcattattaaaaaagaacgccccgacagtattttatcgggacttggcgggcagactgggctgactctgtgcatgcagttagcccgcgacggtttccttgataaaatgaatgtgcgcctccttggttcttcgcctcagactattgacaaggccgaagacagaaaaattttcaaggaaaccatggaagctataggacagcctgtggttccctctgtcatagctaccgatgttgaaacggcggttgagtttgcgaaagagcttggttatcccgtaattgtacgccccgccttcacgctcggcggcacaggcggcggcaatgccgtggacgaagatcgcctgcgcgagataacaacaaacggtctcgcgctttcgcccatccatcaggtgttgatagaaaaatcaatcgccggctggaaagaaattgagtttgaagtcatgcgcgaccgcgccggcaatgtaatcacagtctgttcaatggaaaacttcgatcctgtcggcatacacacgggagacagcatagttatcgctcccgccgtcactcttgcggacaaggaataccagatgctgcgctccgcctcgcttgacatcatcaaggcgcttgaagtggagggcggctgtaacgttcagcttgcgcttgagcctaacagttttgagtacgcggttatcgaggttaacccgcgtgtgtcgcgttcttccgcgcttgcaagcaaggcgacaggctaccccattgcgaaagtagcgacaaaaatcgccatcggctataccctcgacgaaattaccaacgcggttacggggacaacctttgccgcttttgaacctacgcttgattatgtcgctgtaaaatttccgaagtggcccttcgacaaatttgtttacgcaagcagggagcttggaacccagatgaaggcgacaggcgaggtaatgtcaatcgcggacacttttgaagaggcgataataaaagcggtgcgcggcgcggagatagggctttcaagccttgagcttccgcgccttgccgcgagcagcgacgccgagattcgcggtatgctgaaaacggttaccgatgaacgcttgtttgtgttatacgaagcgatcaagcgcggcatcagcatagacgagctttattcaattaccagggtagaccgctggttcctgaacggtttaaagaatatcaaagacagcgctgagtccgtgcccgcttcaccctctccgttggtttataaaatggtagacacctgcggcggcgaattcgaggcaaagactccctacttttattcgattcaaagcggttttgagaacgaagctctgcctttcattcaaaagagcgaaaagctcagggtcgtagttcttggaagcggcccgatacggatagggcaggggattgagttcgattacgcctgcgttcattgcgtgtggacgttaaggaagatgggctatgaggttatcgtaatcaacaataatcctgaaactgtctcgacggatttgacaccgcggacaggctttacttga

SEQ ID NO: 47854 - protein, 576 aa, Unknown
  Obtained from environmental sample
  SIGNAL (1)...(23)
  DOMAIN (420)...(502): Carbamoyl-phosphate synthetase large chain, oligomerisation domain
  misc_feature (1)..(576): Xaa is any amino acid
MPLDKNIKKVLVIGSGPIVIGQAAEFDYAGTQACRVLREDGIEIVLVNSNPATIMTDKNIADKIYIEPLTLITVKRIIKKERPDSILSGLGGQTGLTLCMQLARDGFLDKMNVRLLGSSPQTIDKAEDRKIFKETMEAIGQPVVPSVIATDVETAVEFAKELGYPVIVRPAFTLGGTGGGNAVDEDRLREITTNGLALSPIHQVLIEKSIAGWKEIEFEVMRDRAGNVITVCSMENFDPVGIHTGDSIVIAPAVTLADKEYQMLRSASLDIIKALEVEGGCNVQLALEPNSFEYAVIEVNPRVSRSSALASKATGYPIAKVATKIAIGYTLDEITNAVTGTTFAAFEPTLDYVAVKFPKWPFDKFVYASRELGTQMKATGEVMSIADTFEEAIIKAVRGAEIGLSSLELPRLAASSDAEIRGMLKTVTDERLFVLYEAIKRGISIDELYSITRVDRWFLNGLKNIKDSAESVPASPSPLVYKMVDTCGGEFEAKTPYFYSIQSGFENEALPFIQKSEKLRVVVLGSGPIRIGQGIEFDYACVHCVWTLRKMGYEVIVINNNPETVSTDLTPRTGFT

SEQ ID NO: 47855 - DNA, 537 bp, Unknown
  Obtained from environmental sample
  misc_feature (1)..(537): n is a, c, g, or t
ttgacttttggcgcgaagcgtgggatagcggccgctcttgcggcgcggaattgcgaagtgtggatattccccagcgatacgcctgcaaaggaaatcttgaaaatgcagccggacggcgtgatgttaagcaacgggccaggcgaccctgcggatccgggaaacgcgggcattgtcgaaacaatacgcgcgcttgaaaaaagcggcataacaatttttggcatctgtatggggcatcagcttcttgcgtgcgcgaaagggtattctaccagaaagttaaagttcgggcacagaggggcgaaccagccggtcaaggagacgaaaacagggcaggtgtacataacaagccaaaaccacggttacgaggtagttgcggacgacagctcttttatcaatgttaacgacggctcatgcgaggggatggactatggcaattcgttctcggtgcaattccaccccgaggcgcgcggcgggccgttggacacgtcgtttttattcgagcggtttttagaaaggatggcggcaaatgcctctcgataa

SEQ ID NO: 47856 - protein, 178 aa, Unknown
  Obtained from environmental sample
  DOMAIN (3)...(171): Glutamine amidotransferase class-I
  misc_feature (1)..(178): Xaa is any amino acid
MTFGAKRGIAAALAARNCEVWIFPSDTPAKEILKMQPDGVMLSNGPGDPADPGNAGIVETIRALEKSGITIFGICMGHQLLACAKGYSTRKLKFGHRGANQPVKETKTGQVYITSQNHGYEVVADDSSFINVNDGSCEGMDYGNSFSVQFHPEARGGPLDTSFLFERFLERMAANASR

SEQ ID NO: 47857 - DNA, 1461 bp, Unknown
  Obtained from environmental sample
  misc_feature (1)..(1461): n is a, c, g, or t
atgaacatcgctattttggctcatatagacgcaggcaaaacaacgctttccgagcgtattttgtgggctgcgggcaagatattgcgggctggcgatgtggaagatgggcttgcaacaatggactatttgcccgaagaaaaggaaaagggcataaccatagaagcgggcatttcaaattttatgtggagggatatttggtggaatttgatagatgctccggggcacatagattttggcatggaagcagacaccgctctggaagccgcagacggtgcggttttggtgatttccgctgctgatggaatacaacctcaaacttatgcagcttgggaaaaattgaaaatgctgaacaaaccttgcattatatttttcaacaaaacagattgcccagagtcgcgttgggaagagagttttttggaaatagaggagcaatttggagttaaacccttgcttatgaattggcctgtgaaaaacgaaggcgtttgggatgttttgagcggatgttttttgaaacataatgcagagggcaaagaggatatttttgattttacagaagaaaaagaggaaatggaaaattaccgaagggaagcctgcgaagcggcttcgcttgcagacgataaaattttagaaaaaatgctcgctaagaaacaggtggaaacagccgacttgcttgccggtttgcaaaaattgttcagcgaaaaaaaacatattttgtgctatgctggttctgcaaaaaaaaatatagggattcgctcgcttttaaatgggatttctttttttataaaaccgcaaacaataaaaagcaaggagcctgggcaagttatacgctatcgtttttttagcggcataggtgaagttgccattttcaagagttttaaaaaattgccaaagagcaagtttccaagcgggttgaaattttaccgcattcacgcccaaaatttgagcgaagttcaggaaattttttgcggagatatttatgcggtaaagggaatggagcataaaaaaacaggggactattcgcctcttttgcaaatgagaattgaatgtttaaaggcaagcgactgggaaacgacaaatgcggctttaaagagcatagagcgtacagataattcggtgaaagtttcggataacagcgatggttcttggacattgcacgctatgggtgcggttcagtttgattttattttgtctagactcaaaagggaatttcgctctgaggttagggcaggggagccaagtgttgagtttagagaaatgctttccataaaattggaggctatccaaaatttttgccaaattggagatacgagcgtgaaagtttctatttctgcggaacctaattgtgaaggctttgccgttgaaggttgcgagaatatttggaaggatgctataatttctgctcttgatgaattttgccagtctggggttttgggcaaaggtacgttgcgtaatgttaaataa

SEQ ID NO: 47858 - protein, 486 aa, Unknown
  Obtained from environmental sample
  DOMAIN (1)...(128): GTPase of unknown function
  misc_feature (1)..(486): Xaa is any amino acid
MNIAILAHIDAGKTTLSERILWAAGKILRAGDVEDGLATMDYLPEEKEKGITIEAGISNFMWRDIWWNLIDAPGHIDFGMEADTALEAADGAVLVISAADGIQPQTYAAWEKLKMLNKPCIIFFNKTDCPESRWEESFLEIEEQFGVKPLLMNWPVKNEGVWDVLSGCFLKHNAEGKEDIFDFTEEKEEMENYRREACEAASLADDKILEKMLAKKQVETADLLAGLQKLFSEKKHILCYAGSAKKNIGIRSLLNGISFFIKPQTIKSKEPGQVIRYRFFSGIGEVAIFKSFKKLPKSKFPSGLKFYRIHAQNLSEVQEIFCGDIYAVKGMEHKKTGDYSPLLQMRIECLKASDWETTNAALKSIERTDNSVKVSDNSDGSWTLHAMGAVQFDFILSRLKREFRSEVRAGEPSVEFREMLSIKLEAIQNFCQIGDTSVKVSISAEPNCEGFAVEGCENIWKDAIISALDEFCQSGVLGKGTLRNVK

SEQ ID NO: 47859 - DNA, 1113 bp, Unknown
  Obtained from environmental sample
  misc_feature (1)..(1113): n is a, c, g, or t
atggaacacatggcggctattgccggtcatcctgaacgctgcgccccctgcatacacattgccggttccaagggcaaaggctcagttacgggaatgaccgcctcgattctggaagcggccggcctgcggacggcgcggtatatgtcgccgcatatcagcgattttcgcgagcggataagcctgggcaattcattttttgaggagcctgtgtattgcacagccggagatgaactgcgtgatctggccgaaaacaaaatacccgccgcgaagatcagcctctttgatcccgctgacaaggaaggcgaggccccgactttttttgaacttttaacgctgtacttttttctctgcgccaaacacggtaaaagtgacgcgatggttgtggaaacaggcatgggcggcaggctggactgcaccaatattgtcgattctgaagtttccgtcattacattgatagagctggagcatacggcgattctcggcaaaacaattccggcaatagccggtgaaaaggcgggcatcatcaaaacgggcaagcctgtggtactggcaaagcagccggcggaggccctggaagtattcaggaagaaaacaacggaaaagaacagccccttattttattttcccgatattacggaaataaataatttgaatataaataccaatggcacgaatttctcgctaaagttcagcggggaaaataatccgttggaactttccattcccataccgggcgcgattcaggctgaaaacgcggggcttgccatactggcgctaaaatattttaataaaaacattaacaatgacgctatacgcctcgggttaagccggctgaagatacccgcgcgttttgaaaaaatcgccgacaatccacccctcatcattgacggcgcccatacgccggaaagcgcctctctctgcgcggacaccttctgctcgctgtacggcgagggcggcattctgctgttcggctgtgccgccgacaaggacgccgccgcaatggcaaagctgctgctgccccgtttttcgcagataattatcaccatgccggggacattcaggatcagcgacccggaaaaagtgtacagcgcgtctctcaaacaaaaacgctaa

SEQ ID NO: 47860 - protein, 370 aa, Unknown
  Obtained from environmental sample
  DOMAIN (280)...(361): Mur ligase family, glutamate ligase domain
  misc_feature (1)..(370): Xaa is any amino acid
MEHMAAIAGHPERCAPCIHIAGSKGKGSVTGMTASILEAAGLRTARYMSPHISDFRERISLGNSFFEEPVYCTAGDELRDLAENKIPAAKISLFDPADKEGEAPTFFELLTLYFFLCAKHGKSDAMVVETGMGGRLDCTNIVDSEVSVITLIELEHTAILGKTIPAIAGEKAGIIKTGKPVVLAKQPAEALEVFRKKTTEKNSPLFYFPDITEINNLNINTNGTNFSLKFSGENNPLELSIPIPGAIQAENAGLAILALKYFNKNINNDAIRLGLSRLKIPARFEKIADNPPLIIDGAHTPESASLCADTFCSLYGEGGILLFGCAADKDAAAMAKLLLPRFSQIIITMPGTFRISDPEKVYSASLKQKR

SEQ ID NO: 47861 - DNA, 579 bp, Unknown
  Obtained from environmental sample
  misc_feature (1)..(579): n is a, c, g, or t
atgggaaaatttataacgattggcgagcgtatccactgtatatcccctgtcataagagcggcaatggaagccatgaatccggagcccatattgcagagggccagggagcagatcgccgccggcgctgtgtatcttgacgttaacataggacccgcagaaaagaacgggcccgaccttatgcgatgggcggtaaagctgttgcaggaaaactgcgacaacatacccttatgccttgatacagccaatcagaaggcaattgaagcgggactgaaggcgtacaatcccgcaaagggcaaagccattctcaactccgctgactcaggcgacaggatttccaatctggaccttgccgccgcgaatggggcgatctgtatcgctctttgcgccaaacagggtattccttcggacaatgacgagcgcatggcctattgccaggaattgctggagcatggcatgaacatgggtatggaagcggacgaccttttgtttcgatccgctgtttctggtaataaagggaatgcaggacaaacaggcgcaggtgctggaatttatacgccagctaagggacatggggcttaa

SEQ ID NO: 47862 - protein, 192 aa, Unknown
  Obtained from environmental sample
  DOMAIN (4)...(178): Pterin binding enzyme
  misc_feature (1)..(192): Xaa is any amino acid
MGKFITIGERIHCISPVIRAAMEAMNPEPILQRAREQIAAGAVYLDVNIGPAEKNGPDLMRWAVKLLQENCDNIPLCLDTANQKAIEAGLKAYNPAKGKAILNSADSGDRISNLDLAAANGAICIALCAKQGIPSDNDERMAYCQELLEHGMNMGMEADDLLFRSAVSGNKGNAGQTGAGAGIYTPAKGHGA

SEQ ID NO: 47863 - DNA, 1587 bp, Unknown
  Obtained from environmental sample
  misc_feature (1)..(1587): n is a, c, g, or t
atggatacaaaacaagctattgtcgaaggcaaaacgtatctggggatcgaatttggctccacgcggataaaggcggttttaatagacaacagttatgagcctgttgcggctggcaatcatgactgggaaaacaaactggaagacggagtctggacctatcaacttgccgatgtgtgggcggggctgcgggactgtttttcgaagctggcccttgatgtaaaaaaccgctatgggctggcccttactgcagtcggcgctgtcggcatttccgcgatgatgcacgggtatctggtctttgacaagaacggcgatcaactcgttcccttccgtacctggcgcaataccataacngaaaaagcagccgctcttctancngaaatattcaaaatcaatatacttcacgctgggagtatcgcacatttataccatgcgatttcgaacggcgaacctcatgttaaagatattgattttatgaccactctgcggggatatgtacattggaaattaacaggcaaaaaagcgcttggtattggcgatgcttccggtatgtttccgatagacaacggtaattataatttccaaatgtcggaaaaatttgacgatcttattactccatataattacacatggaaaatagcggatattctccccgccgtcctggatgccggtgaagacgcaggaatcctcacggcggagggggctaaactgctcgatccatccggctgcctgcgggacggtatccctctctgtccgcctgaaggagacgcgggaacgggcatggttgcgactaacagcgtggcggagcgtacaggcaatgtttcagcgggcacttctattttcgcgatgatcgtcatggaaaaagaactgtccaaggtatatcccgagattgatattgtaaccaccccggcaggaaagcctgtagcgatggtccactgcaacaactgtacttccgacattgacgcgtggataaaattgttcggcgaactgtttgatataagcggaacaaagccggacaaagcggcgttttacgacgcgctgtattacaaagccctggaagcggatgaggattgcggcgggcttctttcctataattacttttccggcgagcatattaccggaattgaggaaggccgtccgctgttcgcgcgtctgccggacagccgtttcactctggcaaattttatgcggactcttcttttttccggcataggaaccttaaagtacggcatagacatccttaccgagaaggaaaaagtgcggatagacagcttgttgggccacggcggcttgttcaaaaccaaaggcgtggggcagcgttttttagccgccgcttttaacgcgccggtttcggtaatggaatccgccggagaaggcggcagttggggcattgcgcttcttgccgcgtttatgcgcgagggggaagggacgctggagaacttcctgactgaaaaagtctttgccggaaagacgggcgcgcaaattgaacctgatccaaaagatgtgaagagttttaataagtttatggaacattataccgcgggactcaagatagaacgggcggcggttgaaaatttcagaaaggggtga

SEQ ID NO: 47864 - protein, 528 aa, Unknown
  Obtained from environmental sample
  DOMAIN (265)...(505): FGGY family of carbohydrate kinases, C-terminal domain
  misc_feature (1)..(528): Xaa is any amino acid
MDTKQAIVEGKTYLGIEFGSTRIKAVLIDNSYEPVAAGNHDWENKLEDGVWTYQLADVWAGLRDCFSKLALDVKNRYGLALTAVGAVGISAMMHGYLVFDKNGDQLVPFRTWRNTITEKAAALLXEIFKINILHAGSIAHLYHAISNGEPHVKDIDFMTTLRGYVHWKLTGKKALGIGDASGMFPIDNGNYNFQMSEKFDDLITPYNYTWKIADILPAVLDAGEDAGILTAEGAKLLDPSGCLRDGIPLCPPEGDAGTGMVATNSVAERTGNVSAGTSIFAMIVMEKELSKVYPEIDIVTTPAGKPVAMVHCNNCTSDIDAWIKLFGELFDISGTKPDKAAFYDALYYKALEADEDCGGLLSYNYFSGEHITGIEEGRPLFARLPDSRFTLANFMRTLLFSGIGTLKYGIDILTEKEKVRIDSLLGHGGLFKTKGVGQRFLAAAFNAPVSVMESAGEGGSWGIALLAAFMREGEGTLENFLTEKVFAGKTGAQIEPDPKDVKSFNKFMEHYTAGLKIERAAVENFRKG

SEQ ID NO: 47865 - DNA, 402 bp, Unknown
  Obtained from environmental sample
  misc_feature (1)..(402): n is a, c, g, or t
gtgcagggccgtcatatttacgcgatgggcggcaacgcgaaagcggcaaaactttccggcgtcaaaaccgaatgggtgatgttctggatttacaccaatatggcggttcttgcctctatcgcggcggtagtttttaccgcccgtttaaacgccgccacgcctaaagccggccagggcttcgaaatggacgctatcgccgcctgttatgtgggaggttcggcggtttcgggcggtatcggaaccattatcggcgcggtggtaggcggcctttttataggcgtattgaacaacggaatgtccatattgggagtcagcacggattggcagcaggcaatcaagggttttgtccttctcgcggcggtcgcgtttgacctttattcaaagagaagaagcggcaaataa

SEQ ID NO: 47866 - protein, 133 aa, Unknown
  Obtained from environmental sample
  misc_feature (1)..(133): Xaa is any amino acid
MQGRHIYAMGGNAKAAKLSGVKTEWVMFWIYTNMAVLASIAAVVFTARLNAATPKAGQGFEMDAIAACYVGGSAVSGGIGTIIGAVVGGLFIGVLNNGMSILGVSTDWQQAIKGFVLLAAVAFDLYSKRRSGK

SEQ ID NO: 47867 - DNA, 519 bp, Unknown
  Obtained from environmental sample
  misc_feature (1)..(519): n is a, c, g, or t
gtgttttttgtcaataaaagaaatcctgtgtcaaatttgacaactcaacaaataagagacatatattcgggaaaaaccacaaattggaaagaacttggaggaaggaataaaagcataagggcttatcagcgtgaaaaaaacagcggaagccagacaatgctggaagcaataatgggcgatgaaataataatgaaaccgttgacggaagatgtaatcggttttatgttagatataataacgcaagtttctgaatacagaaattataataacgcaataggttattcatttttattttatactacccaaatggtcaggaataataaaataaaattattatcaataaatggaattaccccctctatggaaactattcaaaatgaatcatatccatattctgaatatttttatgcaattacaacaaatacaaaaaatgaaaatgtcaatatatttatagaatggatattatctgaacaaggccaatacattgttaagaaaacaggatatgttccaataaattaa

SEQ ID NO: 47868 - protein, 172 aa, Unknown
  Obtained from environmental sample
  misc_feature (1)..(172): Xaa is any amino acid
MFFVNKRNPVSNLTTQQIRDIYSGKTTNWKELGGRNKSIRAYQREKNSGSQTMLEAIMGDEIIMKPLTEDVIGFMLDIITQVSEYRNYNNAIGYSFLFYTTQMVRNNKIKLLSINGITPSMETIQNESYPYSEYFYAITTNTKNENVNIFIEWILSEQGQYIVKKTGYVPIN

SEQ ID NO: 47869 - DNA, 684 bp, Unknown
  Obtained from environmental sample
  misc_feature (1)..(684): n is a, c, g, or t
ttgaagccgaaaaatataaaaaaagctttatatgctaaacagacacctgaaatgcgacttgaagctgtaaaacgagactggcgtgatttacagtttgtagaagaacagacacctgagatgtgccttgaagctgtaaaacaagactggtgtgctttacagtttgtaaaagaacagacacctgagatgtgctttgaagccgtaaaacgagactggtatgctttaaagtttgtaaaagaacagacacctgagatgtgccttgaagctgtaaaacgatgcggaaggaatttattttatgattctgtaaaacgacaaactatagaggttttacagcttgtaaaagaacagacgcctgatatttgccttgaagttgtaaaacaatgcggagaggctttagagtttgtaaaagaacagacgcctgagctttgccttgaagctgtaaaacatcacggaagggctttacagtatgtaaaagaacagacacctgagatttgccttgaagcagtaaaacgacacggaagggctttagagtttgtaaaagaacagacacctgagatttgccttgaagccgttaaacaaaacggattggctttagagtatgtaaaagaacagacgcctgagatttgccttgaagccgttaaacaaaacggattggctttaaagtatgtaaaagaacagatgccttga

SEQ ID NO: 47870 - protein, 227 aa, Unknown
  Obtained from environmental sample
  misc_feature (1)..(227): Xaa is any amino acid
MKPKNIKKALYAKQTPEMRLEAVKRDWRDLQFVEEQTPEMCLEAVKQDWCALQFVKEQTPEMCFEAVKRDWYALKFVKEQTPEMCLEAVKRCGRNLFYDSVKRQTIEVLQLVKEQTPDICLEVVKQCGEALEFVKEQTPELCLEAVKHHGRALQYVKEQTPEICLEAVKRHGRALEFVKEQTPEICLEAVKQNGLALEYVKEQTPEICLEAVKQNGLALKYVKEQMP

SEQ ID NO: 47871 - DNA, 390 bp, Unknown
  Obtained from environmental sample
  misc_feature (1)..(390): n is a, c, g, or t
gtggtgatgataggcaatcttttcgccgggctaaaggaagccccgggcgaggaaatcctttttgacggcaggatatacaaggaataccgtggcatgggcagcctcggtgctatccacgacggttccgcggatcgctaccaggccagtaaagacgaatcgccagtgcctgaaggcattgaagggcggcttccctatagaggcgagctaagggaattcgtttatcaactgatttcagggctcagaaaaggcatgggttactgcggctgcaaaagcctcgcggagctgaagcaataccgaaagtttgtcagaataacctcgtcgggcatcagagaaagccacccgcatgacatcgtcattacccaggatgcgccaaactattccagggcttaa

SEQ ID NO: 47872 - protein, 129 aa, Unknown
  Obtained from environmental sample
  DOMAIN (1)...(115): IMP dehydrogenase / GMP reductase domain
  misc_feature (1)..(129): Xaa is any amino acid
MVMIGNLFAGLKEAPGEEILFDGRIYKEYRGMGSLGAIHDGSADRYQASKDESPVPEGIEGRLPYRGELREFVYQLISGLRKGMGYCGCKSLAELKQYRKFVRITSSGIRESHPHDIVITQDAPNYSRA

SEQ ID NO: 47873 - DNA, 309 bp, Unknown
  Obtained from environmental sample
  misc_feature (1)..(309): n is a, c, g, or t
ttgaacgtgttgcaaaacggcattgtgttcacatttgccaatatagaggaaagccgcgacaaagtttcaagcgggcacattgcccgcacatcaaaatacataaaagccttaataaatgccatgattgccaaaggtgtttacctagaagaacttatgacttgggatttggatactgcagttacctctgcccgtttgcacgatgttggagaaattgaagtatcggatttgattttgaacaagcaaggtatatttacttatgaggaaatcagccaaataagcggcacaccactgaaggcgaaaagttattga

SEQ ID NO: 47874 - protein, 102 aa, Unknown
  Obtained from environmental sample
  misc_feature (1)..(102): Xaa is any amino acid
MNVLQNGIVFTFANIEESRDKVSSGHIARTSKYIKALINAMIAKGVYLEELMTWDLDTAVTSARLHDVGEIEVSDLILNKQGIFTYEEISQISGTPLKAKSY

SEQ ID NO: 47875 - DNA, 1272 bp, Unknown
  Obtained from environmental sample
  misc_feature (1)..(1272): n is a, c, g, or t
gtggaacaaatgaggctggatatgcatagcagacaggaaatccttaaagcaaattttaaggactatcaaaaggcatctaagaaagggcgcaaggaattgttggacaggcttgtgccggtaaccggcttgaaccggagctatcttgcgacggcgcttggcaactatggcaagaaaggggatttagaaaagccgccggcaaaagacaagaggaaaccttgccctgcggggaaacgcgggggacgccctgtcaaatacggggaagagttcgtaaaggttcttgccgcgatttggggcgattacgggaaaccctgcgggaagctcttggttccgacggttcgcggcatgataggttttctggaaggatctggaaaccccgattacggaataactttggaaaccaggaaactgcttttggaagtgagcgctgcggaagcggacatactgcttaagcctgcgcggaaggcgcttgaaatcaagggcgtaagcacgacgcgggccgttcaaacgcctttgagaagccaaattcccgtgcgcacgcactttgaccgggacacggttaagcccggaaacttcgcatttgacacggttgcgcactgcggaggctctgcgggcgggcagttttgcaaaaccttgacaggaacggacgcctattccgggtggtatgaagggcgcgccctgctaaacgcggctaactgctgggtgaaggccgccatttccgacatggatgccgcccttcctttcccgatgacaggcgcccattacgacaacggcatggaattcataaacgaaccgctgcttgcttggtgcattgaccggcacatccaggccactcgaaccaggccgtaccacaaaaacgacaactgctacgcggaacagaaaaactacgatgcggtcaggaaaaccgtcgggtactttcgcttcgacaccgccgaagagtgcgcggccttggccgaagtgtacatctggctttgccctttgtataactactggatgccttcgtttcgcctaacggacaaggaaaaacaggaggacggccgctataagaaggtctacgaaaaacagcctaaaacgccgtatgaacggcttatggaatcgcctgacgtatcgttggaatgtaaaacggaactggaacgcaggagggccgggcaaaaccctgttgagctgaactggaaattgaatgaggctgtcaggctgctcttgaaaataaaccgcgaaaaattgtaccttggaaaaacctcctgtcaggaggatgatcgggcacccgctgcctga

SEQ ID NO: 47876 - protein, 423 aa, Unknown
  Obtained from environmental sample
  DOMAIN (183)...(363): Integrase core domain
  misc_feature (1)..(423): Xaa is any amino acid
MEQMRLDMHSRQEILKANFKDYQKASKKGRKELLDRLVPVTGLNRSYLATALGNYGKKGDLEKPPAKDKRKPCPAGKRGGRPVKYGEEFVKVLAAIWGDYGKPCGKLLVPTVRGMIGFLEGSGNPDYGITLETRKLLLEVSAAEADILLKPARKALEIKGVSTTRAVQTPLRSQIPVRTHFDRDTVKPGNFAFDTVAHCGGSAGGQFCKTLTGTDAYSGWYEGRALLNAANCWVKAAISDMDAALPFPMTGAHYDNGMEFINEPLLAWCIDRHIQATRTRPYHKNDNCYAEQKNYDAVRKTVGYFRFDTAEECAALAEVYIWLCPLYNYWMPSFRLTDKEKQEDGRYKKVYEKQPKTPYERLMESPDVSLECKTELERRRAGQNPVELNWKLNEAVRLLLKINREKLYLGKTSCQEDDRAPAA

SEQ ID NO: 47877 - DNA, 618 bp, Unknown
  Obtained from environmental sample
  misc_feature (1)..(618): n is a, c, g, or t
atgcagaagcggcttgaagcaacgattaaagaataccttattccccacgaaggcgtaacggtcagttatttgggagaagccgctgagattcaacgctactacgggcgttacgttctgatagtaattaccgcaatcttccttgttttcagcgtcatggccagtcagtttgaatcttttgttgacccattcattattttctttacgattcctatgctttttatcggtgtcatctggatatacaaattctcaggcgaaccgatgtccatgttctcgatagtcggagtcattgcccttgtgggagttgtggtaaacaacggcatcattctggtggattataccaacaccctgagatcgcgaggtcttacggtgcgggaagcctgccttgaagcgggccgcagccgcctgcgccccattttgatgaccagcctgaccactatcctgggaatgttccctatcgcttttctcaccggcgccggagcggaatccattcagccaatcggcaagacctttgtcggcggtcttacggtaagtaccttgatgactctttttgttatccccgcagtgtattcgctcgtgaatagccggtacgacaggaaaagagccaggttggcagcatag

SEQ ID NO: 47878 - protein, 205 aa, Unknown
  Obtained from environmental sample
  misc_feature (1)..(205): Xaa is any amino acid
MQKRLEATIKEYLIPHEGVTVSYLGEAAEIQRYYGRYVLIVITAIFLVFSVMASQFESFVDPFIIFFTIPMLFIGVIWIYKFSGEPMSMFSIVGVIALVGVVVNNGIILVDYTNTLRSRGLTVREACLEAGRSRLRPILMTSLTTILGMFPIAFLTGAGAESIQPIGKTFVGGLTVSTLMTLFVIPAVYSLVNSRYDRKRARLAA

SEQ ID NO: 47879 - DNA, 1002 bp, Unknown
  Obtained from environmental sample
  misc_feature (1)..(1002): n is a, c, g, or t
ttgaccaaaaatacagaaaccgagctgaataccgcggaccctctggttttgtcaaggcttattgactttgccaggcgcgtctatacagccgaacaatacgcgctttttatctggggccacggaacggggtggcgaggcggcgcaaacaataattttttgccggagccggttaaggccgtagcgtttgatgacacgcaaaatcagtatatgtcattgccggcatttggaagggcagtagcaggtaaagatctttcggtaattgcttttgatacctgttacggagctttgttggaagtcgcgtatcagattagaaatgacgctaagcttttagtgggctctgaaggagagatattgtcgacaggctgggattatacggctttgttcaccggttttataggcaggcatggcttttcaatttccgatcttggcaatgctattcaggatcaatttagcacgcattacgcttcgaccaataatgcgacaatatcgcaaatacaattgccgcatattaataacctcttcaataaatttaatgatttttccggagcggtcgcggaagcgatacttaccgatcaggccagaaacgcggttttaaatcaaatacttcggaatgtggaaagctattattccacttctttcccctcagacatgtacattgatatttttgattttacagaaaaaatatcatcaataagggggagtattacttcagtttcggatcggcagaaggcaatttcagatacagccgttatactgaaggaagctttagccctgacagttccttcctcatgggcaaaaaacggaacaagcagaaagatgggggtacatgttattccgttgcagggtactgcggttcctgtcgcaaagcatgaatcagcatatatcagggggagtatgggcatagacaaaagtgcttttgttgaagactcactgcattgggtacctaacgctgttccaaaaaacgatagtttgcttgataaattgttctactgggtctattga

SEQ ID NO: 47880 - protein, 333 aa, Unknown
  Obtained from environmental sample
  DOMAIN (1)...(313): Clostripain family
  misc_feature (1)..(333): Xaa is any amino acid
MTKNTETELNTADPLVLSRLIDFARRVYTAEQYALFIWGHGTGWRGGANNNFLPEPVKAVAFDDTQNQYMSLPAFGRAVAGKDLSVIAFDTCYGALLEVAYQIRNDAKLLVGSEGEILSTGWDYTALFTGFIGRHGFSISDLGNAIQDQFSTHYASTNNATISQIQLPHINNLFNKFNDFSGAVAEAILTDQARNAVLNQILRNVESYYSTSFPSDMYIDIFDFTEKISSIRGSITSVSDRQKAISDTAVILKEALALTVPSSWAKNGTSRKMGVHVIPLQGTAVPVAKHESAYIRGSMGIDKSAFVEDSLHWVPNAVPKNDSLLDKLFYWVY

SEQ ID NO: 47881 - DNA, 330 bp, Unknown
  Obtained from environmental sample
  misc_feature (1)..(330): n is a, c, g, or t
atgaggaggactaatatgaagaaggaaaaaatcacatttgacaactggaatcttgcggacgatattgaaactaaagaagacgttattgggacgttggaagcggttatagaacttgccgtgcaggagaacgaccctgaatatttgctcaaagccattggagatatagcccgctctaaaggcatggcgcaaattgcaaaagaattgaatcttgaccgagcaagcctgtataaatccctttcccctgccggtaatccgtctttttttacagttgtaaaggtactgtataatcttggatacagaataaatatccaacataaacaggcttcataa

SEQ ID NO: 47882 - protein, 109 aa, Unknown
  Obtained from environmental sample
  misc_feature (1)..(109): Xaa is any amino acid
MRRTNMKKEKITFDNWNLADDIETKEDVIGTLEAVIELAVQENDPEYLLKAIGDIARSKGMAQIAKELNLDRASLYKSLSPAGNPSFFTVVKVLYNLGYRINIQHKQAS

SEQ ID NO: 47883 - DNA, 537 bp, Unknown
  Obtained from environmental sample
  misc_feature (1)..(537): n is a, c, g, or t
gtgttctgtaacaaactaagcatggcgaaaggattaagccctgtttacagtatatcaggaagtaccgatccggcagtctggggaactgtaccaacggacaataacaactcgacatgggatgcggtattaatggataagagtaaaagcgggtatcgcttgccgacagaagcggagtgggagtatgcgtgccgcgccgggacaattacggcgtacaacactggggatacgattagcgacaatacagggtggtattatgataacagcaatgggataacacatcatgtggggttaaagaatggtaataactggggattgtatgacatgcatgggaatgtttgggaatggtgttgggactggtatgggagttattcgacaggctcccagacaaatcccactggaccggttataggcactgaccgggtggtacgcggcggcggttggttatacatcggtctctgcatgcgttccgcgtatcggagcaaatactacccgtacgaccggggcaacaacctcggcttccggctggtgcgcccctga

SEQ ID NO: 47884 - protein, 178 aa, Unknown
  Obtained from environmental sample
  DOMAIN (8)...(177): Domain of unknown function (DUF323)
  misc_feature (1)..(178): Xaa is any amino acid
MFCNKLSMAKGLSPVYSISGSTDPAVWGTVPTDNNNSTWDAVLMDKSKSGYRLPTEAEWEYACRAGTITAYNTGDTISDNTGWYYDNSNGITHHVGLKNGNNWGLYDMHGNVWEWCWDWYGSYSTGSQTNPTGPVIGTDRVVRGGGWLYIGLCMRSAYRSKYYPYDRGNNLGFRLVRP

SEQ ID NO: 47885 - DNA, 453 bp, Unknown
  Obtained from environmental sample
  misc_feature (1)..(453): n is a, c, g, or t
gtgataatatatcccgatacttgtatctatggacgactgtttgatgaccagtttgaccctgatatcgccgcagacacgattgacattttattggttatcgccttatgtaaggccaacaaatacccgattgtaggaagtctggcggtaatatttgaacataataaaatccgcaaccttgtacggcgggacgctatagacgagcaatacaaaagaactatcgaccgcagcgtaactataaccgcaaacgtcgggacgcgcgcgcaggtactgcaagccgaaggcgtgaaactcatggatagttaccacctcgcggcggcagaaacggcgggggcggatgtactgctaaccgtagacaaggattttataaaaattgtcgcgaagaaaaatctaagcgctgtaaaggtaataaatccactaacgtttttgagggaggtatacctatgggcacagtaa

SEQ ID NO: 47886 - protein, 150 aa, Unknown
  Obtained from environmental sample
  misc_feature (1)..(150): Xaa is any amino acid
MIIYPDTCIYGRLFDDQFDPDIAADTIDILLVIALCKANKYPIVGSLAVIFEHNKIRNLVRRDAIDEQYKRTIDRSVTITANVGTRAQVLQAEGVKLMDSYHLAAAETAGADVLLTVDKDFIKIVAKKNLSAVKVINPLTFLREVYLWAQ

SEQ ID NO: 47887 - DNA, 870 bp, Unknown
  Obtained from environmental sample
  misc_feature (1)..(870): n is a, c, g, or t
atggaatttttcgatgaggatgtaaccgctaaactgaaaagctgcgagacccgcacccgcgcgtcccttacgcaatttaaccgctggaaattcaacctttttgccgcttacggcgcgacgcgggtcaacgacagcagtttggcgtttgattatcacggcaaacgctacatcccgtcatgggaaaacgccaaggccggcggttgcgcgttccttgaatcgaattcgccgatatacacagacctgcgcgacgccgcgaaaaagcttgacgtgagcgtgagcaatatccgctttaaccactcggcgctcccattggcggaacaaaccgctttcttccaattaggcgacatctccggcgcggtttctattgacaaactgacctacacctacggcaaggagggcgaaaaagaggaacaccttctaatcagcatagtcactgaccgcggcgctgaaattgacgagagattgttcgagcgtatgatggaaacacccgccacggtaatcggtacggcgacaccggacagccgcttagacaagatgaaggcaaaattgctggccgacaaacgcgccgagatagatgacgcgaacaagacaagcttggtacaacgcctcggagagttggatgcctggcgcaacgactgcgaagaggcgctgatccgtgaaatagacggcctgcggaacgacatcaagcaaaaacaggggcagatgaccgccaacatcgcgtcgctctcattccagcagatcgtcgatttgcaggaagagataaacaaactcaacgagaccatcgtccaaaaacagcgccaaatgctgaaaagcaggacgacgtcaagaaagacgcgcaggggttgcagcgggaggctatcaggcagttga

SEQ ID NO: 47888 - protein, 289 aa, Unknown
  Obtained from environmental sample
  misc_feature (1)..(289): Xaa is any amino acid
MEFFDEDVTAKLKSCETRTRASLTQFNRWKFNLFAAYGATRVNDSSLAFDYHGKRYIPSWENAKAGGCAFLESNSPIYTDLRDAAKKLDVSVSNIRFNHSALPLAEQTAFFQLGDISGAVSIDKLTYTYGKEGEKEEHLLISIVTDRGAEIDERLFERMMETPATVIGTATPDSRLDKMKAKLLADKRAEIDDANKTSLVQRLGELDAWRNDCEEALIREIDGLRNDIKQKQGQMTANIASLSFQQIVDLQEEINKLNETIVQKQRQMLKSRTTSRKTRRGCSGRLSGS

SEQ ID NO: 47889 - DNA, 1251 bp, Unknown
  Obtained from environmental sample
  misc_feature (1)..(1251): n is a, c, g, or t
ttgatggcgagtgcctgtaacaggttcttcgatttggccgagggcaagttcaccaccctggggctgagcaacgataaaagtgctgccttggcctgcatggaaaacgagctgacaccgatcaccacagaaacgatgaaggccattgccaacctcaaagcgtcgctggaaacgatgtgcaaagagctgtacgacaacaacaacaccacccagcacagcatcaacacgatgcagacaataataatgatcattgctttcattatttctgtctttttcggcaacttcatcgccaacatgatagtcaaagaagtcagagcccttgacgttatgatagccagggtggccaacggcgaccttaccgtcgaggccagctcccacaccaaggatgagctgggccagatgcaggaaagcatgaccgacatggttaggggcctcaagaatctcatcaccagcgtcagccgcggcatagatagcgtggccagcggctcagcccagctatcggcctccgccgaggagatgtcctctacaacagagcagatcgccaagagcgcggacacccagaggactggcgccgagagaatggccgccgccatgaccgagctttccgcctccattgacgaaatggcccgcgagaatcaaagctcccttgggcagctggacgaagcgctacaagccaccgagcacggcaaccaagccggagcctccaccaagaacgcgatggatgacatcacgcagaccactggcaggatcgccgccgccatcggcgtgattcaggaaatagccaaccagaccaacctgctgtcgctcaacgcggccatcgaggccgcaaaggccggcgagcaggggcagggcttcgcggtggtggcagaagaggtcaggaagctggccgagcgcagtgccgcgtccgccaaggagatcgcccagcacaacatagacgccaggaaggccgtcgagcgcggcgaggagatggtcagctcgaccgtggaaatccttggtcagataaaggaaaacctggaccagttcgccgtccgcacgaagaccgcggtggacgccaccatggagcagtccaaggcaggcctggaagtggccaagcaggttgaccagagcgtccacgaggcgacgtccatagcctccgcggcaaccgagctgtccagcaccaccacccaagtggccagcacggcggacgagctctccaagctcgcctccgaactgaagggcaaggtggccatggtcagggttgacttgggggtctag

SEQ ID NO: 47890 - protein, 416 aa, Unknown
  Obtained from environmental sample
  DOMAIN (77)...(146): HAMP domain
  misc_feature (1)..(416): Xaa is any amino acid
MMASACNRFFDLAEGKFTTLGLSNDKSAALACMENELTPITTETMKAIANLKASLETMCKELYDNNNTTQHSINTMQTIIMIIAFIISVFFGNFIANMIVKEVRALDVMIARVANGDLTVEASSHTKDELGQMQESMTDMVRGLKNLITSVSRGIDSVASGSAQLSASAEEMSSTTEQIAKSADTQRTGAERMAAAMTELSASIDEMARENQSSLGQLDEALQATEHGNQAGASTKNAMDDITQTTGRIAAAIGVIQEIANQTNLLSLNAAIEAAKAGEQGQGFAVVAEEVRKLAERSAASAKEIAQHNIDARKAVERGEEMVSSTVEILGQIKENLDQFAVRTKTAVDATMEQSKAGLEVAKQVDQSVHEATSIASAATELSSTTTQVASTADELSKLASELKGKVAMVRVDLGV

SEQ ID NO: 47891 - DNA, 501 bp, Unknown
  Obtained from environmental sample
  misc_feature (1)..(501): n is a, c, g, or t
ttgggtggtggtgctggacagctcggttgccgcggaggctatggacgtcgcctcgtggacgctctggtcaacctgcttggccacttccaggcctgccttggactgctccatggtggcgtccaccgcggtcttcgtgcggacggcgaactggtccaggttttcctttatctgaccaaggatttccacggtcgagctgaccatctcctcgccgcgctcgacggccttcctggcgtctatgttgtgctgggcgatctccttggcggacgcggcactgcgctcggccagcttcctgacctcttctgccaccaccgcgaagccctgcccctgctcgccggcctttgcggcctcgatggccgcgttgagcgacagcaggttggtctggttggctatttcctgaatcacgccgatggcggcggcgatcctgccagtggtctgcgtgatgtcatccatcgcgttcttggtggaggctccggcttggttgccgtgctcggtggcttgtag

SEQ ID NO: 47892 - protein, 166 aa, Unknown
  Obtained from environmental sample
  misc_feature (1)..(166): Xaa is any amino acid
MGGGAGQLGCRGGYGRRLVDALVNLLGHFQACLGLLHGGVHRGLRADGELVQVFLYLTKDFHGRADHLLAALDGLPGVYVVLGDLLGGRGTALGQLPDLFCHHREALPLLAGLCGLDGRVERQQVGLVGYFLNHADGGGDPASGLRDVIHRVLGGGSGLVAVLGGL

SEQ ID NO: 47893 - DNA, 900 bp, Unknown
  Obtained from environmental sample
  misc_feature (1)..(900): n is a, c, g, or t
atgaaaagacgcttaccgataggcatacaggattttgcaaaaatccgcgaaggtggttacaactatgttgataagtccacccggattcaccgcctgataaccggttccggcggcgcttttttcctatcccggccccggcgttttggcaagtcgctgttgtgttcaaccctgggggcggtttttgaaggcaggcgggaactgtttggcgggatagcgggacagcccgctcttgcgattgattccctggaatgggaatggaagaaacatccggtaatccgtcttgatctgaatgccggggtatattcaaacggagtaggggcacttcattcagtattatattctgaattacaaaaagaggctgaaaagaacgggcttgtattggaacatacggatgttattagccaatttaagtatttaataagaaatgcatgcaataaaacaggtgaaaaaactgttgtaatcattgatgaatatgataagcccatgttgagcactatggacgattcggctcttcatgccagaatgagggatgaattaaagggattttacggcgtactaaaatcgtctgatgaatatctacagtttgtgcttttaaccggagtaacaaagttttcgcatatcagcattttttccgatctgaaccaccttgttgatttgacgcttgacccgcgctatgcggacatctgcggcataactcaggaagaggcggaacagaatttcgggccggaaatagaggcggttctggaaaacaccggcaagaaccgggaaatctatcttgatgaattacgccggtattacaacggctacaggttttcagagaaacttcttacagtgtataatccctttggtctgcttaatcattttgataaaagcggtanaatttctgccttactggtttga

SEQ ID NO: 47894 - protein, 299 aa, Unknown
  Obtained from environmental sample
  DOMAIN (1)...(299): Protein of unknown function (DUF1703)
  misc_feature (1)..(299): Xaa is any amino acid
MKRRLPIGIQDFAKIREGGYNYVDKSTRIHRLITGSGGAFFLSRPRRFGKSLLCSTLGAVFEGRRELFGGIAGQPALAIDSLEWEWKKHPVIRLDLNAGVYSNGVGALHSVLYSELQKEAEKNGLVLEHTDVISQFKYLIRNACNKTGEKTVVIIDEYDKPMLSTMDDSALHARMRDELKGFYGVLKSSDEYLQFVLLTGVTKFSHISIFSDLNHLVDLTLDPRYADICGITQEEAEQNFGPEIEAVLENTGKNREIYLDELRRYYNGYRFSEKLLTVYNPFGLLNHFDKSGXISALLV

SEQ ID NO: 47895 - DNA, 318 bp, Unknown
  Obtained from environmental sample
  misc_feature (1)..(318): n is a, c, g, or t
gtgcttaacggcgggggccatattgagcgtgaatatgcggcaggacgcggacgtatggatttattcattgaatacaacaacaaattttatattattgaaataaaattgatacatgaaaaacagtcacccgataccgttaagataaaagggttggagcaaaccgccaaataccgtgaaacaaaagcgccggatagccccgcttaccttgttatttttgacaggcgtgattccgcgaaaagcctgtcgtgggatgaaagaatttattggcgggaagaaaccgaagcttcggggaaaacaatcaatgttttggggctatag

SEQ ID NO: 47896 - protein, 105 aa, Unknown
  Obtained from environmental sample
  misc_feature (1)..(105): Xaa is any amino acid
MLNGGGHIEREYAAGRGRMDLFIEYNNKFYIIEIKLIHEKQSPDTVKIKGLEQTAKYRETKAPDSPAYLVIFDRRDSAKSLSWDERIYWREETEASGKTINVLGL

SEQ ID NO: 47897 - DNA, 354 bp, Unknown
  Obtained from environmental sample
  misc_feature (1)..(354): n is a, c, g, or t
atggatgatatagaattattattaaaacagatttcacttggtgaagacagtattcttgaattaaagaatattgaatatgcaaataacaccgtatccggaccaaacaggaattcggcggctgatgaaatggccgcgatggcaaattcacacggaggggtaatcgttcttggagttgatgataaatctcacaaaataacaggtctgccatttgataaattggatattacggaaacatgggtacgcaatattgccaatgatcttataaagccgccgttggaatgcaggattaagaaactgtccgtggtttcaggaagtcaatccggttctcataaggaagaaagaattaatttatag

SEQ ID NO: 47898 - protein, 117 aa, Unknown
  Obtained from environmental sample
  DOMAIN (46)...(115): Divergent AAA domain
  misc_feature (1)..(117): Xaa is any amino acid
MDDIELLLKQISLGEDSILELKNIEYANNTVSGPNRNSAADEMAAMANSHGGVIVLGVDDKSHKITGLPFDKLDITETWVRNIANDLIKPPLECRIKKLSVVSGSQSGSHKEERINL

SEQ ID NO: 47899 - DNA, 492 bp, Unknown
  Obtained from environmental sample
  misc_feature (1)..(492): n is a, c, g, or t
atgtttgtaggaaatgatattggcggaaatagttatagaagtaaacctgaggatttaaatgggaccatccctgagctttttaaacagggtatgatgtatgtaaaaagtagtattaaatatcttcaaaatgggcagggttttaattctattggcgtacctgaagtttcaataattgcactggaagaagttttacaaaatgcccttattcatcgcgattattttaagaacgcccctatacgcctgttgatttttgataatagaattgaaataattagtcccggaaggctgccaaacagtttaacggttgaagaaataaaatacggtaatcctgttatcaggaataatcagttagccatgtttgccagccggactatgccctacagcggattaggctcaggtttacgcagagcttatgccgaacagccggatatggagctgataaatgatgtcgagggcgaacagtttattgttaagtttccgcgtgtttgctga

SEQ ID NO: 47900 - protein, 163 aa, Unknown
  Obtained from environmental sample
  misc_feature (1)..(163): Xaa is any amino acid
MFVGNDIGGNSYRSKPEDLNGTIPELFKQGMMYVKSSIKYLQNGQGFNSIGVPEVSIIALEEVLQNALIHRDYFKNAPIRLLIFDNRIEIISPGRLPNSLTVEEIKYGNPVIRNNQLAMFASRTMPYSGLGSGLRRAYAEQPDMELINDVEGEQFIVKFPRVC

SEQ ID NO: 47901 - DNA, 534 bp, Unknown
  Obtained from environmental sample
  misc_feature (1)..(534): n is a, c, g, or t
gtgtnggaatcgggcatagaaattttcgcccagccgcccggaaaaaaactggaacacctaagcntgctctcaggcggcgaatgttcaatgacagcggtagcccttttattcgccacatacatggtaaagccaagccccttctgtctcttggacgaaattgacgccgcccttgacgaacaaaacgtcgggcgctttgttcaccttcttaacgagttcagcgactcaagtcaattcatcataatcacacacaacaaaaaaacaacatccggcgcgggaacgctcatcggcgtaaccatgcaagagtccggcgtaacaaaagtaatttcagctaggtttaagcaaggcgaacttgacgtagcggactcaccgccgccgcaaaccgagttatgggatgccgacggcaagtttgaagaagaagacgtagcgcccgaagcgggaagagagctgcccgtcggcgttaatgacccgaagaaagtaacggacgcgcagttaagaccgattaggtcgcgcacgacgaatgagacgaatcaataa

SEQ ID NO: 47902 - protein, 177 aa, Unknown
  Obtained from environmental sample
  DOMAIN (4)...(106): RecF/RecN/SMC N terminal domain
  misc_feature (1)..(177): Xaa is any amino acid
MXESGIEIFAQPPGKKLEHLSXLSGGECSMTAVALLFATYMVKPSPFCLLDEIDAALDEQNVGRFVHLLNEFSDSSQFIIITHNKKTTSGAGTLIGVTMQESGVTKVISARFKQGELDVADSPPPQTELWDADGKFEEEDVAPEAGRELPVGVNDPKKVTDAQLRPIRSRTTNETNQ

SEQ ID NO: 47903 - DNA, 1824 bp, Unknown
  Obtained from environmental sample
  misc_feature (1)..(1824): n is a, c, g, or t
atggaagcggaaaaccaggctctggaagcgcacatggacgaagtaaactccatggaagcgcggcttgtggagcttcaaaaaaatatttacggtcttgcgctggagaaaaacgcaagggaaaacgaagtgcgcctgtttaacgaacagcgcggtgaaaataaaattaaaatcggacaaaacgaagaacgcgaaaaacaggctgttcaaaaaataacggaattaaacgcggacgccgccggtcaggacgccgttgtacaggacttaagaaaacaatgcaaaaacatagaagaaaatatccgctcctttgaagaaaacatccagcttgccgcagggcgcatcagcgaaaacgacaaggaatcgcacagggcggaaagcgagattcacggcatagaaaaagaacttgccgccctggaaaaagaacttgccataataacagacgacattgtggcggaactggacgccggtcttaaaaaagccggctactctgccacagaacgcaaaaacgcggaagaagctttacgcgaaacgcttgtccgcctgaacacgctcctctccggcagagaagcgttaatcggcgaccttgccgccgccgcaaatgcgaccggcggcgttgacgcggcggaaataaaacgcattaccgatattctgctaaaaagccttgcggaagccgccgccggagcgaataaagccatcgaactttttaacagttaccgcgaacattcgccaacctttatagatgaattcctggctcctcagggaatcataacaaaaaaacgcgcattggacgcgcagatcagaaccgcaaaagacggcattgaagaaaggcggcaacgtattaaaaaactgcacgaagataatatcagtcttttggcgaaaattgacgaataccgcgcaactcttgagaacatgaaaataaaccgcgcccacatgaacgcccaagcacagtcctcggaagatcaggcgcgtcttataaggcgcgaattgtccggtcaggaaggactccttaaaaatatccgcgacgaactttccctgtaccgaaaaagactggaagaaactaacgcgcgtattacagggattcaaactgaaatagcgggcatcgaagaaaggactaaagcatattcttccgaattggaaaaattggaaaatgatatccgcaaaagaaacgataatgtcgccagtaaaaaagaaacaatcaataagcggatggctgaactttccaaagtgcaggaagcgctggaaaaaattcatgtggaacttgcccagtccgaaatggaaataaaaaacactcaggaaaatttcagggagacgcattccagggacttaatggagtttgaagagcgcatttttaacattacaacacagcccgcagtccttcgcgaaaaacttgccgccgcccgcgcaaagtcaaaagagctcggttccgtaaaccttatggccccggaagaatacgccgaaacaaaacaacgctacgattttcttaacaatcaaatggcggatcttcaaaaagcgcgtaaagaccttgaagacctaacggcggaaatacgccaggaaacttcgcaattattcattgacacttacaaccgcataaagaaaaattttcacacatgtttccgcggtctcttgggcgcggcagagcggaactgcgctctccgacccgaaccacgtgtnggaatcgggcatagaaattttcgcccagccgcccggaaaaaaactggaacacctaagcntgctctcaggcggcgaatgttcaatgacagcggtagcccttttattcgccacatacatggtaaagccaagccccttctgtctcttggacgaaattga

SEQ ID NO: 47904 - protein, 607 aa, Unknown
  Obtained from environmental sample
  misc_feature (1)..(607): Xaa is any amino acid
MEAENQALEAHMDEVNSMEARLVELQKNIYGLALEKNARENEVRLFNEQRGENKIKIGQNEEREKQAVQKITELNADAAGQDAVVQDLRKQCKNIEENIRSFEENIQLAAGRISENDKESHRAESEIHGIEKELAALEKELAIITDDIVAELDAGLKKAGYSATERKNAEEALRETLVRLNTLLSGREALIGDLAAAANATGGVDAAEIKRITDILLKSLAEAAAGANKAIELFNSYREHSPTFIDEFLAPQGIITKKRALDAQIRTAKDGIEERRQRIKKLHEDNISLLAKIDEYRATLENMKINRAHMNAQAQSSEDQARLIRRELSGQEGLLKNIRDELSLYRKRLEETNARITGIQTEIAGIEERTKAYSSELEKLENDIRKRNDNVASKKETINKRMAELSKVQEALEKIHVELAQSEMEIKNTQENFRETHSRDLMEFEERIFNITTQPAVLREKLAAARAKSKELGSVNLMAPEEYAETKQRYDFLNNQMADLQKARKDLEDLTAEIRQETSQLFIDTYNRIKKNFHTCFRGLLGAAERNCALRPEPRVGIGHRNFRPAARKKTGTPKXALRRRMFNDSGSPFIRHIHGKAKPLLSLGRN

SEQ ID NO: 47905 - DNA, 861 bp, Unknown
  Obtained from environmental sample
  misc_feature (1)..(861): n is a, c, g, or t
atgacagattcggccgagcaccgcgaactcatagcgcagggagccaatattattatttcaacaagctggggttacatggaaacctgcgaacaactggcgaaagaatttccgtccgtaatattcgccatccaggggaataaatacaatgacactaaccttactaactactcaggaaaaacttatcaggcgcgttatctttcaggtattgcggcgggcatgaagacaaaaaccaataaaatcggttttgtatcggcatggggaacggataacagcaatgtaaccggaggaataaacgccttcgctcttggagtagaaaaggtaaatcccaaggcgagaatttacgtcaaagttacctatagctggtttgatcctatgggggaggcgtttgcaagccgcgccctcatcgccgaaggctgtgatgttatcgcgcatcacaccgacacacccatacccatgaaagaagccgaaaaagccggagtatggggaataggatacagtaacgatatgagcgcagacgcccccaatgctgtcattacttctgtaatatggcgctggagcgcgtattatatctttctggtacaaagcgtaataaacggtacgtttaccaccgccccctggtacggctcactgaaagacaaagtaattgatcttgctcccttcaataaaaatatccctgtgaacccggatactatccaaataattgacgaagaacggcagcgaattgaatcaggcgcgtttaacgtattcagcggagtaatggagaccaatgacggcaaaagtataggcagggaaggcgaaaaccttaccgatgatgaaatccgtaatggaatgaactggtattaccgaacggtgataagatga

SEQ ID NO: 47906 - protein, 286 aa, Unknown
  Obtained from environmental sample
  DOMAIN (2)...(256): Basic membrane protein
  misc_feature (1)..(286): Xaa is any amino acid
MTDSAEHRELIAQGANIIISTSWGYMETCEQLAKEFPSVIFAIQGNKYNDTNLTNYSGKTYQARYLSGIAAGMKTKTNKIGFVSAWGTDNSNVTGGINAFALGVEKVNPKARIYVKVTYSWFDPMGEAFASRALIAEGCDVIAHHTDTPIPMKEAEKAGVWGIGYSNDMSADAPNAVITSVIWRWSAYYIFLVQSVINGTFTTAPWYGSLKDKVIDLAPFNKNIPVNPDTIQIIDEERQRIESGAFNVFSGVMETNDGKSIGREGENLTDDEIRNGMNWYYRTVIR

SEQ ID NO: 47907 - DNA, 714 bp, Unknown
  Obtained from environmental sample
  misc_feature (1)..(714): n is a, c, g, or t
ttgctatgcctagaagaaagccttctgttaataattggaaaacagttatggaagcaattttcgatgtattcgaagaaaaataaaaattctattttaacttataaaatgcccacactcaaactcaccgccgccctagcctgcacactcctctgccttgttgcttgcgagcagcaaaaagaaacattcacagaccctcgcgataaaaaaacatacaagacagtgaaaatcggcgagcaggtctggatggcggagaacctgaattatgaagcatatagctcaaaatgttacgacaacaaacctactaactgcgacaagtacggcaagttgtataattgggcaacggctatgaaggcttgtccaaatggctggcatttgccgagcgataaagattggaatgttttgatgaagttcgtcaatccgaattgttctgacaatagcgattgtgctggtgctggaactaagttgaaggctgcgagcggttggaaagacaatggcaacggcacggacgagttcgggtttgcggctctgccgggcggctacggcaattcaggtggccttttcagcactgtcggtaacgtcggcttctggtggagtgcctcggagaccgatgctggcagcgcctacagccggtacacgagctacggcagcgagtacgcccgctggtacggcagcagtaagagctacttgcatagtgttcgttgcctccaggactag

SEQ ID NO: 47908 - protein, 237 aa, Unknown
  Obtained from environmental sample
  misc_feature (1)..(237): Xaa is any amino acid
MLCLEESLLLIIGKQLWKQFSMYSKKNKNSILTYKMPTLKLTAALACTLLCLVACEQQKETFTDPRDKKTYKTVKIGEQVWMAENLNYEAYSSKCYDNKPTNCDKYGKLYNWATAMKACPNGWHLPSDKDWNVLMKFVNPNCSDNSDCAGAGTKLKAASGWKDNGNGTDEFGFAALPGGYGNSGGLFSTVGNVGFWWSASETDAGSAYSRYTSYGSEYARWYGSSKSYLHSVRCLQD

SEQ ID NO: 47909 - DNA, 807 bp, Unknown
  Obtained from environmental sample
  misc_feature (1)..(807): n is a, c, g, or t
atgggcagcgcatggatgctaaactgcctatgttctttggagtcagctatgaacaccagccacactgcgcttttcgcaatactctttgcagcaatgatgccaatagtggcgcagcagaaggcacagcaaccaaagcagccgtcagctacccagctttccagcgccaacgccgaaatcgcttcgttgagaaagcaaataaaggaactcgccgaggagcgggacgccctaaagcaagaattggacgatgtccccctcatcatgaggcaagagcacgccgagctgttacgccaaattgacgagatcactgcccaaagggatgaagcctcggccaaagcggggcggttggaagccatgctaaaagaaaaccagtctggaggcgattctctgctgaaggagcttcgccaggccagagaagacctcagggacagcaacgataaagtggaaacgctcgaaaaagaaatggaatcacttcaaaccagcttggacgatgcgacaaaaattagagagggcgcattggtgcacatcgggcctgacatcattccggcaaggtgcctaaatttaaggcggatgacgccctcggtcaaaaaagcgtcgggggcgatcgtcgtgaattgcctgatcaatgagctgggcgacacaatagacgtccgtttgattcagcggctgccaggcgaagagacggaatggatgagaaaggcgcatgaagagtgcttggaggcggcaaagcacttggtattcgagcctgcgaccaccaaagacggcatccgactgaaggtctggcagggcgtagccttctacctcaagtag

SEQ ID NO: 47910 - protein, 268 aa, Unknown
  Obtained from environmental sample
  misc_feature (1)..(268): Xaa is any amino acid
MGSAWMLNCLCSLESAMNTSHTALFAILFAAMMPIVAQQKAQQPKQPSATQLSSANAEIASLRKQIKELAEERDALKQELDDVPLIMRQEHAELLRQIDEITAQRDEASAKAGRLEAMLKENQSGGDSLLKELRQAREDLRDSNDKVETLEKEMESLQTSLDDATKIREGALVHIGPDIIPARCLNLRRMTPSVKKASGAIVVNCLINELGDTIDVRLIQRLPGEETEWMRKAHEECLEAAKHLVFEPATTKDGIRLKVWQGVAFYLK

SEQ ID NO: 47911 - DNA, 963 bp, Unknown
  Obtained from environmental sample
  misc_feature (1)..(963): n is a, c, g, or t
ttgatcagatcggccgagctcacgagcggcagcgcgtttttcatgaccaaggtcttcgtggtgatatttatggtattttacagcatcggcgagcacgtcataatgccggtgcgggccactatcgccatggatttggccaaaccggagaagtccggcgcttctttggggataacgggttccatcagccagctcggcaacatcgcgggcttcatccttgtggccgtgatcttctctctgctcggcaaacgcggtttcgataggacggacgttatgggctaccgcatagtcttcggcgcggcgacggccctgatggtaacggcggcccttgtagccgtggcgctgcgggagaccacgctcaagtcgcagaggcggcgtttttacttcgccaaaaaattcaaaaagttctatatgctggaggtcttttacggggcgcggaagcagatatttctcactttcgccccatacgtgctgataatccaatacggggccgacgcctcgatcatatcgcagctctacgcggtttgcgccgtcttcggaatgctcttcagcccgttaatcggcaggatcatagacaaggttggctacaaggccgttatggtggcggacacgcttattctcattgtggtgtgcttattttacggattcgcgcatcgaatgttcgcgatgaacgtcgcctttatcgtcgtctgttgcaacttcgtgctcgactcgatcatctcaatagctagcatggcgagcaacgtgtacgttcagcgcattgcgtcgaaccaggaagaggttaccgccacgctctcaaccggcatttcggtgaatcacgtcataagcatattaatagccttaatgggcggatggatttggaaggtgacgggcatagaagtactcttcacgctctccgcgatcttcgggcttgccaatagtctctacgcggcgactattaagaaagaggaggagcatagtcgttaa

SEQ ID NO: 47912 - protein, 320 aa, Unknown
  Obtained from environmental sample
  misc_feature (1)..(320): Xaa is any amino acid
MIRSAELTSGSAFFMTKVFVVIFMVFYSIGEHVIMPVRATIAMDLAKPEKSGASLGITGSISQLGNIAGFILVAVIFSLLGKRGFDRTDVMGYRIVFGAATALMVTAALVAVALRETTLKSQRRRFYFAKKFKKFYMLEVFYGARKQIFLTFAPYVLIIQYGADASIISQLYAVCAVFGMLFSPLIGRIIDKVGYKAVMVADTLILIVVCLFYGFAHRMFAMNVAFIVVCCNFVLDSIISIASMASNVYVQRIASNQEEVTATLSTGISVNHVISILIALMGGWIWKVTGIEVLFTLSAIFGLANSLYAATIKKEEEHSR

SEQ ID NO: 47913 - DNA, 825 bp, Unknown
  Obtained from environmental sample
  misc_feature (1)..(825): n is a, c, g, or t
atgaccattatcattattacggcgatttttgccctggttctcgcctttgtcatcggaaccgctttaggctttttccgggatttttttgccgtaccgcgtgatccgttagccgacgctatccgcgaggcgctgcccggcgcgaactgcggcgcctgcggccttcccggctgtgataactatgccgcggctattgccgccggaaaagccggcattagttcctgtacggtcggcggttccgccgtagcggagaaacttgccaaaataaccggtcaggttggcgaaaccgtacaacagaccgtagcggtgcttgcctgccgcggcggttatctgcacgccccgctcaagggaacctacaccggccttaaaacctgccgcggggcaaaacttgccacgggcggcactaaactctgcgcgtggggctgcctgggttttggcgactgtgtaccggtgtgcaaattcggcgcgctctctctgcacaaggaaaaaggactgccggtaattgattacaacaaatgtaccggctgccgcatgtgtatgaccgaatgtccccagggcttattgagaggcgtttcaaaagatcaaaaaggcgcgataatcctctgcgccaaccgcaatcccaaccggcagggagttattaaaacctgtaaaatcgcctgcatcaaatgcggtcagtgcgttaaaaactgtccccaccagtgcatcgatttaagcgcgaatattcccgttatagacctggcaaaatgcacttcctgcggaacctgcgtggaaaaatgcccaacaaaggttgcgaagattattgagaagcagataacaatgagcagttag

SEQ ID NO: 47914 - protein, 274 aa, Unknown
  Obtained from environmental sample
  SIGNAL (1)...(23)
  DOMAIN (43)...(77): Putative Fe-S cluster
  misc_feature (1)..(274): Xaa is any amino acid
MTIIIITAIFALVLAFVIGTALGFFRDFFAVPRDPLADAIREALPGANCGACGLPGCDNYAAAIAAGKAGISSCTVGGSAVAEKLAKITGQVGETVQQTVAVLACRGGYLHAPLKGTYTGLKTCRGAKLATGGTKLCAWGCLGFGDCVPVCKFGALSLHKEKGLPVIDYNKCTGCRMCMTECPQGLLRGVSKDQKGAIILCANRNPNRQGVIKTCKIACIKCGQCVKNCPHQCIDLSANIPVIDLAKCTSCGTCVEKCPTKVAKIIEKQITMSS

SEQ ID NO: 47915 - DNA, 645 bp, Unknown
  Obtained from environmental sample
  misc_feature (1)..(645): n is a, c, g, or t
atgaacagcgcttaccgccttgaccttttaacccacgggcaggcgcgggagcgccttgccgagcgtccggccgtgatcctgccgctcggcggttgcgagcctttcggcgctatcggcagtatagggatagagacgctctgcgccggacggatagccgacgagttgtccgcccgttgccgcgtcctctgcgccccgcccctgccgttcggctgctccacccccttcatatcattccccggcgccgccggagtcaagccgaggacgatggttaacctgctctgcgagatcatccacgcctacatcctccaaggcgccaagcgcgtatttttggtcaacgccgccccgttcaacaatccgccggcgacagaagccgcgaagagggtcgagacgaaatacaaaggagtaaaagtatcgatttttgacatcaacacgattatcggtattgataataacatagacagagccgacaccgcgctattatctatagcggcatatttagatcaagagcagattaatatatccggtattaataacaatggaagaaaaagcataccccccgatcaataccgaacatggaaaaaactgcggcgccgacccgcaaaaactaagaaaattgtttccagagggattactattgtcagataa

SEQ ID NO: 47916 - protein, 214 aa, Unknown
  Obtained from environmental sample
  misc_feature (1)..(214): Xaa is any amino acid
MNSAYRLDLLTHGQARERLAERPAVILPLGGCEPFGAIGSIGIETLCAGRIADELSARCRVLCAPPLPFGCSTPFISFPGAAGVKPRTMVNLLCEIIHAYILQGAKRVFLVNAAPFNNPPATEAAKRVETKYKGVKVSIFDINTIIGIDNNIDRADTALLSIAAYLDQEQINISGINNNGRKSIPPDQYRTWKKLRRRPAKTKKIVSRGITIVR

SEQ ID NO: 47917 - DNA, 1059 bp, Unknown
  Obtained from environmental sample
  misc_feature (1)..(1059): n is a, c, g, or t
atgcacataaataaaacatacgagaggcaggggaagatagaccttaaccggctttttaccgcccatgactgtacggaaaaaatacgcgccatgcaaaaggatgttgccgccaatatcgaacgattcaaaaaaagcgccggggaagaaaacgaacccgatatggacataggacagtattgttttgagccttacgaatgtgaataccgtacctggtgctggaagcatattcccgaaaacagtatctttgacatatcggggctgcgtaagaataaaaagttcgatctttataaacggggccttataaactgtaaacaactgctggaaagcgcggagaaactcaaaccagcggtgcgcatgcaggccgaagccattgtctataataaacagcccgaaattaacaggaagcctatacgttcctttatcggcgctttaagatggcccctttattttttggactttgagacttttcaggaggcaatcccgccctttgacggactgcgcccctttatgaaggttacttttcaatattcgctccatattcaggaaacgccgggcgcggtgcctgaacacagggaatttctcgcgaaggaaggcgttgatccgcgtgaggagattgcggaacgcctttgcggggatattccgcanaatgtttgcgtacttgcgtataacatggtttttgaaaaaggctgcattaaagaactcgcgcattggcttgaaaaacgaagaaagaatgacatagccgcgcatttaatgaatatacacgataacatcaaagaccttatgaaacctttccagcgccgcgattactacagttccgaactgggcggctcctattcaataaaaaaggtattgcccgccctttgccccgatgatccggaacttgattataataaacttaatcttgtgcataatggcgtcgaagcaaagaccgtttattccgaactgacagagaaaagtcccgaagaacgggagcgtatacggacggcattactcgcctactgccgccttgacacccttgcgatggtaaaaattcttgagaaattgatgaatatccgctga

SEQ ID NO: 47918 - protein, 352 aa, Unknown
  Obtained from environmental sample
  misc_feature (1)..(352): Xaa is any amino acid
MHINKTYERQGKIDLNRLFTAHDCTEKIRAMQKDVAANIERFKKSAGEENEPDMDIGQYCFEPYECEYRTWCWKHIPENSIFDISGLRKNKKFDLYKRGLINCKQLLESAEKLKPAVRMQAEAIVYNKQPEINRKPIRSFIGALRWPLYFLDFETFQEAIPPFDGLRPFMKVTFQYSLHIQETPGAVPEHREFLAKEGVDPREEIAERLCGDIPXNVCVLAYNMVFEKGCIKELAHWLEKRRKNDIAAHLMNIHDNIKDLMKPFQRRDYYSSELGGSYSIKKVLPALCPDDPELDYNKLNLVHNGVEAKTVYSELTEKSPEERERIRTALLAYCRLDTLAMVKILEKLMNIR

SEQ ID NO: 47919 - DNA, 1245 bp, Unknown
  Obtained from environmental sample
  misc_feature (1)..(1245): n is a, c, g, or t
ttggatatgacagggacagcgccgcgcccttttagcaactgggaaaaagaactgagccgttttgccccttcattaaatgtatcccggtatcacggaaaccgccgcgttcttgaccggaaatgcaatgtactgctgaccacttatcaaaccgcggttcgtgacgcggaaaaattgaagaaggaagtcttttccctgctgctggtggacgaagcccatttgatgaaaaacgccgacacccgcctctcccgaacggtgaagcagcttcataccaaataccgccttgccctttcaggcacgccggtagaaaaccgccttgaagaccttcgatccctgtttgattttattttgcccggctatctgggggatgcggcgcaattcaaggaacagtaccgcgtccccattgaagttatgcgtaaccgcgaacaggcggaagcattgcgtaaaattacgtctccgtttctgctgcggcggcttaaaaccgacaaaaaaattatcaaagatttgccggaaaaaatcgttgccaatgaatatgccgtactggaaaatgaacaggcggcgttatacgaaagtgtagtcgccgaatcaatcagaaaatcaaaagaaatcgaccccaaagaacggccatctttgatcctttccatgcttacctcccttaaacaaatatgcgaccatccgcgggtgtttgacaaggaaagccccgcaagttcggcgctttccggcaagtcccaactgcttttgaccctgctggaagaaattctggcaaaccgcgaaaagactctggtgttcagccagtatgtagaaactttggactgtctggaacacatcattaaaaacgagctgggtgaacagccgcttatttaccacggaggcctaagccagggcgcgcgttcggagattatcaaccgctttcagaacgaaagcgccgcaaggatactgctgataagcctgagggccgggggcctgggtctgaacctgacttcggcgagcagggtgatacattacgatctgtggtacaacccagccgtggaaaaccaggccaccgacagggccttccgcatcggccagaagcgcaatgtctttgtccaccgcttcattaccaaaaacagttttgaggaaaagatagacgccatgatcgccagaaaacgcgagttagccgacatgaccgtcgcctcgggagaatcatggatcgccaggatgagccatgaggagttgaaggcgctgtttgacaggaaccatggaaaataa

SEQ ID NO: 47920 - protein, 414 aa, Unknown
  Obtained from environmental sample
  DOMAIN (276)...(354): Helicase conserved C-terminal domain
  misc_feature (1)..(414): Xaa is any amino acid
MDMTGTAPRPFSNWEKELSRFAPSLNVSRYHGNRRVLDRKCNVLLTTYQTAVRDAEKLKKEVFSLLLVDEAHLMKNADTRLSRTVKQLHTKYRLALSGTPVENRLEDLRSLFDFILPGYLGDAAQFKEQYRVPIEVMRNREQAEALRKITSPFLLRRLKTDKKIIKDLPEKIVANEYAVLENEQAALYESVVAESIRKSKEIDPKERPSLILSMLTSLKQICDHPRVFDKESPASSALSGKSQLLLTLLEEILANREKTLVFSQYVETLDCLEHIIKNELGEQPLIYHGGLSQGARSEIINRFQNESAARILLISLRAGGLGLNLTSASRVIHYDLWYNPAVENQATDRAFRIGQKRNVFVHRFITKNSFEEKIDAMIARKRELADMTVASGESWIARMSHEELKALFDRNHGK

SEQ ID NO: 47921 - DNA, 588 bp, Unknown
  Obtained from environmental sample
  misc_feature (1)..(588): n is a, c, g, or t
atggctgacggggaaactcaaaaggaggagacaggcgaatccgacttcagcgatcagttaattgtcaatcagattattacggggcagaaggacctgttccgtttattggtacagcggcatgagaaagcggtttattcaatgggtttgggattttttcgtaacaaggaggactcctgcgattttacgcaggaagtattcattaaagcgtacaggaatctttcaagttttgagggaagaagcaggttttcaacatggctttacaggatagcgtataacaccgctgtaaacgaagtaaacaggaggagggaatatttcagcctggctgaagaagacatgaacaggctgatcaatacgagcgatacgcctgaacaggacatggtaagaaacgcggcaagggaagctgtacgttcggcaataaaagaacttccgcgccgtttcgcggtatgtattgatttattcttcttttatgatcgttcttatcaggagattgaaacaattaccggcattcctgtaaacacaattaagtctcatgtattcagagcgaagatactgttaagagaaaaactaaaattgttatcagatgagtaa

SEQ ID NO: 47922 - protein, 195 aa, Unknown
  Obtained from environmental sample
  DOMAIN (138)...(187): Sigma-70, region 4
  misc_feature (1)..(195): Xaa is any amino acid
MADGETQKEETGESDFSDQLIVNQIITGQKDLFRLLVQRHEKAVYSMGLGFFRNKEDSCDFTQEVFIKAYRNLSSFEGRSRFSTWLYRIAYNTAVNEVNRRREYFSLAEEDMNRLINTSDTPEQDMVRNAAREAVRSAIKELPRRFAVCIDLFFFYDRSYQEIETITGIPVNTIKSHVFRAKILLREKLKLLSDE

SEQ ID NO: 47923 - DNA, 504 bp, Unknown
  Obtained from environmental sample
  misc_feature (1)..(504): n is a, c, g, or t
gtgaagtttacttttattcccgaaaccaaactgcttcgtattttgtacactggactgctctttattgcaggcgcgttgatttgcatgctgataataggcacgatnttaggcgcagtccgttcttccgatgccaagccgattttacggttaggtaaacctgtcgaaaacagaatcgcgcagccgcttaccgatgatattcgtgtttattcggggcttgagcggttaagaattccgctctcaaattcatcagttttaattctttcgatagctttcccctaccttcacaatgacacggcttttacagaggaacttgccgcaaaaaacggcgattttaagacgatagcgattgattatttctcatctcttgaggcggacaaaataattcaaattgacgaagacacggcgaaaatggagctcctgaaacgctacaatgagaatttacggcttggcagtatcgaagccctttactttagtgatatgataatactggacgcaagtttataa

SEQ ID NO: 47924 - protein, 167 aa, Unknown
  Obtained from environmental sample
  misc_feature (1)..(167): Xaa is any amino acid
MKFTFIPETKLLRILYTGLLFIAGALICMLIIGTXLGAVRSSDAKPILRLGKPVENRIAQPLTDDIRVYSGLERLRIPLSNSSVLILSIAFPYLHNDTAFTEELAAKNGDFKTIAIDYFSSLEADKIIQIDEDTAKMELLKRYNENLRLGSIEALYFSDMIILDASL

SEQ ID NO: 47925 - DNA, 492 bp, Unknown
  Obtained from environmental sample
  misc_feature (1)..(492): n is a, c, g, or t
atgacagacaataatgaatggagtcttgctgccctggtagaacgtggcggggtatactacgatgttcccggcgcaagcccaaaagagctggttgccggcgtaatcggcctgatgccgcccattgaagccgttactccggaggaattgcagcggcagataatggagagggaagcccttgtatcaacaggggtaggccgcggtattgccctgcctcatccgcgtaatccggcgctcgcgggcacaaacgcgcagccccttgtggcgatagcgtttcccgttatgccgattgactggaatacccaggacggcagcaaagtgcatacggtattcctcatcatttccgcgtcggcgaaacagcaccttaatacgctgtcaaaaatcaattttctctgtcaaaaggaaaaattccacagcctgattggagcgcgcgcctcaaaaaaagagattgttgcggcgattaaggaagcggaaaattcctgggctaataactaa

SEQ ID NO: 47926 - protein, 163 aa, Unknown
  Obtained from environmental sample
  DOMAIN (11)...(156): Phosphoenolpyruvate-dependent sugar phosphotransferase system, EIIA 2
  misc_feature (1)..(163): Xaa is any amino acid
MTDNNEWSLAALVERGGVYYDVPGASPKELVAGVIGLMPPIEAVTPEELQRQIMEREALVSTGVGRGIALPHPRNPALAGTNAQPLVAIAFPVMPIDWNTQDGSKVHTVFLIISASAKQHLNTLSKINFLCQKEKFHSLIGARASKKEIVAAIKEAENSWANN

SEQ ID NO: 47927 - DNA, 1950 bp, Unknown
  Obtained from environmental sample
  misc_feature (1)..(1950): n is a, c, g, or t
gtgataaggacgatgccgctcctctaccgcttcgcgaacttcccgccggtctacctcccgatgagcgtaagggtggccgccgacctcttcgcgacgccgaacgaggagatagtcttcaagccggacgaatatctcgacatcgggaagccgtttaagatatttaaggacggggagggaaaggtgtcgttctcttaccccgacttcaccgaggcgcagttcaggataatatcggcggacagggacggcatcctgtcgcttggcgggagccagaagaggcgggtgtcgtcgtacgtcgcggtctttagggatgatagcggcggcgtaggtttagaggttaggagcgggagggcgtcgcccaagatgtttgcggcgctgtcgccggcgttgctgaagagagacgttgtcgatagtgttaatactgttgatagtgtaaaaccggtaataaaaatggccgtagacgaagagattgatatcggcggcgggttcacgataaggcgcgactccgacatcgagtgggaggtgtattccgacggcgagtctctgtggctgaccgagctcgacgtcggaacgctgtctaagctggcgccgggcgatcttgatttagattcgtcctccggcgtcaaaagaagattggttacctttgatttctgggtcaaacgggagaagggcgtattggtctcgtcgcttcctgtccttagggcgcaggcgctaagcgagttgctggcggacggcgcggacgcggttttggaatccgttcccaatggctcccgccgcgacttcggcgccccggcccggattccgctgcgcggcggcaaccgccacgtcgtcacgtacttcgggccgaagtctaagccgtttccgtattccagcttctacgacgtgatggagaacaaggagaatttatactcgatggaggggaacgtctttatcgtaggctcaacctcgccggccatgttcgatataaagtccgctccgcacgaccgcgtcttccccggcgtggagatccacgcgtcgcttttgaactcaatctttaccgggatctacgtgcgccgccttaccgagcgtcaggacattctcgtgatggtcgccgtgggcctgtttgcggcgctcatcggttttctggccaagccgtttttaggcgggctcctcgccgccgcgtcgctgttcctctactctttcgcggcgttccaactcttcgatgcctatctgatttgggcggagatggtgcggcccattataactatggcgctcgtctttactgaagtaatgatttaccgatacgtgacggtggagagggacaggatattcttgaaagacaccttcaagcagtacttgtcggaggttatcatagagggcatgtgcaagaacaacgagcacccgaagttaggcggcgagaagaggacctgcaccgcgtactttaccgacatagagggcttctcaaccttctccgagaagctgaaagaccctgaacgcttagtgacgcttctaaacgagtacctctccgccatgaccgatatcctgaccgatcttcaccacggtacgcttgacaagtacgagggcgacgcgatagtagccttcttcggcgccccaaataatttgcccaaccacgcttatcaggcctgtaacaccgccataattatgcagcaggaactgggcaggctgcgcgaaaaatggcgtcttgagggcgacaagtggccccccatcgtacataatatgagaatgcgcataggcataaacaccggcgagatcatagtgggcaacatgggctcggatttgagaaagaactacacgatgatgggcgacgcggtcaacctcgccgcacgtctggagagcgccgcgaaacagtacggcgtctacactatgatcagccaccacacctacaacgcggcggtcggcgaaaataccgaccaaaagataagcggcttgttgaaacaagaaagctggacgtga

SEQ ID NO: 47928 - protein, 649 aa, Unknown
  Obtained from environmental sample
  DOMAIN (464)...(647): Adenylate and Guanylate cyclase catalytic domain
  misc_feature (1)..(649): Xaa is any amino acid
MIRTMPLLYRFANFPPVYLPMSVRVAADLFATPNEEIVFKPDEYLDIGKPFKIFKDGEGKVSFSYPDFTEAQFRIISADRDGILSLGGSQKRRVSSYVAVFRDDSGGVGLEVRSGRASPKMFAALSPALLKRDVVDSVNTVDSVKPVIKMAVDEEIDIGGGFTIRRDSDIEWEVYSDGESLWLTELDVGTLSKLAPGDLDLDSSSGVKRRLVTFDFWVKREKGVLVSSLPVLRAQALSELLADGADAVLESVPNGSRRDFGAPARIPLRGGNRHVVTYFGPKSKPFPYSSFYDVMENKENLYSMEGNVFIVGSTSPAMFDIKSAPHDRVFPGVEIHASLLNSIFTGIYVRRLTERQDILVMVAVGLFAALIGFLAKPFLGGLLAAASLFLYSFAAFQLFDAYLIWAEMVRPIITMALVFTEVMIYRYVTVERDRIFLKDTFKQYLSEVIIEGMCKNNEHPKLGGEKRTCTAYFTDIEGFSTFSEKLKDPERLVTLLNEYLSAMTDILTDLHHGTLDKYEGDAIVAFFGAPNNLPNHAYQACNTAIIMQQELGRLREKWRLEGDKWPPIVHNMRMRIGINTGEIIVGNMGSDLRKNYTMMGDAVNLAARLESAAKQYGVYTMISHHTYNAAVGENTDQKISGLLKQESWT

SEQ ID NO: 47929 - DNA, 360 bp, Unknown
  Obtained from environmental sample
  misc_feature (1)..(360): n is a, c, g, or t
atgcccggtcgtttaataatttttattgtaattcttgctataattcttttttttataggattaaatcttgataataaatgcgatataaactttggtttaatcaaattagaaaatactcctgtattctttcctatctttgtctcatttgctttagggcttttatgttctttacccttcatcattaaaagcaaaataggtaaaaagcgaaatgatactgtaaaagacataaaacctgccaaagataatttttccgattctgacgacgttccttatattgttcccgaacctgatgaaaaaataaaacaggacgccatgtcggcaagagaaaaatttttcgccaaaaaattcggaaaaaaataa

SEQ ID NO: 47930 - protein, 119 aa, Unknown
  Obtained from environmental sample
  misc_feature (1)..(119): Xaa is any amino acid
MPGRLIIFIVILAIILFFIGLNLDNKCDINFGLIKLENTPVFFPIFVSFALGLLCSLPFIIKSKIGKKRNDTVKDIKPAKDNFSDSDDVPYIVPEPDEKIKQDAMSAREKFFAKKFGKK

SEQ ID NO: 47931 - DNA, 765 bp, Unknown
  Obtained from environmental sample
  misc_feature (1)..(765): n is a, c, g, or t
gtgcgcgaaatcaccctgcttgggcagaatgtaaacagttatttttgggaaaatgacaaaatggacttttccgcccttttaaaatttatcgcggaaacagcttccaaaacagggataaaatggatacgcttcctttccgccaacccaaggaatttttcgtccgaggcggtaaaggttatggcggaaaatcccgtcttctgccgccacttgcacttgcccgtccagcacggctcaaactccgtcctaaaagcgatgaaccggggctatacaaaggaacgctaccttgagcttgcgggagaactccgcaccgccatgcccggaattaccctgtccacggacattttggtcggttttcccggagaaactgaggaagacttggaacagaccctcttattaatggaagaaattaagtttctttacgcttttatgtatcattttaacccaagagagggtacaaaagcgtttgatttacccggcaggataagcgaggaagtaaagagggaaaggctttccggggtaatagctcttcaaaagaagcataccgcagaactcttaaaaagcagggttggcagcaaagaaacggtattaatagaaggaatttcacgaaaaaatgccgatgaattaataacaaggacagaaaaggacgaaatggtggtagttcccgggccttcttccatgataggctcatttgcggaagtaaccctttctgtcttaaagggaaatacatttatttctaaggagttgaatttatgcccggtcgtttaa

SEQ ID NO: 47932 - protein, 254 aa, Unknown
  Obtained from environmental sample
  DOMAIN (186)...(249): TRAM domain
  misc_feature (1)..(254): Xaa is any amino acid
MREITLLGQNVNSYFWENDKMDFSALLKFIAETASKTGIKWIRFLSANPRNFSSEAVKVMAENPVFCRHLHLPVQHGSNSVLKAMNRGYTKERYLELAGELRTAMPGITLSTDILVGFPGETEEDLEQTLLLMEEIKFLYAFMYHFNPREGTKAFDLPGRISEEVKRERLSGVIALQKKHTAELLKSRVGSKETVLIEGISRKNADELITRTEKDEMVVVPGPSSMIGSFAEVTLSVLKGNTFISKELNLCPVV

SEQ ID NO: 47933 - DNA, 882 bp, Unknown
  Obtained from environmental sample
  misc_feature (1)..(882): n is a, c, g, or t
atgacggtgacatcgggtattgtttccgcgcttggaaggcgtttcttgcagataggagacgttattcaaatagacgcggccgtcaatcacggcaattcaggcggtcctgtggttgacaatgaagggcggcttgtgggaatagtttatgcaggcgtggatcaacatcaggggcttaatttcgccgttccggcggaaacgcttacagccgccctgcccgcgatgataaagggggggaaatcccagcgcccgtggcttggaatgacgttatgtgaaacttattcggaagctgaaattatctataccgcgccgaatacgcccgccgcttatcataaggttcgtgaaggcgtttttatcaagacggttaacggtaaacccgtaattgctccgaatggcggagttatttccgccttgcagaatatgatttttacctgcggtccggaagaacttgtagtattggaaaccatcgacaaaaacaccgaagaagtaaaaaagaaagttatgatgaccgtcccgcgtcccgatctgcctcttctggacgcggcgaagattgacaagcgggatcgaattgccgctccgttgtttggaatgcttcttacgccgttacaaaacactgttttttcgtccaatttcagggtaaaccgggtagtcagaggttccatagcggatgaagccggaatttcagaagacgatctcgtgtctatttcgcgtttacgcttacttgaagatgaaggttatgccgtaatggatattatcctaaaaaacgcagaatggcttatcttgaaacgtcaatgcagcttcccgtttatctggactcccctgacacgctgtaattatgggtatctatacaggaaaaggcgacgatggaaaaacatccgatcttag

SEQ ID NO: 47934 - protein, 293 aa, Unknown
  Obtained from environmental sample
  misc_feature (1)..(293): Xaa is any amino acid
MTVTSGIVSALGRRFLQIGDVIQIDAAVNHGNSGGPVVDNEGRLVGIVYAGVDQHQGLNFAVPAETLTAALPAMIKGGKSQRPWLGMTLCETYSEAEIIYTAPNTPAAYHKVREGVFIKTVNGKPVIAPNGGVISALQNMIFTCGPEELVVLETIDKNTEEVKKKVMMTVPRPDLPLLDAAKIDKRDRIAAPLFGMLLTPLQNTVFSSNFRVNRVVRGSIADEAGISEDDLVSISRLRLLEDEGYAVMDIILKNAEWLILKRQCSFPFIWTPLTRCNYGYLYRKRRRWKNIRS

SEQ ID NO: 47935 - DNA, 504 bp, Unknown
  Obtained from environmental sample
  misc_feature (1)..(504): n is a, c, g, or t
atgggtatctatacaggaaaaggcgacgatggaaaaacatccgatcttagcggacgtaaagtttctaaaaacagcgcggtaattcattttgtgggaacggctgacgaactcaactgccacctgggacttattaaggcgatgattgcaaacaaaaattccgctcaatctgattgcaagtttcttgaaaaaatccaaaaaaatctggtaacgatcatgtcccatatttccgacgcaagaaacggcaatttttttctgcccgatgatgaagcagccattttagaaaaagagattgacagattatcagccaatcttcccactcaaaccaaactggttgtacccgggaaaagcatcatagaagcgcaaatccaaatagcgcgtgcggttgcaagaagggcggaaaggctatttttcgcggcaggagaagaacaaccgttatgcccccaagccggcgcgtatttaaacagattatcggattacttatttgttttgtcgcagctagaataa

SEQ ID NO: 47936 - protein, 167 aa, Unknown
  Obtained from environmental sample
  DOMAIN (3)...(164): Cobalamin adenosyltransferase
  misc_feature (1)..(167): Xaa is any amino acid
MGIYTGKGDDGKTSDLSGRKVSKNSAVIHFVGTADELNCHLGLIKAMIANKNSAQSDCKFLEKIQKNLVTIMSHISDARNGNFFLPDDEAAILEKEIDRLSANLPTQTKLVVPGKSIIEAQIQIARAVARRAERLFFAAGEEQPLCPQAGAYLNRLSDYLFVLSQLE

SEQ ID NO: 47937 - DNA, 390 bp, Unknown
  Obtained from environmental sample
  misc_feature (1)..(390): n is a, c, g, or t
atgcgcgcgggcggccccggaggccagtgcgtcaacacgactgattccgccgtgcgtatcacccatctcccgaccggcattaccgtccactgccaggacgaaaaaagccagatcaaaaacaaggccaaggcgatgaggattctgcgggcgcgtatttacgaaatggaagaagcgaaagcagccgccgaacgcgccgaagccagaaaaacccaggttggcaccggcgaccgttccgagaggatcaggacttacaattttccggacaaccgcgtcacggaccaccgcataggcctgaccctttacaaacttgaccgcatcatggaaggcgaagtcgccgaggtctttgacgccctgaaactctcggcccgcgaagaaatgctgcgaaactaa

SEQ ID NO: 47938 - protein, 129 aa, Unknown
  Obtained from environmental sample
  DOMAIN (1)...(95): Peptidyl-tRNA hydrolase domain
  misc_feature (1)..(129): Xaa is any amino acid
MRAGGPGGQCVNTTDSAVRITHLPTGITVHCQDEKSQIKNKAKAMRILRARIYEMEEAKAAAERAEARKTQVGTGDRSERIRTYNFPDNRVTDHRIGLTLYKLDRIMEGEVAEVFDALKLSAREEMLRN

SEQ ID NO: 47939 - DNA, 900 bp, Unknown
  Obtained from environmental sample
  misc_feature (1)..(900): n is a, c, g, or t
atgacaatacgcgaagcccttgccgaaggaaccgcctctcttgccggagccggtattgaaacccccggccttgattcctccctgctccttgccgaagcccttaatatcagccgttccaaattaacagccgccggaaacgacagtatttcggctgcgttagtcgcaacattccgccaattaatcaagcgtcggcgttccggggaatgtattgcatatatattaggaaaaaaagaattttacggccttgaattcctggtaaatccttcggtattggttccccgccctgatacggaaacgttagttgaaattgccatgaatagggttcagggttcagggttcggggttcgggaacaaccgcttcgcgtgcttgacctatgcaccggatcaggggcaatagcaatcgcgctgaaacatacaatgccggaacttgaggtatgggctacggatatttctgccgaagcccttgaaaccgcccaaacaaacgccgcccgcctgttacccccggattcaatccgcttttttcaaggagacctctacgatgccctgctccccggcccttcttccctttgttacctgttacctgttatctgttacctgatagtaagtaaccccccctacattcccactgccgaaatcccctctctcgcgcctgaagtccgtatggaacctgcgcttgcgcttgacgggggcgatgacgggttaggcgtaatcagaaaaatcgtatcccgcgctccggaatttctctgcccgggcggcgttctactgctggaagccgatccccgccaaatggcggtcattgctggcctgtacaaaaaagccggtttttctgacattcaaacccatacggacctgtccggcagggaacgggtaatcagcggtataagaataaataacaggtaa

SEQ ID NO: 47940 - protein, 299 aa, Unknown
  Obtained from environmental sample
  DOMAIN (81)...(279): Methyltransferase small domain
  misc_feature (1)..(299): Xaa is any amino acid
MTIREALAEGTASLAGAGIETPGLDSSLLLAEALNISRSKLTAAGNDSISAALVATFRQLIKRRRSGECIAYILGKKEFYGLEFLVNPSVLVPRPDTETLVEIAMNRVQGSGFGVREQPLRVLDLCTGSGAIAIALKHTMPELEVWATDISAEALETAQTNAARLLPPDSIRFFQGDLYDALLPGPSSLCYLLPVICYLIVSNPPYIPTAEIPSLAPEVRMEPALALDGGDDGLGVIRKIVSRAPEFLCPGGVLLLEADPRQMAVIAGLYKKAGFSDIQTHTDLSGRERVISGIRINNR

SEQ ID NO: 47941 - DNA, 303 bp, Unknown
  Obtained from environmental sample
  misc_feature (1)..(303): n is a, c, g, or t
ttgaataaatttggatatgttagatataatagttatatgccaacaatttcaatgttttatgggatactaataaggatgtatttggggaaaaaagagcataatcccccgcatattcatgcaatatatcaaaacaaaaaagctgtttttgatataaaaactggtgaaaaaacagaaggaaatttacccaatgataaagagaaattggtctctgcctggataattttacacagagacgaattattggctgattgggaattagcccagaatggtgaactcccatataatattgacccgctaaaataa

SEQ ID NO: 47942 - protein, 100 aa, Unknown
  Obtained from environmental sample
  misc_feature (1)..(100): Xaa is any amino acid
MNKFGYVRYNSYMPTISMFYGILIRMYLGKKEHNPPHIHAIYQNKKAVFDIKTGEKTEGNLPNDKEKLVSAWIILHRDELLADWELAQNGELPYNIDPLK

SEQ ID NO: 47943 - DNA, 912 bp, Unknown
  Obtained from environmental sample
  misc_feature (1)..(912): n is a, c, g, or t
ttgattgtcagggactggacgagccgtgttttcgattacacaagaaaggtatcccgggaatttgccaattatttatccggatttatcgtaattctcctttttttgcttgtcttgttgattatattaactattaaaaacagcaggaaaaggggaattctgaagaagcagatggttcatttatctgccatataccgttccctgcctgaccgcgtgtactgcaaggacattaacggcgcgttcacggactgtaatcatctttttgaggatttcacgggccgccccgaatccgaaataatcggcaaaacccccgttgaattatatcagaataataaagagatggcccttggtttcatggcggcggataaaaaagtaatgtctgaaaaggccgtggtaacggtacaggagtgtcttccctatcccgacggttcccaaagatattttgaaaccaaaaagacccccttgattctgaacggcaaggtaacgggtatgctgggagtttccagggatattacggagcataaggccgcgctggaagaggtaaacagggcagtaaaagcgaaaacatcggtgctttctacgctggacaggatattaaacaggcttgacacaatgatctttgtcagtcttcctgaaacaggcgagatactttttattaatgacagtatgagggaacatttcggcattaaaggcgattgtatcgggctgatttgctatgaggtttttcagcttaatgccagcgggaaatgcggcttttgcccctgccatcagcttgacaaggaccccgacaaagttgtcgtatgggaggaatacagcgcgttaacagggcgcgtttacaaccacacgaaccggtatatagaatggatcggtggggtaaccgtccatttacaacaggcggtcgatataccgagttga

SEQ ID NO: 47944 - protein, 303 aa, Unknown
  Obtained from environmental sample
  DOMAIN (80)...(173): PAS fold
  misc_feature (1)..(303): Xaa is any amino acid
MIVRDWTSRVFDYTRKVSREFANYLSGFIVILLFLLVLLIILTIKNSRKRGILKKQMVHLSAIYRSLPDRVYCKDINGAFTDCNHLFEDFTGRPESEIIGKTPVELYQNNKEMALGFMAADKKVMSEKAVVTVQECLPYPDGSQRYFETKKTPLILNGKVTGMLGVSRDITEHKAALEEVNRAVKAKTSVLSTLDRILNRLDTMIFVSLPETGEILFINDSMREHFGIKGDCIGLICYEVFQLNASGKCGFCPCHQLDKDPDKVVVWEEYSALTGRVYNHTNRYIEWIGGVTVHLQQAVDIPS

SEQ ID NO: 47945 - DNA, 729 bp, Unknown
  Obtained from environmental sample
  misc_feature (1)..(729): n is a, c, g, or t
atgaccgaccaagaattaaaagatttagttgccaaccttgccgtagataggaaggaaattgctgctatgcagaaagaaacaggtcaatttatagaccggatgagtaaagaaaccactgctatgcagaaggaaattactgctatgcagaaggaaactatcgctatacagaaggaaactgctgctatgcaaaaagaaactatcgctatacagaaagaaaacgctattgagataaaagagttgagagagagtttaaaagaatttagaaaggatttagaagaacagactactcaaataaaagaacagagcattcaaattggcggtataagcaacaatatagggcatcacgcggagcagttttttcagagtgtatttaaggaaaaattggaatttggcaggataaaatacgatgaaatgataccaaatctggcgtacaaaggaaagaaagatgaaatagaatttgacattgcactcatcaatggggatagcctagcattgatagaggcgaaaaacagaatacatccagattttgtgatagagcttgcagaaaagcgtattgagaagttcagggaatttttccatgaatttgacaattacgacgtttatcttggcatagctggtttttctttcagcgatgaagtgttagacagagctagtgcttatggcattggcattgtacggcaggttggcgagggtgttgagatagaggcaaataatttgagggtttattag

SEQ ID NO: 47946 - protein, 242 aa, Unknown
  Obtained from environmental sample
  misc_feature (1)..(242): Xaa is any amino acid
MTDQELKDLVANLAVDRKEIAAMQKETGQFIDRMSKETTAMQKEITAMQKETIAIQKETAAMQKETIAIQKENAIEIKELRESLKEFRKDLEEQTTQIKEQSIQIGGISNNIGHHAEQFFQSVFKEKLEFGRIKYDEMIPNLAYKGKKDEIEFDIALINGDSLALIEAKNRIHPDFVIELAEKRIEKFREFFHEFDNYDVYLGIAGFSFSDEVLDRASAYGIGIVRQVGEGVEIEANNLRVY

SEQ ID NO: 47947 - DNA, 855 bp, Unknown
  Obtained from environmental sample
  misc_feature (1)..(855): n is a, c, g, or t
atgtttgattttatagcaaaagaaatagatacctacctgcataaaaatcccgaaaccgcaaaaattattcaggagcgaattgcacaaaatgaacgcgagcgaaaagacatcgcaggtattcgcaaagtggcaaacgaacgtgcaaaaaaagccgctatccataatcgcaaactgagggattgcaaaattcatctcatagattcaaaaaacgaaagaaaagacgaaactatgatattcatcaccgagggcgatagcgcaagcggttctataacaacggcacgcgacacgcaaacacaagcggtgttcagcttaaagggaaagcctaagaacacttacggcattgggcgcaaggttgtttatgaaaacgaggaactaaaccttttgcaacacgctttggatatagagaacggtttggaaaatttgcgttataacaaagtgattatagccacggatgccgatgttgatggtatgcacataaggcttttgatggtatctttctttttgcagtttttcccagagcttgtggagcaagagcatctctatattttgcaaactccgcttttcagagttcgcaacaaaaaagaaaccctttattgctacaacgaaggcgaaagagaccaagcacaggcaaagctcggaagcactgcagagacaactcgctttaaaggcttgggcgagataaaccccgaagagttcggtttgttcataggcgatgatatgcggttggaaagcgtgattatgccaccggaggcgaatattcaaaaaatgctggaattctatatgggggaaaacacttccgttcgcaccgaacacgtgataaacaacctaagagcagaggcagtatctgagttatag

SEQ ID NO: 47948 - protein, 284 aa, Unknown
  Obtained from environmental sample
  misc_feature (1)..(284): Xaa is any amino acid
MFDFIAKEIDTYLHKNPETAKIIQERIAQNERERKDIAGIRKVANERAKKAAIHNRKLRDCKIHLIDSKNERKDETMIFITEGDSASGSITTARDTQTQAVFSLKGKPKNTYGIGRKVVYENEELNLLQHALDIENGLENLRYNKVIIATDADVDGMHIRLLMVSFFLQFFPELVEQEHLYILQTPLFRVRNKKETLYCYNEGERDQAQAKLGSTAETTRFKGLGEINPEEFGLFIGDDMRLESVIMPPEANIQKMLEFYMGENTSVRTEHVINNLRAEAVSEL

SEQ ID NO: 47949 - DNA, 882 bp, Unknown
  Obtained from environmental sample
  misc_feature (1)..(882): n is a, c, g, or t
gtggttcagcccaaagaaggcggctatgatgtcatctgcggcggcgtgaatatgggcgcattgaataacgggaatgacggcgagaagtgttccattaaaacggcaacaagcaattctgcgtatttgcagataaactgcggcatcaattctgaactgcttgcaaaagctttgtgcggaacagaggcttacgatcctgaaataaaggtatgcaaagacggcgagctgaaagagaaagatatagcaaatacattcacagatgcacgtgacggcaaaaaatacaaatacgtacaaatcggagagcaagtttggatggcagagaatttgaattatgccgtcaaaggcagcaagtgtgtcaatggcaatgcaaagattgaatatggtgctgtcacatttaagggtactttaaacgatgcgaatacagcggcttgcgatacttacggcaggctttacaaatgggaagcagctatgggcgctcttgaaagctctgacaaaaatccgagcaatgttcaaggcgtttgccccgcaggctggcacttgccgagccaagctgaatgggcaaagctattagattttgttggcggtgctgctactgccggactcaagctgaaggctacgagcggttggtatgaaaatggcaatggcgtaaaaaatggcaatggcacagacgattacagcttttctgccttgcccggtggttttggctctaacaaatgggacgaaagtagtagtttgggctgggaaggctggtggtggagtgccactcagagcgatgccgataccaccagagcctacgctcggagaatttaccccaacggcgatagtgtggctacttttgccgtatcaaaagatatttacttctcctttgaaaacaaacttccctag

SEQ ID NO: 47950 - protein, 293 aa, Unknown
  Obtained from environmental sample
  misc_feature (1)..(293): Xaa is any amino acid
MVQPKEGGYDVICGGVNMGALNNGNDGEKCSIKTATSNSAYLQINCGINSELLAKALCGTEAYDPEIKVCKDGELKEKDIANTFTDARDGKKYKYVQIGEQVWMAENLNYAVKGSKCVNGNAKIEYGAVTFKGTLNDANTAACDTYGRLYKWEAAMGALESSDKNPSNVQGVCPAGWHLPSQAEWAKLLDFVGGAATAGLKLKATSGWYENGNGVKNGNGTDDYSFSALPGGFGSNKWDESSSLGWEGWWWSATQSDADTTRAYARRIYPNGDSVATFAVSKDIYFSFENKLP

SEQ ID NO: 47951 - DNA, 531 bp, Unknown
  Obtained from environmental sample
  misc_feature (1)..(531): n is a, c, g, or t
atggccgactgccagggcatcaagatccgttccgtggaaagccccatctatatagaaaccttcaaagccatgggactctcccctactcccatgccgttcggcgagatctataccgccgtgcagacccgtgttgtggacgggcatgaacaggaagaaagcggctttgtcagcatgaaattctatgagattgaaaagtgcggcgcggtgacgaaccacatttacaatcccgccccgctgcacatcagcgagattttcctcaagcgcctgccggaagctacccggaaaatcgtgctggacgccgttgtcgaggccggcacatggtggaacatgcaggagggcgcggcggaaaaggaacagttggccgcccgtgaatggctgattaaagaaaaaggcattgtcttcacctatcccgacatcggcgaattcaagaaggcgctcatccccctgcaggatcagtttgccgccaagattggccccaagggggtggacatgctgcggcaggtgcgtgaagtcaccgcgaaggtgaaatag

SEQ ID NO: 47952 - protein, 176 aa, Unknown
  Obtained from environmental sample
  DOMAIN (1)...(157): Bacterial extracellular solute-binding protein, family 7
  misc_feature (1)..(176): Xaa is any amino acid
MADCQGIKIRSVESPIYIETFKAMGLSPTPMPFGEIYTAVQTRVVDGHEQEESGFVSMKFYEIEKCGAVTNHIYNPAPLHISEIFLKRLPEATRKIVLDAVVEAGTWWNMQEGAAEKEQLAAREWLIKEKGIVFTYPDIGEFKKALIPLQDQFAAKIGPKGVDMLRQVREVTAKVK

SEQ ID NO: 47953 - DNA, 1245 bp, Unknown
  Obtained from environmental sample
  misc_feature (1)..(1245): n is a, c, g, or t
gtgtttcttaatatcaaaggcataggaaaaatacaagactcaccgatagaaatgaaaggtattactgtcattgccggtgaaaacaataccggtaaaagtacctttggtaaaattctttattgtatgtttaatgctttttataatttagacaagaaagtacaagatgaacgtatagaagctattcgtaatattattgctcgtgattatttttttgaaaaaatacttttatcagatcaattaattgaaaatattcttaatttaaaagatacattttctgctaaaaattttcgtgaaataataattaattcaactaaaaacatcacagaagatgatatgaactctatttatagtatcaatgataaatatattaatgaaattgaacgttatgttaatttcaatgaaatagatataaaggaagctattatttcgcgttttttccgcaatgaatttttaaatcagattaaccatgccaatcgtcctgataagtctggaggaattaaacttgttatagccggaaaaagtatagaaataaatttcttaaataatgaatgtatagattttattgacaatgtaggaataatacataatgccatattaattgatacgccttttgttttagatgatgccagtaataatatactctcaattattcctaatatatcatcgaattatcataaaaataatttactttacagaatcgttaaaaagaacgaatccacaataatcgcggaagtaatagttaaacaaaaattaaaaaaaatattggaaatcattgatcctataacaaaaggtatttttatcagaactgatgattcgcttgtttttaaggaaaaaatgattgaacagccgcttgcgctaaaaaatatatcaaacggaatgaaaatatttcttattgtaaaaagattattggaacaaaatgaaatcaaagaaaaggatgtattaatttttgatgagcccgaaatccatcttcatcccgactggcagattaaatttgccgaaattttagtcttattacaaaaagaatttaaccttataattctactgactacccatagtccgtattttcttcatgccatagaagtttattgtaataaacatggtattaatgacaacttaaaatgttatttagctgaatcaaaagatgatacttccgatattcatgatgttacggaaactttagattctatttacaaacagcttgcgagaccattccagaaattagaagatgaccaatatgaatattaa

SEQ ID NO: 47954 - protein, 414 aa, Unknown
  Obtained from environmental sample
  misc_feature (1)..(414): Xaa is any amino acid
MFLNIKGIGKIQDSPIEMKGITVIAGENNTGKSTFGKILYCMFNAFYNLDKKVQDERIEAIRNIIARDYFFEKILLSDQLIENILNLKDTFSAKNFREIIINSTKNITEDDMNSIYSINDKYINEIERYVNFNEIDIKEAIISRFFRNEFLNQINHANRPDKSGGIKLVIAGKSIEINFLNNECIDFIDNVGIIHNAILIDTPFVLDDASNNILSIIPNISSNYHKNNLLYRIVKKNESTIIAEVIVKQKLKKILEIIDPITKGIFIRTDDSLVFKEKMIEQPLALKNISNGMKIFLIVKRLLEQNEIKEKDVLIFDEPEIHLHPDWQIKFAEILVLLQKEFNLIILLTTHSPYFLHAIEVYCNKHGINDNLKCYLAESKDDTSDIHDVTETLDSIYKQLARPFQKLEDDQYEY

SEQ ID NO: 47955 - DNA, 888 bp, Unknown
  Obtained from environmental sample
  misc_feature (1)..(888): n is a, c, g, or t
atgcattccgtanccggcgacgtcagaaacagggacgcccttgtcaaagcggtaacagaggtaaaaccggatattgtttttcatctggcggcgcagccgatcgtccggttttcttaccgcgaacctgccgccacttacgagaccaacgtgatgggaacggtaaacgttcttgaagcgttacgggaaactccgtccgtaaagtcttttgtaaacgttaccaccgataaagtgtatgaaaacaaagaatggcattggggctaccgggaaaacgaaaacctctgcggttatgacgcctattccaacagcaagtcatgcagtgaattggcaacgttcagctaccgcaacgcgttttttagcggtgaaaacgcgcctgcggtttccaccgcgcgttccggcaacgtcataggcggaggagattactccgaagaccgaattattcccgactgcgtccgcgcggcggctgaaaagaaagaaataattgtgcgtaatccgcattccacgcgcccttatcagcatgtgctggaatgtctttgcggttatttgattttggcggaaaagcaatacggcgataaaactcttcaaggagcgtataacttcggccccgacgacgaaagttgcgttaccaccggagaccttgccgggcttttttgctctgcttggggttcagatgccgcttggaaagttcaaggagacggcggtccgcatgaggcgaattttttaaaactggactgctcaaaatcaaaagccgtgttaggctggaaaccatgctggaacataaaaacggcggttgaaaaaaccgtagaatttgcaaaagttcaatccgacaatgagcgacaggcttgtatgaaaaagcaaattgagttatactttanccaagataataaatga

SEQ ID NO: 47956 - protein, 295 aa, Unknown
  Obtained from environmental sample
  DOMAIN (2)...(200): NAD dependent epimerase/dehydratase family
  misc_feature (1)..(295): Xaa is any amino acid
MHSVXGDVRNRDALVKAVTEVKPDIVFHLAAQPIVRFSYREPAATYETNVMGTVNVLEALRETPSVKSFVNVTTDKVYENKEWHWGYRENENLCGYDAYSNSKSCSELATFSYRNAFFSGENAPAVSTARSGNVIGGGDYSEDRIIPDCVRAAAEKKEIIVRNPHSTRPYQHVLECLCGYLILAEKQYGDKTLQGAYNFGPDDESCVTTGDLAGLFCSAWGSDAAWKVQGDGGPHEANFLKLDCSKSKAVLGWKPCWNIKTAVEKTVEFAKVQSDNERQACMKKQIELYFXQDNK

SEQ ID NO: 47957 - DNA, 948 bp, Unknown
  Obtained from environmental sample
  misc_feature (1)..(948): n is a, c, g, or t
gtgcgcataatctccccatccgcctacctatccgcgcttaccggcctaatccgcaacttccgggcgcgaagccccgtcttcccgttctacgcctccttcaaactgacatccaaatgccacttcggctgcccgttctgcaacgtaaaaaaagacccggtccccgacctgtccacctccgacataaaagccatcctgcgcaacctctcccgctcacccgtgctgatgaccagttttgagggcggagaaccgctgctacgcgccgacatagaggaactgctaatctacgcccgccgccgttgcaacttctacctcctattcaccacaagcgccaaagacctgctctcgcacccgatagaccgctactcgcaatacatagatttcctgcacgtgtcaatcgacgagggacacgataacctagccctattcgacacgctcggcgaactctccaaactgccgctcggcctctccgtacagacggtcgtcaccccagacacggtaaacgcgctggacggcaaggttcgcgtttgctacgaaaacggcgccaacatcgtagtaattcccgcggcggtgatggacaacgccaaaaactgcttccccgacatggaccgcctagaacgcgaagtacgccgcctgcgcaaactctaccccaacacgatccacacccccgccggcttcttcgacgcctaccgccgcggaaagtgctcaagcgcctccgtaatcatagccccggacggccgcctatactacccctgccacatcctgggccgaaaaggccccgacctaagggtcaccgatttgtcgaactggctgacctcaaaagaggccgccggcatgcggggattaatgaggcgctgcgaaagaaactgcgggtggtaccaatactacgcgatagactcctacacatcaatatcgtcggcgatcgacgctttgcggcctattttttcctaa

SEQ ID NO: 47958 - protein, 315 aa, Unknown
  Obtained from environmental sample
  DOMAIN (33)...(205): Radical SAM superfamily
  misc_feature (1)..(315): Xaa is any amino acid
MRIISPSAYLSALTGLIRNFRARSPVFPFYASFKLTSKCHFGCPFCNVKKDPVPDLSTSDIKAILRNLSRSPVLMTSFEGGEPLLRADIEELLIYARRRCNFYLLFTTSAKDLLSHPIDRYSQYIDFLHVSIDEGHDNLALFDTLGELSKLPLGLSVQTVVTPDTVNALDGKVRVCYENGANIVVIPAAVMDNAKNCFPDMDRLEREVRRLRKLYPNTIHTPAGFFDAYRRGKCSSASVIIAPDGRLYYPCHILGRKGPDLRVTDLSNWLTSKEAAGMRGLMRRCERNCGWYQYYAIDSYTSISSAIDALRPIFS

SEQ ID NO: 47959 - DNA, 1110 bp, Unknown
  Obtained from environmental sample
  misc_feature (1)..(1110): n is a, c, g, or t
atgcgcgagcttgcggcgcacgggtgcgacgcggccatagccgccccgtcgtacaaagggttaaaaaaccaccgcatagacggcatacccgtctaccgctacagatacgcgccggcgggcttagagttcctgacccacgacgagggcgcgccctccaaaatagcgcggaacccgttcctgcaactcttggctatcccctacctcatttccggttcgctgaaaacgctgctcttgtgcctcaaactgaaaccgacgattatccacgttcactggcccttcccgcacgcgtttatggcctttttcgcacgctttttttgcagacggcctaagattatactgacattctacagcgccgagcttctgttggccaaaaagaaaaaatggatcaggccgatattgaagagattcattaaacgggccgactccgtcatagcgataagcgccttcgccaaagatacagtgaagggcatttacgacagagagatcgaaatactgccatacgggacgacgctacgcaacgcctccggcgcggcggccgcccgccccccgtccgacaaattccgcatcctcttcgtcggccggcatatcgagagaaaaggcatagagtatttaatcaaagcggcggcgacgctcgatccggacgtatatcaagtacggatagccggtcaaggcgacctgacggaaaaactgaaaacgcaagccgctaaagaggcgtccggtcaagtcgtattcttgggaaaaatttcaaacgaagacctagaaaaagagtaccgaaacgccggctgcttcatccttcccgccatcatcgactcacggggagacacggagggattaggcgtagtaatgatagaggccgccgagtacggcgtccccgtaatagcgagcgccgtgggcgggataacggacgtcatcatcaatgaaaaaacaggcttgctggtcaaagaaaaatccatacaggaattgaccgacgcgataagacgcttacatgacgacccgaacctcgctaaatcgcttgccgacaactgcttagcgcatgttaaagaatttttctcttgggataggattacggaaaaacaggttgcgatatataaaaacgttattggcaattga

SEQ ID NO: 47960 - protein, 369 aa, Unknown
  Obtained from environmental sample
  DOMAIN (173)...(345): Glycosyl transferases group 1
  misc_feature (1)..(369): Xaa is any amino acid
MRELAAHGCDAAIAAPSYKGLKNHRIDGIPVYRYRYAPAGLEFLTHDEGAPSKIARNPFLQLLAIPYLISGSLKTLLLCLKLKPTIIHVHWPFPHAFMAFFARFFCRRPKIILTFYSAELLLAKKKKWIRPILKRFIKRADSVIAISAFAKDTVKGIYDREIEILPYGTTLRNASGAAAARPPSDKFRILFVGRHIERKGIEYLIKAAATLDPDVYQVRIAGQGDLTEKLKTQAAKEASGQVVFLGKISNEDLEKEYRNAGCFILPAIIDSRGDTEGLGVVMIEAAEYGVPVIASAVGGITDVIINEKTGLLVKEKSIQELTDAIRRLHDDPNLAKSLADNCLAHVKEFFSWDRITEKQVAIYKNVIGN

SEQ ID NO: 47961 - DNA, 606 bp, Unknown
  Obtained from environmental sample
  misc_feature (1)..(606): n is a, c, g, or t
atgcgtatcagtcacaatattgccgcccttaacacccatcgccagatgggaatcagcgagctggatggctcgaaatcgatggaaaaactctccagcgggtacagaatcaaccgagcgggcgacgacgccgcggggttggccatatccgaaaaaatgagagcccaggtaagagggctcaatatggcgtccaagaactcctcggacaccatatcaatgatacaaactgcggaaggcgcgctgggagagacgcactccattttacagagaatgcgcgaattggccgtgcagtcggccaacgacacgaacacggactccgacaggactgagcttcagaacgaagtcaggctgttgatcgccgaggttgacagaatcggaaacacgacagagtttaacacgaagaaattgcttgaggggagcgctaagggcgtggcggacgagattatcgggacgtcgcggattaataataacagcagtttggcgttggatccggggaaaatagcgaagttgagcagtaacgtggcggctgacaagagttgggcgtttgacggggcgttatgctgttcggaccgggaagacacaggatacggcgagcggggcggtgtataa

SEQ ID NO: 47962 - protein, 201 aa, Unknown
  Obtained from environmental sample
  DOMAIN (27)...(167): Bacterial flagellin N-terminus
  misc_feature (1)..(201): Xaa is any amino acid
MRISHNIAALNTHRQMGISELDGSKSMEKLSSGYRINRAGDDAAGLAISEKMRAQVRGLNMASKNSSDTISMIQTAEGALGETHSILQRMRELAVQSANDTNTDSDRTELQNEVRLLIAEVDRIGNTTEFNTKKLLEGSAKGVADEIIGTSRINNNSSLALDPGKIAKLSSNVAADKSWAFDGALCCSDREDTGYGERGGV

SEQ ID NO: 47963 - DNA, 1287 bp, Unknown
  Obtained from environmental sample
  misc_feature (1)..(1287): n is a, c, g, or t
gtggagcccgaacacataaagttcataccgctgtaccttgaactgctgacaaggtgcggggcgggtaaatttacctacgagcagatggcgaagcgtatatccttatcgaccggcgggatcgccgcctccaccgcttgccagactatggtcggtacgaaggacgaggtattcttcatggccttcatccacggcaaggcgcttgagccgcgttttggggagttgctcgggataatggaagatatacttgtcagtcccgatttgacaaataagaagctgattaaggagttgctgcttgaggagcgcaattcgctgaattcgtcgatcatccactccggccacagtttcgcgatctcggacgccgcggcgcgcctgtcgagaacccgcaaactcgacgatatgctgggcggcataacgcagctgcgttttttggacgatatagtcaaaaatgagaaatacgatctggcggagagagcgtgccaaagcctgcaccatgttatgataaaccgcaggacctgcgtggtgtccatgaccgccggcgacccgtcgaaattcacgggtcagcttgagccgctcatcggcaatctgccgtcgcaagctaagataggggagaggtttcaagacgcggcgcagggccacagcgacgagtggctggagctattctcagacgccgaagccttcgaacgccgagaggccgacagcccgacggcgagttacaagggcatagagatcaactcggcggtaaacttcaccgcccgcgcttggaggctgcccgatacggacgccgccgagaaaggccgaacctacctgctctcgcgtaacctgtctaccggctacctctgggacaagatacgcgtggagggcggggcttacgggggtatgtccggcatgtcggtgggccacccggtcttctcgtgcgcgtcataccgcgatccgaaccttgagtcaacgctgnagcacttcatcggcgggctgaacgaggccgcgaggctcattcctaagaagcaggccgaccaatccataataggcgctataggccgtatagaccagcccaagccgccgcatacgctcggattctccaaaacgatggagattctgaccggcagcacggaggagtaccgccagcggttcagggaggcggtgctgagcgcgacgccggaggatttgaagcgtgccgcggaacgggtattggccgcgaacgagtcggccgtgacggtgttgggttcaaaggcggcgcttgatagggcgcaaagcgccggaatcggatttgagagggagaagctgatatga

SEQ ID NO: 47964 - protein, 428 aa, Unknown
  Obtained from environmental sample
  DOMAIN (2)...(146): Peptidase M16C associated
  misc_feature (1)..(428): Xaa is any amino acid
MEPEHIKFIPLYLELLTRCGAGKFTYEQMAKRISLSTGGIAASTACQTMVGTKDEVFFMAFIHGKALEPRFGELLGIMEDILVSPDLTNKKLIKELLLEERNSLNSSIIHSGHSFAISDAAARLSRTRKLDDMLGGITQLRFLDDIVKNEKYDLAERACQSLHHVMINRRTCVVSMTAGDPSKFTGQLEPLIGNLPSQAKIGERFQDAAQGHSDEWLELFSDAEAFERREADSPTASYKGIEINSAVNFTARAWRLPDTDAAEKGRTYLLSRNLSTGYLWDKIRVEGGAYGGMSGMSVGHPVFSCASYRDPNLESTLXHFIGGLNEAARLIPKKQADQSIIGAIGRIDQPKPPHTLGFSKTMEILTGSTEEYRQRFREAVLSATPEDLKRAAERVLAANESAVTVLGSKAALDRAQSAGIGFEREKLI

SEQ ID NO: 47965 - DNA, 726 bp, Unknown
  Obtained from environmental sample
  misc_feature (1)..(726): n is a, c, g, or t
gtgccatttttactagaaacaaaagaagtatcaaaagcctatagagaaacaggcggaaatcttgaaatattgaagaatgtcaatttcacgttgagcgagggcaatattgccgtgctaacaggacccagcggttctggcaaatccacttttttgaacatagttggggctttggacaggccgacaggaggcttggttttctttaacggcagggaaatgtcaaaattttccagacgggaaataaatggctttcaccgcgaaaaattaggctttatgtttcaatttcatcacttgctcgcggaattcaccgcgtttgaaaatgtgcttatgccagccagaatagcccaccaagattatggcaaaagccgtgaacgagcattgagtcttttgaatattgttgggctttcggataggataggccacttgccccgcgagctttctggcggcgagcgacaaagggttgccttggcacgtgcccttatgaacaagccaaggttgattatagcagacgaacccagcggaaacttagacgaaaaaaatgcagaagtgctaaagtctcttattctagaactcaataaaaaattcgggcaaacgtttttaattgcaacccacgatatggatttagcaggaatagccaccgacaggtggcttgttgcgcacggaacaattattgtaaatacaaatgcctacgaaagacgcaaatctgttcgcacatctatgggctcgtaa

SEQ ID NO: 47966 - protein, 241 aa, Unknown
  Obtained from environmental sample
  DOMAIN (34)...(220): ABC transporter
  misc_feature (1)..(241): Xaa is any amino acid
MPFLLETKEVSKAYRETGGNLEILKNVNFTLSEGNIAVLTGPSGSGKSTFLNIVGALDRPTGGLVFFNGREMSKFSRREINGFHREKLGFMFQFHHLLAEFTAFENVLMPARIAHQDYGKSRERALSLLNIVGLSDRIGHLPRELSGGERQRVALARALMNKPRLIIADEPSGNLDEKNAEVLKSLILELNKKFGQTFLIATHDMDLAGIATDRWLVAHGTIIVNTNAYERRKSVRTSMGS

SEQ ID NO: 47967 - DNA, 1455 bp, Unknown
  Obtained from environmental sample
  misc_feature (1)..(1455): n is a, c, g, or t
ttgcaggctgttgggcttggatatttaacgctgaacagaggttcagcaacgctgagcggcggcgaagcccagcgaattcgccttgcggggcacgtgggtgccggattgcaaggcgttctctatgttttagacgaacccagcattgggcttcacgcacgtgacaatgaaagacttttggctcttttagaaaaacttaggagccaaggaaatagccttattgtggttgagcacgatgaagaaaccataaaacgtgccgactgcattgcagacataggtccgggcgcagggagcgagggcggcttgcttgtggcactcgggagcattaaagatttgaaaaaaaatcccgcttcattgacaggcgcatatttaagcggaaagaggaaaattgaaattcccaaaaaacggcgagaggtgaataatgaaacaccgagaatgaaaatacttggggcacgtgcaaataatttgaaaaacatagatgttgaaattcctctttctgttttcacggtagtaaccggagttagtggttctggcaaaagcactttgataaaccacattctaaaaaaagcactctcaaagaaattccacggtgcttatgaggatccaggcgagcacaaaagcattgagggattgaaacacatagacaaggttatagaaatagaccaaagccccataggaagaacaccccgttccaatcctgctacatacacaaaagtttttgatgagataagaaatttatttgcctgcctgccagaaagcaaagttagaggtttctcaaagagcaggttcagtttcaatgttcatggcggcaggtgcgaaaaatgctgcggggcaggtgtggtggaaatagagatgcaaattttgccgaatgtgcaaataacctgcgatgagtgtggcggcaaacgctttaacgatgcaactcttgaagttttttacaaaggcaaaaacatatacgatattttggaactcagcataagcgaggctcttgaatttttcaaggctttgcccaagatagcaaaaccgttgaatgttttgaaagacattgggcttggatatgttaaacttgggcagccaagtacaacactcagcggcggcgaagcccagagaatgaaaatttccacagaactccgcagacccggaaccggaaaaaccctttacctgctagacgaaccaacaaccggtcttcattttgaagacataaatcgtttgctggaatgtttgcaaaaacttattgaaaacggaaattcaatggttgtaattgaacacaatctggatgtgattaaatgcgcagactggattatagacttaggacccgaagccggagaggaaggcgggtatgtgattgcggaaggcacaccggaaaaaattgtaaaaaattccaaatcgcaaacagggaaatttctatattcccattgtgccatttttactagaaacaaaagaagtatcaaaagcctatag

SEQ ID NO: 47968 - protein, 484 aa, Unknown
  Obtained from environmental sample
  DOMAIN (165)...(436): ABC transporter
  misc_feature (1)..(484): Xaa is any amino acid
MQAVGLGYLTLNRGSATLSGGEAQRIRLAGHVGAGLQGVLYVLDEPSIGLHARDNERLLALLEKLRSQGNSLIVVEHDEETIKRADCIADIGPGAGSEGGLLVALGSIKDLKKNPASLTGAYLSGKRKIEIPKKRREVNNETPRMKILGARANNLKNIDVEIPLSVFTVVTGVSGSGKSTLINHILKKALSKKFHGAYEDPGEHKSIEGLKHIDKVIEIDQSPIGRTPRSNPATYTKVFDEIRNLFACLPESKVRGFSKSRFSFNVHGGRCEKCCGAGVVEIEMQILPNVQITCDECGGKRFNDATLEVFYKGKNIYDILELSISEALEFFKALPKIAKPLNVLKDIGLGYVKLGQPSTTLSGGEAQRMKISTELRRPGTGKTLYLLDEPTTGLHFEDINRLLECLQKLIENGNSMVVIEHNLDVIKCADWIIDLGPEAGEEGGYVIAEGTPEKIVKNSKSQTGKFLYSHCAIFTRNKRSIKSL

SEQ ID NO: 47969 - DNA, 483 bp, Unknown
  Obtained from environmental sample
  misc_feature (1)..(483): n is a, c, g, or t
ttggatcaatccgataacttaggcaaatttgcggcgaccatcaaatacatagacgcggcgacaggcaaagaattaaaaacatttccaagatacagagaaagtctttattcgataagtttcagtcccgacggcgattctattcttttcgggtcaggcgacggcaacataaaaatctgcgacgttttttccggtaaagaaattaaaacattgtcgggacacacaggctggattaattccgtttgtttcagtcacgacggatctcaaattgtttccggctcaggttccaacgacaacaccattaaactctgggacacggagacaggcagggaaataagaacttttgccggacacacttcgtgggtaatttccgtagcgttcagtcccgacagcaaacaaatcctttcaggctcccgcgatacaagcatcaaacagtgggacgcgaagacaggcgaattaatcaggacgattgggacgcagaagtag

SEQ ID NO: 47970 - protein, 160 aa, Unknown
  Obtained from environmental sample
  DOMAIN (65)...(104): WD domain, G-beta repeat
  misc_feature (1)..(160): Xaa is any amino acid
MDQSDNLGKFAATIKYIDAATGKELKTFPRYRESLYSISFSPDGDSILFGSGDGNIKICDVFSGKEIKTLSGHTGWINSVCFSHDGSQIVSGSGSNDNTIKLWDTETGREIRTFAGHTSWVISVAFSPDSKQILSGSRDTSIKQWDAKTGELIRTIGTQK

SEQ ID NO: 47971 - DNA, 735 bp, Unknown
  Obtained from environmental sample
  misc_feature (1)..(735): n is a, c, g, or t
atggtaaatgttaaccggaaatttaaaagcagcgttttctccttcatcttcagtaatcctgatgttttgcgagaactctactgcgcattggagggcataaccctcaagcaggatgtccctgtcgtcatcaacacacttgaggacattctgttcatggacatgattaatgacatttctttcgaaatcggcggtaaactggttgttcttatcgaacaccagtccaccataaacccaaacatagctttgcgcttgcttatgtacataggcagggtttatgaaaaaattcttaatgaggaaaagatttattcatcgacaaaaatcttaatcccaagaccagagttttttgtgttgtacaacggggtaacgccgtttcccgaagaaaaaacaataaaactttcagaactttttgaaagtacggaaagcttaggactttcaaaagacgagtttccggttttggaactggaagtaaaggtattaaatataaacatgggaaaaaacgaggagatagcaaaaaagtgccggacattagccgaatacagcgcgtttatagcgaaggtgagggagtatcaggaaagcggattacccctgaaagaagcggtagaaaagaccgtgcaatattgcaaaaaacatgatatattgaaagagttaatagagaaacacgccaaggagataatgagtatgcttacgacagaatggaattgggacacagcgaaccatgagctaagcgagggataa

SEQ ID NO: 47972 - protein, 244 aa, Unknown
  Obtained from environmental sample
  misc_feature (1)..(244): Xaa is any amino acid
MVNVNRKFKSSVFSFIFSNPDVLRELYCALEGITLKQDVPVVINTLEDILFMDMINDISFEIGGKLVVLIEHQSTINPNIALRLLMYIGRVYEKILNEEKIYSSTKILIPRPEFFVLYNGVTPFPEEKTIKLSELFESTESLGLSKDEFPVLELEVKVLNINMGKNEEIAKKCRTLAEYSAFIAKVREYQESGLPLKEAVEKTVQYCKKHDILKELIEKHAKEIMSMLTTEWNWDTANHELSEG

SEQ ID NO: 47973 - DNA, 300 bp, Unknown
  Obtained from environmental sample
  misc_feature (1)..(300): n is a, c, g, or t
gtgtctatggaagtacttaaagcaagcgttgcaggaacaatggagtccagcgacataatgataaccctggagccaggttcgggaagcatcgagatcgagcttcagagcgtggttgataaacaattcggcgctcagattcgctctgttattgccgacaccctcgccgagcttgaggtaaaaagcgcgaaggtcagcgcagtcgataagggagccctggattgcaccatacaggcgagggtaaagacagcggtttaccgggcatccgggaaagattgtagcgaatggaaggttagcaaatga

SEQ ID NO: 47974 - protein, 99 aa, Unknown
  Obtained from environmental sample
  DOMAIN (3)...(98): Citrate lyase, gamma subunit
  misc_feature (1)..(99): Xaa is any amino acid
MSMEVLKASVAGTMESSDIMITLEPGSGSIEIELQSVVDKQFGAQIRSVIADTLAELEVKSAKVSAVDKGALDCTIQARVKTAVYRASGKDCSEWKVSK

SEQ ID NO: 47975 - DNA, 684 bp, Unknown
  Obtained from environmental sample
  misc_feature (1)..(684): n is a, c, g, or t
ttgatcagatcggcacgagtggccccctatagccccgcgtattatgccgtcatttccggtaagcacgttgatgttaaaatcaacgtccgtctcaagggcagaaagcacgacaacatcgagctgatttaccgccgcgccttctcctttggggctggcgtaatactcagcggagatctgatgatgaaagcggttgtttttaagggagtccgcagccacaagatcaaagctttgaacatcaaggagttttttaataagcccttcctcgtgaagttccacaatggaaccggtaatgcctcccagggcaaaactggcggtgatccctttcgctttcatcttatccctcaaaaaccgggttaccgcgagggaggccccaccggttccggtttgaaaggaaaacccgtcggcaaaacggcccgaagcctctatcacctcggcggctgtttcggctattacaagctctttcgggtttgttgtgaagcgtgtggctcccttcattattccttcaggatcgccaatctcatcaaccttgacgatataatccacatcgctttcaggaataccgaagggtacgttgggataatccactacattgttggtaatgataacggttttccttgcgtactgcgcatcgcatttcgcgtaaccaagggagccacaccttatcctgttgtcgccgtcgcgtga

SEQ ID NO: 47976 - protein, 227 aa, Unknown
  Obtained from environmental sample
  misc_feature (1)..(227): Xaa is any amino acid
MIRSARVAPYSPAYYAVISGKHVDVKINVRLKGRKHDNIELIYRRAFSFGAGVILSGDLMMKAVVFKGVRSHKIKALNIKEFFNKPFLVKFHNGTGNASQGKTGGDPFRFHLIPQKPGYREGGPTGSGLKGKPVGKTARSLYHLGGCFGYYKLFRVCCEACGSLHYSFRIANLINLDDIIHIAFRNTEGYVGIIHYIVGNDNGFPCVLRIAFRVTKGATPYPVVAVA

SEQ ID NO: 47977 - DNA, 594 bp, Unknown
  Obtained from environmental sample
  misc_feature (1)..(594): n is a, c, g, or t
ttgattgatacacttgcctgtttccccccgaacaccctcaggctggaaatcggcatacagacgctcaaccctgaagtttccgcccgtataggcaggccgtcaaatccggataaagagctggagacgctcaggctccttgtggaaaaaacaaatgccattattcacgctgaccttatcgccgggttaccgggtgaaggcgtgtcttcttttggcaaaggctttgacactctgtggaccgcgctctcatctggttgtgataacaaccgcattgagattcaactgggtattttaaaacttctgcccggcgcgcccatcgcgcggcatatagaaccatttggcatgaagtttaactcgctgccgccttatgaactcattgaaagcgtcgacatacccgtatccggccttgaccgcttaaaaaatttcgcccggttttgggaactgatcgtcaatcgcgggcttttaaacataggcccggccccggtatttgaccgttttatggcgctctctgattctcttttggcccattttggccgcaactggggcatagatagatataaactgaaagaagcgataaaaattaggaatgaggagtga

SEQ ID NO: 47978 - protein, 197 aa, Unknown
  Obtained from environmental sample
  misc_feature (1)..(197): Xaa is any amino acid
MIDTLACFPPNTLRLEIGIQTLNPEVSARIGRPSNPDKELETLRLLVEKTNAIIHADLIAGLPGEGVSSFGKGFDTLWTALSSGCDNNRIEIQLGILKLLPGAPIARHIEPFGMKFNSLPPYELIESVDIPVSGLDRLKNFARFWELIVNRGLLNIGPAPVFDRFMALSDSLLAHFGRNWGIDRYKLKEAIKIRNEE

SEQ ID NO: 47979 - DNA, 930 bp, Unknown
  Obtained from environmental sample
  misc_feature (1)..(930): n is a, c, g, or t
ttgagagtgaagccgatgcctcggaggcggaaaagaaccgcctctttgtggagcaggattcaggatatacgccgttacgcgaaagaagaactcggccttaatatgggcaagaattacacacgctatgtcaaaatcgaccgcgattacctggcggccgtggtgtcggcctgcgccgcggactcgttcacgcggcatgagtggaaatacccggtcgtgggcgtcatgccctacaaggggttttttaaggttgaggacgctcgcaaagaacggacaaaacttgagaaaaaaggactcgacgtctggatacggggagttgacgcgttcagtacgctgggctggttcagggatcccctgtattcctatatgcgggactatccccccgacaggcttgccgatctgatcatccatgaatcagttcacgcgacggtttatctcaagggacaagcgcagtttaacgaggagcttgccgaatttgtgggcagcgagggcgcgaggctgtacatcatatcccgttacggagcggactccgccgaatacaggaatatgctcgccgaccaggcggacaacaaacgttatgtgtcattcatccaggagctaatcagggaacttaacgaactgtatgaaagcggaagaagcggagaagaaaaattaagcgaaaaagaaaaaattatcagcgcggcaaaggaacgctttacggcggagtatgaaaaaattttttcaagagagggctaccggggctttttggatatgcccgtaaacaacgcctaccttgaattgtaccgcctgtattacaccgaggattcctatatcgccaacctgttcgcgaattccggcaggaccctgcctgaattcatcgccgcggccaaatcaattcccaaaaaaggcaacggaagggaaatgctggcgcaagcattacaaaacaacaaataa

SEQ ID NO: 47980 - protein, 309 aa, Unknown
  Obtained from environmental sample
  misc_feature (1)..(309): Xaa is any amino acid
MRVKPMPRRRKRTASLWSRIQDIRRYAKEELGLNMGKNYTRYVKIDRDYLAAVVSACAADSFTRHEWKYPVVGVMPYKGFFKVEDARKERTKLEKKGLDVWIRGVDAFSTLGWFRDPLYSYMRDYPPDRLADLIIHESVHATVYLKGQAQFNEELAEFVGSEGARLYIISRYGADSAEYRNMLADQADNKRYVSFIQELIRELNELYESGRSGEEKLSEKEKIISAAKERFTAEYEKIFSREGYRGFLDMPVNNAYLELYRLYYTEDSYIANLFANSGRTLPEFIAAAKSIPKKGNGREMLAQALQNNK

SEQ ID NO: 47981 - DNA, 441 bp, Unknown
  Obtained from environmental sample
  misc_feature (1)..(441): n is a, c, g, or t
ttgcccgcgcaaaacggacaggctgttgactggatggggctgtttgccctgagcgcaggattcggccttgaggaaacggcggaacaataccgccacaacggcgatgactacagtgccctgctgctggcaagcctggcaaacgccctggcggaagcctttaccgaagaactgcaccttcgcgtccgccgggaatggtggggctacgcgccggacgaatccctttctatagaagaaatactgaaaggaaagtttaccggcatacgtcccgcctttggctacccttcctgcccaaaccacgaagataaacgaatctgttttgatctgcttgaagctgaaaaacgctgcggcctaaagctgacagataccgcgatgattatccctgccgcatctgtctgcgggatgttttttgcaagtcccgcgtcgtattattttagtgtttaa

SEQ ID NO: 47982 - protein, 146 aa, Unknown
  Obtained from environmental sample
  DOMAIN (9)...(146): Vitamin B12 dependent methionine synthase, activation domain
  misc_feature (1)..(146): Xaa is any amino acid
MPAQNGQAVDWMGLFALSAGFGLEETAEQYRHNGDDYSALLLASLANALAEAFTEELHLRVRREWWGYAPDESLSIEEILKGKFTGIRPAFGYPSCPNHEDKRICFDLLEAEKRCGLKLTDTAMIIPAASVCGMFFASPASYYFSV

SEQ ID NO: 47983 - DNA, 1005 bp, Unknown
  Obtained from environmental sample
  misc_feature (1)..(1005): n is a, c, g, or t
gtgcgcattgttcacgccatgttgcgtggcattgacgattttattgaaacggacgcacttgaattgctgaaccagcagaagacagcccttgaaattatcgaaggccccctgatggacggcatgaaagaagtcgggaaaaggttcgacgagggaactatttaccttccccatgttatacgcagcgcgagagtaatgaaaaaggccgccgcggcgcttgagccctacatgggcgaagttaacagcgctaacaacgcgcctaaagtaattcttgcaaccgtaaaaggcgatgtccacgatattggcaaaaacatcgtcggcattgtcctggcctgcaatgggtatcaggttattgaccttggggtaatggttcccgccgaacagatacttgatgccgcggaaaaagaacaggcggcagtaatcggcctttccggactaatcgccccctcgctggatgagatggcgcacattgccaaagaaatggaaaagcggcgcatgaagattcccctgcttgtcgggggcgcggcggcaaaccttgtccacaccagtctgcgccttgccccggaatattcaggcccggtggtttatgtgcctaacgcgggaaaatccgccgagacagtacgcgccctgctttccgactcacagcgtccgcgttttctgcgggaattggaaaaaacttatcaggacgcggcccagcggcatgaggaaatccagtcccgacttgagatcatttcgcttgaactggcccgcgccaacagagtccctccggctatatacaaaccggtcgcgccgaaaaccgccggtattatcagcctggatgattaccctataaatagagtaatcccgtatattgaatggcagtcatttttacgaggatggaatgcacaaaaagcatctaacacaattttggacgatgcgaaacgtctgcttgaacaggtagaaactaaaaaccttttgcagccccggggcgttatgggaattttccccgccttttcagatgacgaatga

SEQ ID NO: 47984 - protein, 334 aa, Unknown
  Obtained from environmental sample
  DOMAIN (86)...(210): B12 binding domain
  misc_feature (1)..(334): Xaa is any amino acid
MRIVHAMLRGIDDFIETDALELLNQQKTALEIIEGPLMDGMKEVGKRFDEGTIYLPHVIRSARVMKKAAAALEPYMGEVNSANNAPKVILATVKGDVHDIGKNIVGIVLACNGYQVIDLGVMVPAEQILDAAEKEQAAVIGLSGLIAPSLDEMAHIAKEMEKRRMKIPLLVGGAAANLVHTSLRLAPEYSGPVVYVPNAGKSAETVRALLSDSQRPRFLRELEKTYQDAAQRHEEIQSRLEIISLELARANRVPPAIYKPVAPKTAGIISLDDYPINRVIPYIEWQSFLRGWNAQKASNTILDDAKRLLEQVETKNLLQPRGVMGIFPAFSDDE

SEQ ID NO: 47985 - DNA, 1344 bp, Unknown
  Obtained from environmental sample
  misc_feature (1)..(1344): n is a, c, g, or t
ttgctggataccgccgagcgttttgagccggggattaggcggagtaccctcaagattgaaggggtacacgcgatttatccctatctgaaagaactgcacgaactgctggatactcgtgtcaaattaccgctgctggtagactgtctgaactgcgaaaaaggctgcatcggcggccccggtacgggaaacgataacaaaccgcttgctttgcttgaagaccctgtgcgcaaacgcatgactgaactggaaaaaaaacaaaattcctcaatcggaaaaaacgcgtacaaaaaataccataacgttttgaaaaagtactggaaaaagaacctgtataaccggagctatgttgatctttccaataacaatatgatcaagcatccaaacgagtctgaaatgactgaaatcttccacaacatgaaaaaattcaaaaaggaagatatatacaactgtacatgctgcggttacggaagctgcgaagcgatggcaacggcaatctacaacgaccttaacaaagcggaaaattgcgcccattatattcttgccctgctcctggagaaaaccgattccgaggagaataaccgtcttcagcttcaggaacacattggccgcgcgacaggacttattgacggaataaacgatttaataagtaaactgaatgccactatcaattcgcaggcggaaacaatcgcacagtcttcggtggcaaccgaaaaaatgatcacctcgctcagggaaacttcagaaatttccagaagcaaacaggaggcgataaaagggttgatagaaaacaccgccaaaagcgaagaatccatgcgggaaaccattcaatcaattgaggatatttccaaatcggtggaaggcatagcgcaggcgattaaaataatcagttcaatagcggctaacaccaatttattgtccatgaacgcggcgatagaatccgcccacgcgggcgaagcgggcaggggctttagcgtggttgccggcgagatacgtcgcctttctgaaactaccagggaaaattcggtgaacatttccaggacgttgaaaagcattattgacggagtggccgttactgaaaaacaatctgacgacaccggaacgcgtattagcaaaatgtcaaaggaaatcaacagttttgccgaaactatatccggtttaatcaataccttcggagaactttcggcgcatagcggcgaaattacctccgctctagataaccttcaaagtcaaagcgaaatggtaaaaaccgattatgccgagatactgtccatgacggacaagctgcgcgtggcaatgcttaatttgactatgctgtcgaaaaaaaacgcatcgcctggcgcctga

SEQ ID NO: 47986 - protein, 447 aa, Unknown
  Obtained from environmental sample
  DOMAIN (223)...(431): Methyl-accepting chemotaxis protein (MCP) signaling domain
  misc_feature (1)..(447): Xaa is any amino acid
MLDTAERFEPGIRRSTLKIEGVHAIYPYLKELHELLDTRVKLPLLVDCLNCEKGCIGGPGTGNDNKPLALLEDPVRKRMTELEKKQNSSIGKNAYKKYHNVLKKYWKKNLYNRSYVDLSNNNMIKHPNESEMTEIFHNMKKFKKEDIYNCTCCGYGSCEAMATAIYNDLNKAENCAHYILALLLEKTDSEENNRLQLQEHIGRATGLIDGINDLISKLNATINSQAETIAQSSVATEKMITSLRETSEISRSKQEAIKGLIENTAKSEESMRETIQSIEDISKSVEGIAQAIKIISSIAANTNLLSMNAAIESAHAGEAGRGFSVVAGEIRRLSETTRENSVNISRTLKSIIDGVAVTEKQSDDTGTRISKMSKEINSFAETISGLINTFGELSAHSGEITSALDNLQSQSEMVKTDYAEILSMTDKLRVAMLNLTMLSKKNASPGA

SEQ ID NO: 47987 - DNA, 1449 bp, Unknown
  Obtained from environmental sample
  misc_feature (1)..(1449): n is a, c, g, or t
atgttttatccaattcaaaacgcatatttgtattttcaccgtattgtgatattataccataaggagacaattatgggaaactctcttccttcggaacaggccgatatcggccttatcgggcttgcggttatgggtgaaaatcttgtgctgaaccttgaaagcaaagggtttcacacggcggtttacaaccgtacaacttccaaagtggacgattttcttgacgggcgcggaaaaggcaaaaaaattaccggctgtaagacgcttggggaaatggccgccgctttaagcaagccgcgcaaagccatgattatggtaaaggccgggcaggctgtggatattaccatcgaacagcttttggatgtttttgaaaaaggcgacattataatcgacgggggcaattccaattatcaggacacaatacgccgaacggaatatgtcgagtcaaaggggcttttgtatatagggacgggagtttcaggcggagaggaaggcgcgcttaccggtccaagcataatgccgggcggctctccggcggcgtggccccatgttaaaaatatttttcaggcaatcagcgccaaagtcgaaggaaacgcgccctgctgcgattgggtaggcgaaaacgnggcggggcattttgtaaaaatggttcataacggaattgaatacggcgatatgcagttaatctgcgaaacttacgatttaatgaagaacgtcctcggtttatcctgcgaggaaatgggcaatgtgtttgacgaatggaacaagggggctttgggaagctacctaatcgaaataacaagggatattcttcgtttcaaagacagcgatggcaagcctcttgcggataaaattctggacactgccggacaaaagggaaccggcaaatggacgggaatcgccgcgcttgaattcggggtgccccttaccttaataggcgaggctgtctttggacgctgtctttccgccgctaaggacgagcgcgtaaaagcggcaaaagttttttccgctccaaaaatcacttctgtggctgataaggcggcgtttatcaaggatttggaaaaggcgctttacgcgtcaaaaatagtttcttacgctcaaggctacctgttaatgagggaagccgcgaaagaatacaaatggaacctcaattacggcggaatcgcccttatgtggagaggcggctgtattatccgctcggttttcctcggtaaaataaaagaggcttttgacataaaccccaatcttgaaaaccttttactcgatcctttcttctcaaaaacaatagaggaagccggaacgtcatggaggcgcgttgtttcaaccgctgtgcttaacggaattcccgcccccgccctttcaagcgccctctcctacttcgacggttaccgaagcgagcgccttccggcgaacctgcttcaggcgcaaagggattattctcggccgatctga

SEQ ID NO: 47988 - protein, 482 aa, Unknown
  Obtained from environmental sample
  DOMAIN (33)...(206): NAD binding domain of 6-phosphogluconate dehydrogenase
  misc_feature (1)..(482): Xaa is any amino acid
MFYPIQNAYLYFHRIVILYHKETIMGNSLPSEQADIGLIGLAVMGENLVLNLESKGFHTAVYNRTTSKVDDFLDGRGKGKKITGCKTLGEMAAALSKPRKAMIMVKAGQAVDITIEQLLDVFEKGDIIIDGGNSNYQDTIRRTEYVESKGLLYIGTGVSGGEEGALTGPSIMPGGSPAAWPHVKNIFQAISAKVEGNAPCCDWVGENXAGHFVKMVHNGIEYGDMQLICETYDLMKNVLGLSCEEMGNVFDEWNKGALGSYLIEITRDILRFKDSDGKPLADKILDTAGQKGTGKWTGIAALEFGVPLTLIGEAVFGRCLSAAKDERVKAAKVFSAPKITSVADKAAFIKDLEKALYASKIVSYAQGYLLMREAAKEYKWNLNYGGIALMWRGGCIIRSVFLGKIKEAFDINPNLENLLLDPFFSKTIEEAGTSWRRVVSTAVLNGIPAPALSSALSYFDGYRSERLPANLLQAQRDYSRPI

SEQ ID NO: 47989 - DNA, 453 bp, Unknown
  Obtained from environmental sample
  misc_feature (1)..(453): n is a, c, g, or t
gtggcacagtcagttagggataaaacacctccccacgatgatgaattggaacaggctacgttaggcagtctgttggcggatagcgaagccgtatccgccgcgattcagtttcatcttaactttaacgatttttattcccgcagaaactcccgcatctttgaagctatcatgagtcttgattcaaaaggactgcgtccggatattcagaccgtagttcaagaattaaaacagttggggaagctggacgaagccgggggcgcgtcctatgtttcaagtctgacgacggttattccctcaagcgcgaatattgaatattacgcgcagatggtaaaaaattactccgttaaaagagcgctgttaaacgtggcgtcggaaataggggtagacgtatacgacgaatcattggaagcggcgggaatactggaagaagttcnaaganaatttttcaattaa

SEQ ID NO: 47990 - protein, 150 aa, Unknown
  Obtained from environmental sample
  DOMAIN (9)...(112): DnaB-like helicase N terminal domain
  misc_feature (1)..(150): Xaa is any amino acid
MAQSVRDKTPPHDDELEQATLGSLLADSEAVSAAIQFHLNFNDFYSRRNSRIFEAIMSLDSKGLRPDIQTVVQELKQLGKLDEAGGASYVSSLTTVIPSSANIEYYAQMVKNYSVKRALLNVASEIGVDVYDESLEAAGILEEVXRXFFN

SEQ ID NO: 47991 - DNA, 468 bp, Unknown
  Obtained from environmental sample
  misc_feature (1)..(468): n is a, c, g, or t
atgatcaaagtaatcgaaggccgtagggcggaaatagacgcgcgtaaagaacaaaaacgcatggacgccagggggttaaaagaaaaacttgacgcgtttgaactttcccttacgatgccggcgggggcgaacggcaaactctacggcgctgtgacaaatcaaactatcgcggacgaacttgccaaaaacggatttcaaattgagcgtaagcgcatagaaatcgcgggcaatggatttaagaacgtgggcaaatacaaggctgtaattaaactctatgagaaccagtctgcggaaataacgattacgattatcgcgcaggaaataaagactgaagctccagcttccaagccaactcctcggcgcggcagaaaagaccgtcatgaagccgaagcgcaggagactcctcccgccgaagaaacttccgcggctgtcgccactgaagaaaaagcggaaaccaaagccgaataa

SEQ ID NO: 47992 - protein, 155 aa, Unknown
  Obtained from environmental sample
  DOMAIN (20)...(106): Ribosomal protein L9, C-terminal domain
  misc_feature (1)..(155): Xaa is any amino acid
MIKVIEGRRAEIDARKEQKRMDARGLKEKLDAFELSLTMPAGANGKLYGAVTNQTIADELAKNGFQIERKRIEIAGNGFKNVGKYKAVIKLYENQSAEITITIIAQEIKTEAPASKPTPRRGRKDRHEAEAQETPPAEETSAAVATEEKAETKAE

SEQ ID NO: 47993 - DNA, 753 bp, Unknown
  Obtained from environmental sample
  misc_feature (1)..(753): n is a, c, g, or t
gtgactcggaacaccgctgacagcggcggatccggcggcgccaagatgtccgtcgttgaccacctcgaggcgctccggtgggcgctcattcgttgcgtntgcgccgtcgtcgtctgcgcagtcccgtgcggggtctactggcggcgcatcttcgagttcgctgcggtgcgtccgatgaacctcagcgggccggccgccaagctcatctacaccgcgcccgccgaggcggttatgctcagcgtcaaaatcgcgctcgcctgcggtctggtggccgcctcgccgtatctattttgggaggcgtggcgcttcgtctccccggggctgtataaaaaggaaaaggccgtcgtcctccccgccgcactcgcctccacaatctgcttcctccttggcatcgcgttctgctactccgtcctccccacggtgctgaagttcttaaccggattcgccgcggggcagatcgacccgtatttcaaaatcgacgagtacctgagcttcctcacgagcatgtgcttggccttcggcgccgcttttgagttgccggtggttgctttcgtcttagccaagatgggggtgatagaccgccgcttcttgatcaggcacacccgctacgccgtggtggcgatattcatagccgccgcgctcttgacgccgcccgacgtcctgtcgcaggtgcttctggcgctgccgctcttggcgctttacgctctgggggcgggcgtggcattcttggcggggaggccgaagaacgggtag

SEQ ID NO: 47994 - protein, 250 aa, Unknown
  Obtained from environmental sample
  DOMAIN (27)...(229): Sec-independent protein translocase protein (TatC)
  misc_feature (1)..(250): Xaa is any amino acid
MTRNTADSGGSGGAKMSVVDHLEALRWALIRCVCAVVVCAVPCGVYWRRIFEFAAVRPMNLSGPAAKLIYTAPAEAVMLSVKIALACGLVAASPYLFWEAWRFVSPGLYKKEKAVVLPAALASTICFLLGIAFCYSVLPTVLKFLTGFAAGQIDPYFKIDEYLSFLTSMCLAFGAAFELPVVAFVLAKMGVIDRRFLIRHTRYAVVAIFIAAALLTPPDVLSQVLLALPLLALYALGAGVAFLAGRPKNG

SEQ ID NO: 47995 - DNA, 756 bp, Unknown
  Obtained from environmental sample
  misc_feature (1)..(756): n is a, c, g, or t
ttgagtatgtccttgccgtcgattccatcctttgtattgtcgggattactgttgatttgtttgccgttttcttcatttgccagcgccaccacatcacatatctctttcagctacgccgcccgccagcggatgcaaaaccgtgcgcgtttattaaaacagtaccaaactcatctgaaaaagcaggccagctatattgtggaaggcaatgccgaaagcaaaagggcgctacgccagcacaaccgggagcagataaaacagcatccagaatggtttcctgctccgctcaaggcgagtgacagacgctggcaggcgctggcggaaaacaaccactttttaagcagcgaccatctgcataacattaccgaagtggcgattcaccgcctggagcagcagcttggcaagccttacgtctggggcggtacgcggcctgataaaggctttgactgtagcgggttggttttttatgcctacaacaagatccttgaggctaagctcccgcgcacggccaatgagatgtaccactatcgccgggcaacgattgtggcgaacaacgacctgcgccggggagatttgctgtttttccatatccacagccgcgagatagccgatcatatgggcgtgtatttgggcgatgggcaatttatcgagtcgccacgtaccggcgaaaccattcggataagccgattagccgaacctttctggcaggaccattttttgggcgcgcgcaggattttgacggaagagacgattttgtag

SEQ ID NO: 47996 - protein, 251 aa, Unknown
  Obtained from environmental sample
  SIGNAL (1)...(27)
  DOMAIN (133)...(243): NlpC/P60 family
  misc_feature (1)..(251): Xaa is any amino acid
MSMSLPSIPSFVLSGLLLICLPFSSFASATTSHISFSYAARQRMQNRARLLKQYQTHLKKQASYIVEGNAESKRALRQHNREQIKQHPEWFPAPLKASDRRWQALAENNHFLSSDHLHNITEVAIHRLEQQLGKPYVWGGTRPDKGFDCSGLVFYAYNKILEAKLPRTANEMYHYRRATIVANNDLRRGDLLFFHIHSREIADHMGVYLGDGQFIESPRTGETIRISRLAEPFWQDHFLGARRILTEETIL

SEQ ID NO: 47997 - DNA, 807 bp, Unknown
  Obtained from environmental sample
  misc_feature (1)..(807): n is a, c, g, or t
atgacaatttttatgaaacattctattccctttggagagaaaattaacccaaaggaaattccggcgaggcggggtttttcggtttcgtatctggggaaaacccttctatcaaatatcgatcctgtcgcccaggctgaacgcttggcggcgggcattgaactaaaagaaagtacgctttatctctctccctctcccctttatgggtatggcattccgctgcttcttgaaaagatgccttccaattcggcgattctttgcgtggaggctgacgaaaaactctatgaactatccaaacgaaccatgggggcggaagccgaattgctccagaatcttccgaaaagcagaaaaataaaacctttttttcttgttcaggcaaaagaagcggaaagcatttgcgcgtttgcaagaagcatatggggagaaagggtttttcgtcgtgtagaaacaattcgccttaccggaggctggcagctattccagcgtctttacgacgatatggaaaccgctctcgggcgggaaatcgccgtggaatggagcaacgccatgaccttgatacgccttggccgcctttattccaaaaacttaattcgcaacctcgcgtattttagccgcgctgatgcagatggcccggattggtgttccgcagcgatcctggcgcttggtgcgggcccttccctggatccatttttaagcgagttatacgctttatacgaagggaaaattcccgaaccggggaaaaggcgctttaggataatctgcgtgggcgcctgcctccctgccccttgccgaatggaacattttacctga

SEQ ID NO: 47998 - protein, 268 aa, Unknown
  Obtained from environmental sample
  misc_feature (1)..(268): Xaa is any amino acid
MTIFMKHSIPFGEKINPKEIPARRGFSVSYLGKTLLSNIDPVAQAERLAAGIELKESTLYLSPSPLYGYGIPLLLEKMPSNSAILCVEADEKLYELSKRTMGAEAELLQNLPKSRKIKPFFLVQAKEAESICAFARSIWGERVFRRVETIRLTGGWQLFQRLYDDMETALGREIAVEWSNAMTLIRLGRLYSKNLIRNLAYFSRADADGPDWCSAAILALGAGPSLDPFLSELYALYEGKIPEPGKRRFRIICVGACLPAPCRMEHFT

SEQ ID NO: 47999 - DNA, 909 bp, Unknown
  Obtained from environmental sample
  misc_feature (1)..(909): n is a, c, g, or t
gtgaaagttattgactttttgaagcgcgccaaagtgaccggagggagagtagtgctgaccggcgggattaccctgaaccggcacattatccgctttatccgcgaaaaggccccgcagattgaatttatcatccccgaaaccgcgccggtgttcgaggcgctgggcgcggcggcgctggccccgcagtcgggaagccgtctgcccccggcggacaaactcctcaaacccaatgaagtccgtttcggcacattgggggcgctgcgggactggaagaacaaggtaaaattctttgaaaagcaggatggaaaagtccgcgccgaccgcagctacattctcggcgttgacggcggctccaccaccaccaaggcgtgtcttgtggatacggaaaccgatgaagttgtggcaagccattacgggcgcacccacggcgatccggtcaaggccctcaaggaatgtctggcgataattcaggaaaaagtcgtcgccgacaccggcggcaaaaaaatcgacatacggcttgtgtccaccaccggttccagccgggagattctcggcgtgtttctggaaacgccgggcgtgtataacgaaattatcgcccactcggttggcaccacttattttgacaaagaagttgagacaatttttgaaatcggcggccaggacgcgaagtatgtgctgttgaaaaacggcgtgccgattgattacgcgatgaacgaggcgtgttccgcggggaccggttcctttctggaagaatccgcctccggcgacctctcgatacacagcgcccgggatattggccccatcgcgctggaagcgggcgcgccctgcaaattcggcgacactgttccgcgtttattaacagcgacatccgcaaggcggtacagcagggcgccggaagggaaaacataa

SEQ ID NO: 48000 - protein, 302 aa, Unknown
  Obtained from environmental sample
  DOMAIN (112)...(300): BadF/BadG/BcrA/BcrD ATPase family
  misc_feature (1)..(302): Xaa is any amino acid
MKVIDFLKRAKVTGGRVVLTGGITLNRHIIRFIREKAPQIEFIIPETAPVFEALGAAALAPQSGSRLPPADKLLKPNEVRFGTLGALRDWKNKVKFFEKQDGKVRADRSYILGVDGGSTTTKACLVDTETDEVVASHYGRTHGDPVKALKECLAIIQEKVVADTGGKKIDIRLVSTTGSSREILGVFLETPGVYNEIIAHSVGTTYFDKEVETIFEIGGQDAKYVLLKNGVPIDYAMNEACSAGTGSFLEESASGDLSIHSARDIGPIALEAGAPCKFGDTVPRLLTATSARRYSRAPEGKT

SEQ ID NO: 48001 - DNA, 807 bp, Unknown
  Obtained from environmental sample
  misc_feature (1)..(807): n is a, c, g, or t
atggccgtgatgggcgagttcaagaagcacatcgcctcgtcgggcaggtccgacatcctgctgcacaccaccggatgcaccgggcgctgcagcaaagagcccatcgtgagcgtcctggtccccggccagccccccgcaaagtacgagagggtcaacagggaacaggcccacaagatattcgtctcgcacgtccagggccagaccccgctgcccgaaatagcgctggacgactccatgagtgaagaggccgccgccggcaagttgacgaccgaagacccggtctccaagcacttcctggatctctacggggacgtgccattcttcaaggcgcagaagcgcatcgccatgcggaacagcggcgtactggaccccgactcgctggaggagtacgtccgcctggatggcttcaaggccctggccacctgcctcggcaagggcgacccccagtggataatcaacgagatactcaaatccaaaatcaggggcaggggcggcggcggcttccccacgggcaagaaatggcagatgatggcggagcagcccgaaaagctgcgctacatcgtgtgcaacggcgatgaaggcgacccaggcgcgttcatggatcgcggcatgttggagtccgacccattcaacgtggtggagggcatgatcatcggcgcgtacgccgtcggggcaaaaaagggcttctattacatcagggccgaatacccgctggccatcaagcgcatccagaatgccatagaccagtgccgcgcnaatgggctgctgggcgaaacatcatggactccgggtggtcattcgacatag

SEQ ID NO: 48002 - protein, 268 aa, Unknown
  Obtained from environmental sample
  DOMAIN (134)...(266): Respiratory-chain NADH dehydrogenase 51 Kd subunit
  misc_feature (1)..(268): Xaa is any amino acid
MAVMGEFKKHIASSGRSDILLHTTGCTGRCSKEPIVSVLVPGQPPAKYERVNREQAHKIFVSHVQGQTPLPEIALDDSMSEEAAAGKLTTEDPVSKHFLDLYGDVPFFKAQKRIAMRNSGVLDPDSLEEYVRLDGFKALATCLGKGDPQWIINEILKSKIRGRGGGGFPTGKKWQMMAEQPEKLRYIVCNGDEGDPGAFMDRGMLESDPFNVVEGMIIGAYAVGAKKGFYYIRAEYPLAIKRIQNAIDQCRANGLLGETSWTPGGHST

SEQ ID NO: 48003 - DNA, 1482 bp, Unknown
  Obtained from environmental sample
  misc_feature (1)..(1482): n is a, c, g, or t
gtggagatagaggaggcggcgctcaacgggcccgtcgccatggcgtttcatacgtatatgcgcgcccgtgagtatgtctacggcgacgccgcggactctcgcgatgtgtcgctgatggacattgccttgatggggatgagggaactgaggaaaaaagggctgcttgacgatttggacgcttccgacgaggtgaacgcttgcagcattgtcgttccggctgtcgtagacggcgagactgaggattggcttgtgatgttcaagaacgagacgcacaaccatcccacagagatagaaccgttgggcggcgcggcgacctgtttgggcggcgcgatccgcgacccgctttcggggcgctcttacgtctaccaggcgatgcgtgtgaccggcgcgggcgatccccgcgccgccgtgggtgagacgatgcagggcaaactgccgcagcgcaagataacgacgctcgccgcgcaggggtacagttcctacggcaaccagatcggcctcgccaccggcatcgtctccgaggtgtaccacaatggttacattgcaaaacgtatggagataggcgcggttgtcggcgccgttcccaaatcgcacgtggtacggcgcgaaccggtgcccggcgacgtcgttgttctcctcggcggcaggacggggcgcgacgggtgcggcggggcgacggggtcgtccaaggagcataccgaggagtcgatacagacctgcggcgcggaggtgcagaagggcaacgcccccaccgagcgcaagatacagcggctcttccgggatccggaggtcggcaggatgatccgccgctgcaacgatttcggcgcgggcggggttgccgtggccgtcggcgagctggccgccggactcgacatcttcttagacgccgtacccaaaaagtatgaggggctcgacgggacggaactcgccatatcagagtcgcaagagcgcatggcggtggtgatcagttcgtcggatttaaaggcttttcaggctaaggcggagggtgagaatttggagaccgccgtcgtcgcgacggtgacggacgccggccgtctcaggatgttctggcgggagacggcgatcgtagacatcagccgcgactttatagacacgaacggcgtattgcagaaagcggaggtttttgtcaagtccccgaaggcgctctacctgccaaacgtattgtctatgacgtctaagtgcagggacgaggccggcgacgccgcgggcgcttttttcgatacgatgacggacataaacgcctgcagccagcgcggtttgaaggagatgttcgacagttccataggggccggcaccgtgctcatgcccttcggcggcaggtaccagcggacgccggcggaggcgatggtcgcgaagttgccggtggcaagcggcgagacggttacgggaacggccatgagctacggcttcgacccctacctctcctctggagcccctccacggcgcgatactcggccataa

SEQ ID NO: 48004 - protein, 493 aa, Unknown
  Obtained from environmental sample
  DOMAIN (205)...(358): AIR synthase related protein, C-terminal domain
  misc_feature (1)..(493): Xaa is any amino acid
MEIEEAALNGPVAMAFHTYMRAREYVYGDAADSRDVSLMDIALMGMRELRKKGLLDDLDASDEVNACSIVVPAVVDGETEDWLVMFKNETHNHPTEIEPLGGAATCLGGAIRDPLSGRSYVYQAMRVTGAGDPRAAVGETMQGKLPQRKITTLAAQGYSSYGNQIGLATGIVSEVYHNGYIAKRMEIGAVVGAVPKSHVVRREPVPGDVVVLLGGRTGRDGCGGATGSSKEHTEESIQTCGAEVQKGNAPTERKIQRLFRDPEVGRMIRRCNDFGAGGVAVAVGELAAGLDIFLDAVPKKYEGLDGTELAISESQERMAVVISSSDLKAFQAKAEGENLETAVVATVTDAGRLRMFWRETAIVDISRDFIDTNGVLQKAEVFVKSPKALYLPNVLSMTSKCRDEAGDAAGAFFDTMTDINACSQRGLKEMFDSSIGAGTVLMPFGGRYQRTPAEAMVAKLPVASGETVTGTAMSYGFDPYLSSGAPPRRDTRP

SEQ ID NO: 48005 - DNA, 498 bp, Unknown
  Obtained from environmental sample
  misc_feature (1)..(498): n is a, c, g, or t
ttggccgcccgaccagacccacgtcggccagcaccttcagcaccagcttcagcttcctctcctcgcccggcttgcccggttcgcagaaccgcgggttcgggtcgtggaaagaggccagcgccgcgttcccgcgcccgccccgtccgcctttcgcgactaattcttgccgtccttcgttcaggcagtcgaacaatatctcgcccgtgccgtcgtcgtagacgattgtgcctaagggtacggggatcacgacgtcctccgcgcttctgccggtttggttcttccccttgccgtgcgcgccgcgttcggctttgtaatgccgcctataggccacgtcttgcagggtatggatctgctttgacccggagagatagatgtgcccgccccgtccgccgtcgccgccgtcgggccgccccttgggtttatacttctgcctctcgtaagagtggcacccgttgccgccgtctccggcctttaactcgattgttgtctcgtctataa

SEQ ID NO: 48006 - protein, 165 aa, Unknown
  Obtained from environmental sample
  misc_feature (1)..(165): Xaa is any amino acid
MAARPDPRRPAPSAPASASSPRPACPVRRTAGSGRGKRPAPRSRARPVRLSRLILAVLRSGSRTISRPCRRRRRLCLRVRGSRRPPRFCRFGSSPCRARRVRLCNAAYRPRLAGYGSALTRRDRCARPVRRRRRRAAPWVYTSASRKSGTRCRRLRPLTRLLSRL

SEQ ID NO: 48007 - DNA, 849 bp, Unknown
  Obtained from environmental sample
  misc_feature (1)..(849): n is a, c, g, or t
atggatcaaaatcaggattcccttccggcgcgggatgtagagagcttcctgcgtgaggtagagagaacgctggataatcctgttaaacctgaacggggtgaaagccttaaggtaggcttggatttgggaacggcatctatcgtattagtggctttaggggaaaactgcagaccactggcggtagtcagggaattttcccaggtggtaaaagacggtcttgttgtggattttaacaaggccaggatgattaccgcatccctgaaaaagcagatggaggacattctgggggtggaattgacagaaacggcaattgccgttcccccgggtaccggcagccgggacgtggcgacgcatggttatgttgcctccgcggcaggtttggaagtcaccaatgtattggacgaacctgttgcggcaaacctggtgttgggaatacgggatggggcgattgccgatattggcggcggtaccaccggggtgtctattttgaaggacggggagcttgtctattcctttgacgagcctaccggaggaacccacgtgagccttgtgcttgcggggcataaccgcatcagctttgaggaagcggaagccatgaagcaggaaccggccaggagcagggaaattctgccggttatcgccccggtgctgcagaagattggcagtattatcgggaagggtattgccgcctatgaatgcggggaaataatccttgtagggggaactgcctccatagcgggaatagaccggatcatagggatggagaccggaaaaaaggtaagggttagccctgtgccgattctggtaacccccgccggaatcgccttgagttataaaccggcgtgctaa

SEQ ID NO: 48008 - protein, 282 aa, Unknown
  Obtained from environmental sample
  DOMAIN (35)...(280): MreB/Mbl protein
  misc_feature (1)..(282): Xaa is any amino acid
MDQNQDSLPARDVESFLREVERTLDNPVKPERGESLKVGLDLGTASIVLVALGENCRPLAVVREFSQVVKDGLVVDFNKARMITASLKKQMEDILGVELTETAIAVPPGTGSRDVATHGYVASAAGLEVTNVLDEPVAANLVLGIRDGAIADIGGGTTGVSILKDGELVYSFDEPTGGTHVSLVLAGHNRISFEEAEAMKQEPARSREILPVIAPVLQKIGSIIGKGIAAYECGEIILVGGTASIAGIDRIIGMETGKKVRVSPVPILVTPAGIALSYKPAC

SEQ ID NO: 48009 - DNA, 510 bp, Unknown
  Obtained from environmental sample
  misc_feature (1)..(510): n is a, c, g, or t
ttgctgggacaggaaactcgtgtgggccctcaattcccttattccaaagaaaagcttatgccggttttgggattctatgttgaagaaaattgggaaaaggcatgcgagcgttgtattgagattcttatggctgaaggggccggtcataccatgagtatccattcccgcgatgaacatataatacgggaattcggcctaaaaaaaccggtttcccggctcattgtcaattcgcccgcagcactggcgggggttggggccacgacgggactggtaccctcgctgacattaggctgcggcgcggtggggggtaacgccagttctgataatatcggcccattgaaccttatcaatatacgccgggtggcctacggcttactggaaatagaagatataaggcaaaaaaataacgtaactgccggccactcttcaccgcttaacagcgcgcaattcagcgaggaaacggttaaccttatagtaaaaacgattatgaaacaacttaaagccggttaa

SEQ ID NO: 48010 - protein, 169 aa, Unknown
  Obtained from environmental sample
  misc_feature (1)..(169): Xaa is any amino acid
MLGQETRVGPQFPYSKEKLMPVLGFYVEENWEKACERCIEILMAEGAGHTMSIHSRDEHIIREFGLKKPVSRLIVNSPAALAGVGATTGLVPSLTLGCGAVGGNASSDNIGPLNLINIRRVAYGLLEIEDIRQKNNVTAGHSSPLNSAQFSEETVNLIVKTIMKQLKAG

SEQ ID NO: 48011 - DNA, 777 bp, Unknown
  Obtained from environmental sample
  misc_feature (1)..(777): n is a, c, g, or t
ttgccaaaaggagtttttatgaaaaggatattggttttaacggtttgcgttgttttcctgagcgttatattagcaggatgtggaggaatcgagacgaatgcattagtgggcacttgggtattggaagatgggcagccatttgtcagcgaagatattgcaacggattatagcctgtcaaagaacgggaaaggatttgctgatataaaaaaaacaatatcatggaaaatagaaaacaagcatttggtaattacttatgaagaaacttcaaagacatttgaacttgactataaactaaaaggcaaaaaccttattatttcttttggcggcaaagatcatgcatatattaaaacatccggaaattcagatgatttaaaaaaatggcggtcttctatagacattgaccctgttaatgatgaaaaaaatatctatttcagggttgtttctaaagatggcaattctcgtttgtatatcaggcaacttgggaaaaaatcccaggaaatgtatatttattggggtgatgatattgaaattgaccgttcaaatattgctttccgtattgatgacggggaagcgcaaacctcaagatgggatattaccaggggaaagggctttacaatatattccgggaatgtgcttcaagtaattaaacgtttgctggatgcaaaacaagtggtggctagaggcagttctaccaaaggtgaattaaccgcaacttttgatgtaacaggtttcaaaaacattgtagaaaaatacaatgatgatctaggctggtattga

SEQ ID NO: 48012 - protein, 258 aa, Unknown
  Obtained from environmental sample
  SIGNAL (1)...(26)
  misc_feature (1)..(258): Xaa is any amino acid
MPKGVFMKRILVLTVCVVFLSVILAGCGGIETNALVGTWVLEDGQPFVSEDIATDYSLSKNGKGFADIKKTISWKIENKHLVITYEETSKTFELDYKLKGKNLIISFGGKDHAYIKTSGNSDDLKKWRSSIDIDPVNDEKNIYFRVVSKDGNSRLYIRQLGKKSQEMYIYWGDDIEIDRSNIAFRIDDGEAQTSRWDITRGKGFTIYSGNVLQVIKRLLDAKQVVARGSSTKGELTATFDVTGFKNIVEKYNDDLGWY

SEQ ID NO: 48013 - DNA, 798 bp, Unknown
  Obtained from environmental sample
  misc_feature (1)..(798): n is a, c, g, or t
ttggggcagtatcaaacgtatttccatagaaggaacggtcctgtggtcagagaacccgccggctttgcaggctggcaggatcaactgaagagagtaaccgcgcaagggcttatttctacaacaggaagagagcctgcttttcaggaactcgcggacgtcttttgggcggatgtagccggcagggggaaggtccccatcgttgccgttatttatacttttaccaatagtaaaggtcaaatcgttggtcttgtcggaatcaactttataagcacagttcagcaaatagtagatgatttgaaaaaagaagtgtacgacggcgcgggaatagccgcagtatacagcgataacgctacggctatagctcattgggacaaggatagggtcgcggtaaatttgaaaaacaacaacaaagataaaacgctttttggagacgacattaaccgtttagctgacgtgatcttacatggaaagattgaaatattagataagtattcccaggtcatgaaaacggaagtatactatattttccagcctattctcgtttcaggttttgaaacaaccccatggtccctgcaattaggcatacccgaatcggaaataaagaagccgattcatgccctgatatcttattccataatattcgccgttatccttctggtagtggcggcggttattactttgctcgtcgccgccggcattgttaaaccgattatccgcgtaactgctaccttaaaagacatatccgaaggcgaaggcgacctgacgcgaactgtcgccatcagttcaaagacgaagtag

SEQ ID NO: 48014 - protein, 265 aa, Unknown
  Obtained from environmental sample
  misc_feature (1)..(265): Xaa is any amino acid
MGQYQTYFHRRNGPVVREPAGFAGWQDQLKRVTAQGLISTTGREPAFQELADVFWADVAGRGKVPIVAVIYTFTNSKGQIVGLVGINFISTVQQIVDDLKKEVYDGAGIAAVYSDNATAIAHWDKDRVAVNLKNNNKDKTLFGDDINRLADVILHGKIEILDKYSQVMKTEVYYIFQPILVSGFETTPWSLQLGIPESEIKKPIHALISYSIIFAVILLVVAAVITLLVAAGIVKPIIRVTATLKDISEGEGDLTRTVAISSKTK

SEQ ID NO: 48015 - DNA, 948 bp, Unknown
  Obtained from environmental sample
  misc_feature (1)..(948): n is a, c, g, or t
atgaccgaaacggccgcggcggtgaacgaaattaccgctaacattcaaagtatcaagggccgcgtcataaaccaaagcgccagcgttaccgaaaccaacgcgactatggaacaggttgtcaccaacatcaacaaactcaacggctatgtagaaaaccaggtccgtaatatttctcaggcgtcatccgccatcgagcaaatggtcgccaatatcaattctgtcaccaacacgctggtcaataatgccgccaatgtaaacatgttaaaagaagcctccgaaataggaaaaacgggattgcaggaagtggctgctgacattcaggaaatatcccgcgaatccgagggcttgatggaaatcaactcggtcatggaaaatattgccagccagaccaacctgctttcgatgaacgcggcgatagaagcggcgcacgccggggaagccgggaagggcttctccgtagtcgccgaagagatccgcaaactggcggaaagttccagcgaacagtccaagaccatcggtacggtgttgaagaagataaaggaatctatcgacaagataactaaatccaccgagaacgtactgaccaaattcgaagcgattgactcaagcgtaaaaacagtatcacagcaggaagaaaatatccgcaatgcgatggaggaacaggaacagggaagcaaacaactcctgcaaagcgcgggcggtttgaaagaaacaacccatcaggtaaagaccggttccgaggaaatgcttgttggcagccaggaagtaatgaaagaaagccgtaaccttgaaaaagtaacgcaggaaataaccggcggcatgaacgaaatggcctccggggcggaacagatgaacaacgcggtacacaacgtaaataatataagcggcaagaaccgtgacgccattaacaccctgatgaaggaagtttcacgcttcaaagtggagtaa

SEQ ID NO: 48016 - protein, 315 aa, Unknown
  Obtained from environmental sample
  DOMAIN (58)...(280): Methyl-accepting chemotaxis protein (MCP) signaling domain
  misc_feature (1)..(315): Xaa is any amino acid
MTETAAAVNEITANIQSIKGRVINQSASVTETNATMEQVVTNINKLNGYVENQVRNISQASSAIEQMVANINSVTNTLVNNAANVNMLKEASEIGKTGLQEVAADIQEISRESEGLMEINSVMENIASQTNLLSMNAAIEAAHAGEAGKGFSVVAEEIRKLAESSSEQSKTIGTVLKKIKESIDKITKSTENVLTKFEAIDSSVKTVSQQEENIRNAMEEQEQGSKQLLQSAGGLKETTHQVKTGSEEMLVGSQEVMKESRNLEKVTQEITGGMNEMASGAEQMNNAVHNVNNISGKNRDAINTLMKEVSRFKVE

SEQ ID NO: 48017 - DNA, 501 bp, Unknown
  Obtained from environmental sample
  misc_feature (1)..(501): n is a, c, g, or t
gtgcagacttggcagaaagacattgccgatttgcaggcggcctacaaagtctatagcgaaagaaacatcgctacaggttcagcggcttccgaagttctgcacgttggtcctaactactcaaccggtttgggtggagcaacttccaaccagataaaggtaaactacgttgccattgatgtcagaggtctcggtttgcaagcacagcaaatagaatcccgcgaaggtgcccaaagagccatagataggcttcaggaaaccatcaaggtgacaagtagcaaccgtgcagctataggtacatacataaatcgtcttgactacacaatcaacaacattgcatctatggaatacaacatccaagatgcagagagccgcatacgcgacaccgactttgcgaaggagaccacggacttcaccaggaatcagattatggtgcaagccgctacgagcatgttggcgcaggcgaatagtttgccgcagggggttctaggattgataggataa

SEQ ID NO: 48018 - protein, 166 aa, Unknown
  Obtained from environmental sample
  DOMAIN (73)...(144): Bacterial flagellin C-terminus
  misc_feature (1)..(166): Xaa is any amino acid
MQTWQKDIADLQAAYKVYSERNIATGSAASEVLHVGPNYSTGLGGATSNQIKVNYVAIDVRGLGLQAQQIESREGAQRAIDRLQETIKVTSSNRAAIGTYINRLDYTINNIASMEYNIQDAESRIRDTDFAKETTDFTRNQIMVQAATSMLAQANSLPQGVLGLIG

SEQ ID NO: 48019 - DNA, 381 bp, Unknown
  Obtained from environmental sample
  misc_feature (1)..(381): n is a, c, g, or t
atgccggaaagggtctggcaccgcaggcaaggatgcctgcggtttgaacattacaaggaggttagctatatgcaaatcaaccataatatccgtgcaatggtgactcaacaggcattgttccaaaacgacaattccatgaccaagtcactggaaaaactctcaacaggtttaaggataaatcgtgcccaagacgatgccgcaggcctagcgatgagcgaacaaatgagaactcaaattcgcggtttagccaaagcgaagagaaattctcaagacggtcaggcagcactgcaaatcgcagaaggtgctctggctgaaatcaccaacatgatgcaaaggcagaaggagttggctgttcaatccgccaacgattactctaactag

SEQ ID NO: 48020 - protein, 126 aa, Unknown
  Obtained from environmental sample
  DOMAIN (50)...(126): Bacterial flagellin N-terminus
  misc_feature (1)..(126): Xaa is any amino acid
MPERVWHRRQGCLRFEHYKEVSYMQINHNIRAMVTQQALFQNDNSMTKSLEKLSTGLRINRAQDDAAGLAMSEQMRTQIRGLAKAKRNSQDGQAALQIAEGALAEITNMMQRQKELAVQSANDYSN

SEQ ID NO: 48021 - DNA, 681 bp, Unknown
  Obtained from environmental sample
  misc_feature (1)..(681): n is a, c, g, or t
gtgctggcgcaaacgtatgccaatgtggattatattattgttgatggcggttctaatgatggaacggtcagtatcataagagagtacgaatcgcgcatagccaaatggatttctgaaaaagatggcggaatttataatgccatgaacaagggcgttgcacttgcatcggggagctacgttaactttatgaacagcggcgatatttttgctgcgcccgatgtgctggaaaaagtagcactggtgataagaaaacagcatgctgatattatttacggtgatgtattgatagcgaatggtaacggacgtgagccgtggctaaaagtggcacaggagaacgtaaaagttatgcatcacattccgttctgccatcagagtacgcttgccaaaacttcactgctcaagttacacccttttgatgaaaagtataaaatgtcggctgattttaagtttttcaagcagtgttttttggaaaaatatgtatttgtcaaggttaattttcctatagcagtttttagcacctctggcgtatccaatacccaacgtacaaacggtctgtgggaaaataacgctgtagttcgggagttggactcttttccacaaaagttggtttacttgggacgaacaaactttgtgctgctatggatggctatacgcaaattcttaggcaagctgaaatcataa

SEQ ID NO: 48022 - protein, 226 aa, Unknown
  Obtained from environmental sample
  misc_feature (1)..(226): Xaa is any amino acid
MLAQTYANVDYIIVDGGSNDGTVSIIREYESRIAKWISEKDGGIYNAMNKGVALASGSYVNFMNSGDIFAAPDVLEKVALVIRKQHADIIYGDVLIANGNGREPWLKVAQENVKVMHHIPFCHQSTLAKTSLLKLHPFDEKYKMSADFKFFKQCFLEKYVFVKVNFPIAVFSTSGVSNTQRTNGLWENNAVVRELDSFPQKLVYLGRTNFVLLWMAIRKFLGKLKS

SEQ ID NO: 48023 - DNA, 423 bp, Unknown
  Obtained from environmental sample
  misc_feature (1)..(423): n is a, c, g, or t
atggcgttaatatcaaaaacgacaattcaggaagttaataaccgccttgacgcgatttccgtagtgggagattatgtcagtcttgaaaaaaaaggcggccgctggtggggcaggtgcccctttcattccggcgggcaggaaaaaaccccctctttcaaagttgatcctgacttgaaaatgtaccattgtttcggctgtaacgcgggcggcagcgttatcagctttgttatggaaatggaaaaaatcacctatcctgaagcgattaagattcttgcccgcaagataggcgtcgagataatctatgaagagggctcacagcaggaagaacaggaaagctcgcaaaaagatgagctttatgaattgtacaggaggaccacccttacctttgctcattttttacttgaaaaaccggaagnggaataa

SEQ ID NO: 48024 - protein, 140 aa, Unknown
  Obtained from environmental sample
  DOMAIN (4)...(104): CHC2 zinc finger
  misc_feature (1)..(140): Xaa is any amino acid
MALISKTTIQEVNNRLDAISVVGDYVSLEKKGGRWWGRCPFHSGGQEKTPSFKVDPDLKMYHCFGCNAGGSVISFVMEMEKITYPEAIKILARKIGVEIIYEEGSQQEEQESSQKDELYELYRRTTLTFAHFLLEKPEXE

SEQ ID NO: 48025 - DNA, 483 bp, Unknown
  Obtained from environmental sample
  misc_feature (1)..(483): n is a, c, g, or t
atggcggataacttctttatgaaaataaaaaaaattgatcctgcatttacgtctatgagtctaaaagaactgaatgacaaggtaatccttgcctctattatcgagcgcgagtacagggtagcggaagaagcgccgcttatggcgggcgttttttataaccgcttaaatataggcatggcgattcaatcctgcgcgactattgaatatataataacggaaattcaggaaaagccccatccttcagtcctttacaacagggatcttgaaatacgaagtccgtacaacacatacatggttccgggccttcctcccggccctatttccgctccgggagaaattgcgcttaacgccgcgtttaatcctgaaaaatcgggatatttttattttcgtctggaagacccaaaaatcggaaggcattatttttcggcgactctggacgaacatataaaagccggccagcttgtgcctaaaggccgcctgtaa

SEQ ID NO: 48026 - protein, 160 aa, Unknown
  Obtained from environmental sample
  DOMAIN (1)...(158): Aminodeoxychorismate lyase
  misc_feature (1)..(160): Xaa is any amino acid
MADNFFMKIKKIDPAFTSMSLKELNDKVILASIIEREYRVAEEAPLMAGVFYNRLNIGMAIQSCATIEYIITEIQEKPHPSVLYNRDLEIRSPYNTYMVPGLPPGPISAPGEIALNAAFNPEKSGYFYFRLEDPKIGRHYFSATLDEHIKAGQLVPKGRL

SEQ ID NO: 48027 - DNA, 768 bp, Unknown
  Obtained from environmental sample
  misc_feature (1)..(768): n is a, c, g, or t
ttggttttttttccgctctgtccgcggcatggttcgcgtcgcggaaagccgctaaaatacaaccggcggaggtgctgcgttatgagtaatattcttgtaaggacgcaagacatagtaaaaaattatttatccggggcggaaacccttcatatattaaaaggaataaaccttcagattgaggaaggaacatccttgtcgataacggggcagagcggaagcggcaagagcaccctgcttaacattttaggcggccttgaccgcgccgacggcggaagcgtctttatcggcaatgatgaaattacatccctctcggaaaaggaaatgtccgtgttcagatcaaaaaaagtgggctttatttttcagtttcattacctgcttaaagattttaccgctcttgaaaacattatgattcccgcctacatagccggactgaaaaaaaaggacgcgcttgacagggcaagaattctgcttgccgacgtaaaccttgaagagcgcggaaaacatttcccgtcccagctttccggcggggaacgccagcgcgtggcagtcgcaagatcaatggtaaacgatccggcgttaattctagcggacgaaccgacgggcaaccttgatcccgcgaacagcgacattgtttcggaactgctctatgccgccgcgcaaaagaggggcaaaaccttaattgtcgtaacccatgacgaaaaagcggcggcaagggcttctgtccgccttgtccttgaaaacgggcaattgcaggagcagacactttga

SEQ ID NO: 48028 - protein, 255 aa, Unknown
  Obtained from environmental sample
  DOMAIN (27)...(251): RecF/RecN/SMC N terminal domain
  misc_feature (1)..(255): Xaa is any amino acid
MVFFPLCPRHGSRRGKPLKYNRRRCCVMSNILVRTQDIVKNYLSGAETLHILKGINLQIEEGTSLSITGQSGSGKSTLLNILGGLDRADGGSVFIGNDEITSLSEKEMSVFRSKKVGFIFQFHYLLKDFTALENIMIPAYIAGLKKKDALDRARILLADVNLEERGKHFPSQLSGGERQRVAVARSMVNDPALILADEPTGNLDPANSDIVSELLYAAAQKRGKTLIVVTHDEKAAARASVRLVLENGQLQEQTL

SEQ ID NO: 48029 - DNA, 963 bp, Unknown
  Obtained from environmental sample
  misc_feature (1)..(963): n is a, c, g, or t
ttggtaagaggggtaggtgaagatacgccggaaattgacaaggcgatgatggacaggttggattttgaagaaggcttttttgacatttcaaacaagaataacgccctattaggctctgagcttgcccgcagactgggacttaacatcggggacgagataaacgtgttttccctgaccggtattttgtcacaggaggacggaagcagttttgacggctttgttacggggatattcagaaccggctattatgaatacgattgcagttggatttttcttaacattgaaaatacttcatttttacagaatgaatgtgatttaaagcttggcattaagcttgctaaccgttttatggataaaacggtattggatcaggcaagaaaaaaattatcttcttatgagggaataaaattgtcaagctggcgcgattataaccgttctttttttggcgcccttaggacggaaaaactgtttatgtttatacttgtaggtttaatttttatcgtagtcggcttaaatatttttcaggcgcaaagaagatccgtcttacagaggcgcgaagaaataggcttattacgcgccgttggcggcacgcagaatgaagtacgttttgtatttgtttttgacggggcgattataggtctggcgggcgcgtttatcgggttgattataggattagccgtcgccttaaatatatcaggcttttttacgttagtagaaaatattataaattggtttattaatattattaatatattggcgggttggcttggagtcggaatgacggcaaatttcgccgtttcttcgccggctgttttttacattaaggaatttccttcaaggatataccccggggaagttatattaatattcatgtttggttttttttccgctctgtccgcggcatggttcgcgtcgcggaaagccgctaaaatacaaccggcggaggtgctgcgttatgagtaa

SEQ ID NO: 48030 - protein, 320 aa, Unknown
  Obtained from environmental sample
  DOMAIN (105)...(313): Predicted permease
  misc_feature (1)..(320): Xaa is any amino acid
MVRGVGEDTPEIDKAMMDRLDFEEGFFDISNKNNALLGSELARRLGLNIGDEINVFSLTGILSQEDGSSFDGFVTGIFRTGYYEYDCSWIFLNIENTSFLQNECDLKLGIKLANRFMDKTVLDQARKKLSSYEGIKLSSWRDYNRSFFGALRTEKLFMFILVGLIFIVVGLNIFQAQRRSVLQRREEIGLLRAVGGTQNEVRFVFVFDGAIIGLAGAFIGLIIGLAVALNISGFFTLVENIINWFINIINILAGWLGVGMTANFAVSSPAVFYIKEFPSRIYPGEVILIFMFGFFSALSAAWFASRKAAKIQPAEVLRYE

SEQ ID NO: 48031 - DNA, 1380 bp, Unknown
  Obtained from environmental sample
  misc_feature (1)..(1380): n is a, c, g, or t
atgctgcttacaatagacatagggacttcaagttttaagtctgcggtttttgattatgaggggaaacgcctttcttatgcctcttttcccctttcgagcggcagcgatgctgactgttcccagtggataaaggcgtttgaagactgctgcctaaagctgggaaatatggcggaagttgcggctatcgtcataagcggaaacgggccaagccttgtgcctgttttgggagatccaaaggccggaaaagaggggttaacagtccctgccgacaaagcgaggttttggctggatcgaagcgcggttaagtatcaggatgaagtaacaaaagcgatgggcggttttgtcgacgcctgttttttccttcccaaaatacttaaaatcaagaatgaggaatcagagctatacgaaaagataaaaacttttctcggcgttccagaatatcttgcatacgcgttgacaggcgctgcaaaaactgttttcccgtcggaaggttttgaccgctggttctggaatgactctgttcttgaaaaactgggtttggacgcggagaaatttcctccgtttatccgtcccggcgaagtgtttggaacaattagtccttcggtcgccgagcttttcggattttcgaaaaatattcccgtaataacgggcggacctgatttttttgccgcgattaaaggcagtggggtaatggagccttcccaagtgtgcgaccgcaccggcttttccgaaggagtaaatctttgcacgcaaaatttggttatagacaggcgtttgatgtcttacggccacccggtaaagccgtactggaatttgtcggggacgataaatacaacgggcaaagcgattgaatggtgcaaggattttcttgggctttcaagctatgaagattttttcgcccttgcgcggcaaagcaaaagcggttcgggcggtcttgtctttgttccatatcttgcgggtgagcgcgcccctgtctggaatcctaacgcgcgcgctctgtggcgcggcataagcctgtcgtcgggaaggagcgaattcgcgaattccgtacttgaaggcatagggttcgctatcagggatgtaataggcgtaatggaagaaaacggcgcgcgagtaggacagttgcacgtaacaggccgtcttgccggcatagaaagcctgaatcagataaaagccgatattacgggaaagcagatacttacgcccgtatttaaggagactgaacttttaggcttggcgattacaggctcgtgctatatgggcaaattcgcctcattagcggaggcttcttccgcaatggtaaagattgataagacttatgagccaaatttaaaaaacgcaaggatttataacgagttatttttagaatataaacgataa

SEQ ID NO: 48032 - protein, 459 aa, Unknown
  Obtained from environmental sample
  DOMAIN (1)...(227): FGGY family of carbohydrate kinases, N-terminal domain
  misc_feature (1)..(459): Xaa is any amino acid
MLLTIDIGTSSFKSAVFDYEGKRLSYASFPLSSGSDADCSQWIKAFEDCCLKLGNMAEVAAIVISGNGPSLVPVLGDPKAGKEGLTVPADKARFWLDRSAVKYQDEVTKAMGGFVDACFFLPKILKIKNEESELYEKIKTFLGVPEYLAYALTGAAKTVFPSEGFDRWFWNDSVLEKLGLDAEKFPPFIRPGEVFGTISPSVAELFGFSKNIPVITGGPDFFAAIKGSGVMEPSQVCDRTGFSEGVNLCTQNLVIDRRLMSYGHPVKPYWNLSGTINTTGKAIEWCKDFLGLSSYEDFFALARQSKSGSGGLVFVPYLAGERAPVWNPNARALWRGISLSSGRSEFANSVLEGIGFAIRDVIGVMEENGARVGQLHVTGRLAGIESLNQIKADITGKQILTPVFKETELLGLAITGSCYMGKFASLAEASSAMVKIDKTYEPNLKNARIYNELFLEYKR

SEQ ID NO: 48033 - DNA, 612 bp, Unknown
  Obtained from environmental sample
  misc_feature (1)..(612): n is a, c, g, or t
gtgatagacctcaaggattgcaaattacgcagatataatgcagaggttgctgctacctttgaaaaattcgactgcggaaaagaagatatgaacagatttttctacgaagacaatgattactacaaatatgaaaagcaaatgatgacaaaaagctattgctttacatacgaaaaagacattgcctgcattttcacaatatcaaacgactctataaaaaagaatgcttttcaaggagcaaaagacgacaaggcgagaatgatggaacgtttcccagaggaaaaagaaaaaattcaaagttatccatcagtgcttataggaagattaggagcaaacataaaatacagaaggcagagcaaggatgaaatcggaataggaacacaggttataacatttataaaagaatggattgcgagcgaaaccaacaaaacaggctgtagatttcttattgtggatgcttacaatgaagccagtgtaataaaattttatcaagaatacaacaactttgaattcctgataaaagatgaatcacttgaattgaatatgttcagaggaaataaaaaagagattaccaggttggaaacccgaaagatgttttttgacttatntacataa

SEQ ID NO: 48034 - protein, 203 aa, Unknown
  Obtained from environmental sample
  misc_feature (1)..(203): Xaa is any amino acid
MIDLKDCKLRRYNAEVAATFEKFDCGKEDMNRFFYEDNDYYKYEKQMMTKSYCFTYEKDIACIFTISNDSIKKNAFQGAKDDKARMMERFPEEKEKIQSYPSVLIGRLGANIKYRRQSKDEIGIGTQVITFIKEWIASETNKTGCRFLIVDAYNEASVIKFYQEYNNFEFLIKDESLELNMFRGNKKEITRLETRKMFFDLXT

SEQ ID NO: 48035 - DNA, 735 bp, Unknown
  Obtained from environmental sample
  misc_feature (1)..(735): n is a, c, g, or t
ttgcgctccgccgaatccctctccgaccatgcggactgcctcgccgtggccgctcccatgaggattcccctgcgctcttcgagatggacctgcgcctccgcctgttggtcttctagccccctgatttccgcgtccaatgcctgctgggcttcttcgggatgcccctcgtccattcccctcgccttggacttcaactgcgctatttcggcctcaaataagtcccactgctcgtccgcacgcgcctgtgcttcttctgtctcctttatctgtctctggatggaagccagcagcccctttgcgtcttccattgaacgcttcgcgcccgcgctgtcgtcctgcatgtccgtcagacggctctgggcctcggacactttgagcgacagcgacttcttttcttcttccagcgcctccagcttttcaagcagggtttcgcgctgggcgcgggatacatcgcactccgccagcatcttcaatggcgaggccttgggcggctcgacgcccacctgtaccgggccaaacggcaatttgacaaaggaaggcgaaacaaaggccaaatcggggtgcgcgacggccaattcggcaaacgcatcatccgaacactggaacacacgggaaatcagcccaaccaaaatccttggcgctttgggccgccagcggattgaagccgacagtgggcgggtctgttcaggcgcggccactgccgtcttgtccgaagcgatgtgcgccatcaactga

SEQ ID NO: 48036 - protein, 244 aa, Unknown
  Obtained from environmental sample
  misc_feature (1)..(244): Xaa is any amino acid
MRSAESLSDHADCLAVAAPMRIPLRSSRWTCASACWSSSPLISASNACWASSGCPSSIPLALDFNCAISASNKSHCSSARACASSVSFICLWMEASSPFASSIERFAPALSSCMSVRRLWASDTLSDSDFFSSSSASSFSSRVSRWARDTSHSASIFNGEALGGSTPTCTGPNGNLTKEGETKAKSGCATANSANASSEHWNTREISPTKILGALGRQRIEADSGRVCSGAATAVLSEAMCAIN

SEQ ID NO: 48037 - DNA, 828 bp, Unknown
  Obtained from environmental sample
  misc_feature (1)..(828): n is a, c, g, or t
atggctgctgggcttaaagatcggacgtttgcggatgacaacggaaaagaaataaaaaagtcatataaaaacacttacgcaaatacggtgttcgggactttctggctcatgctgaacgaggcggtaaaccgtaaaattatcaaggccaacccggctgccccggtaaaaaaactaaaaaacgaccgcaagccaatcgagattattacccctgcggaagtgaggctgctgttcccgcaggattggaaaaagatctgggacaatgacagaatttcttacctgggcaacaagctggcggcttgcaccggcatgagggcaggggaaatcctggggctgcggggcgaatacgtctatgacgagtacatccatgtctgcgcccagtatgacgaatacggttaccggcctaccaaaacaaaagaaaaacggaatatccctattgcgcctgttgtcctggatgaaatcaggcagcttgcccttgaaaacaacaacggctatgtcttttcgctggacggcggggctaccccggtgacgaggaagctgctgtacaacaaatttcaccgggcgctgaacaaaatcggggtgagccaaaaagaggtaaagcggcgtgggctgtcgatgcacagctggcggcatttcttcaacacgacgttgcagatggcaaacgtggcgcttagcaaggtgcagtcggttaccgggcataagtctgacagaatgacagaatggtacacacattttgacgcgaaagaattcgccgaggtcaggggagtgcaggaatccctgctgctgccggagaagcctgcaagcaaaaaacaagccaaacgaaccgcctaa

SEQ ID NO: 48038 - protein, 275 aa, Unknown
  Obtained from environmental sample
  DOMAIN (68)...(251): Phage integrase family
  misc_feature (1)..(275): Xaa is any amino acid
MAAGLKDRTFADDNGKEIKKSYKNTYANTVFGTFWLMLNEAVNRKIIKANPAAPVKKLKNDRKPIEIITPAEVRLLFPQDWKKIWDNDRISYLGNKLAACTGMRAGEILGLRGEYVYDEYIHVCAQYDEYGYRPTKTKEKRNIPIAPVVLDEIRQLALENNNGYVFSLDGGATPVTRKLLYNKFHRALNKIGVSQKEVKRRGLSMHSWRHFFNTTLQMANVALSKVQSVTGHKSDRMTEWYTHFDAKEFAEVRGVQESLLLPEKPASKKQAKRTA

SEQ ID NO: 48039 - DNA, 504 bp, Unknown
  Obtained from environmental sample
  misc_feature (1)..(504): n is a, c, g, or t
gtgtggacggcttttcaggaaactgatcgaatgataaaggaagtcgctagacggcaagagaaaactgactatcaaatagggaaactcggtaaccgtatgggtgaaattgttgaacacatggttgctcccaatctgagggaaaaatttagggagatgggtcttaactttcctaaagccaatctcaattccgatgtttccgatgatgaaaataatatacaccttgaagttgacgttctgtttgaaaacggcgataaagccatgcttgtcgaagtaaaaacaacccttaccaccgaagatgtgcaggatcatattaaacgccttgaaaaaatgcgtgtgtatgccgatctgcacggcgacaagcgtacttttttgggttctgttggaggtgtagtagtaacatctaacgtaaaagaatatgctttggaaaaaggattatatgtaatagagccttccggagaaacttttaatattattccgccaaacggcaaaccgaaagaatggtga

SEQ ID NO: 48040 - protein, 167 aa, Unknown
  Obtained from environmental sample
  misc_feature (1)..(167): Xaa is any amino acid
MWTAFQETDRMIKEVARRQEKTDYQIGKLGNRMGEIVEHMVAPNLREKFREMGLNFPKANLNSDVSDDENNIHLEVDVLFENGDKAMLVEVKTTLTTEDVQDHIKRLEKMRVYADLHGDKRTFLGSVGGVVVTSNVKEYALEKGLYVIEPSGETFNIIPPNGKPKEW

SEQ ID NO: 48041 - DNA, 828 bp, Unknown
  Obtained from environmental sample
  misc_feature (1)..(828): n is a, c, g, or t
atgattaaaattgcaacaattgccggatcagacgcttccgggggtgccgggcttgaagctgacttgaaaacatttgaggaatacggtctttatggaatgactgcggtaacccttatcgcaacaatgaatccagataataattgggcgcacggcgtatttccggttgatgaaaaaactctgaaggctcaactggaaactgtatttaaaggcgttggagttacagcagcgaaatcgggtatgctgggaactttttacgcggttgaattaacccgtgaatatataagtgcgtataaaataaaaaactatgtgcttgatccggtaatggtttgcaagggtaacgcggcaattgccgatgaagcattgaatcctgaattgaatcagtccgtagctgagaaattacttccattggcaaatgttgtaacaccgaatttattcgaggcggggcaactttccggtataagggaaatttcatctgttgaacaaatgaaagaagctgcaagaataatcgctgaaaaaggagctgcaaatgtatttattaaaggcggttcaaaattaccgaatgcgacagaagccattgaccttttgtatgacgggaaaaattttgaattaataaaagcccctcttataaaaaccaattgggtacatggggctggttgttctgtatcagcggcaattgcagccggattggcacacggcctttcagtttatgacgcagttgttttggcaaagagatttatcagccaaagcctaaacggaagtttttgcccttacaaatgggtcggcccgggaaatccaacaaactggagaaaagataatttgtttacataa

SEQ ID NO: 48042 - protein, 275 aa, Unknown
  Obtained from environmental sample
  DOMAIN (11)...(264): Phosphomethylpyrimidine kinase
  misc_feature (1)..(275): Xaa is any amino acid
MIKIATIAGSDASGGAGLEADLKTFEEYGLYGMTAVTLIATMNPDNNWAHGVFPVDEKTLKAQLETVFKGVGVTAAKSGMLGTFYAVELTREYISAYKIKNYVLDPVMVCKGNAAIADEALNPELNQSVAEKLLPLANVVTPNLFEAGQLSGIREISSVEQMKEAARIIAEKGAANVFIKGGSKLPNATEAIDLLYDGKNFELIKAPLIKTNWVHGAGCSVSAAIAAGLAHGLSVYDAVVLAKRFISQSLNGSFCPYKWVGPGNPTNWRKDNLFT

SEQ ID NO: 48043 - DNA, 504 bp, Unknown
  Obtained from environmental sample
  misc_feature (1)..(504): n is a, c, g, or t
atgcaaaaacacgagtcctacaagtcgctcgcggattttggtctgccctacggtctaattagaataccgcaaccctacgacaccgcaacgctcaactacaactggcaggtatggggctgtcacgcctactcgattttttcgacctacaccgaacatatcggaaagcagtccacgcaaaccgccgtgaatgcggttctacgcttccttatagccaatgggatactcaaatgggccctgcacggcggcatgcacacccgcatacttgccgaagaatcaataagaaccatccagacaagccgggccggaatactgaaaaaacaggtcgcggtgggcgatgaagttatcgaaggcgatctgctttgtgagataatccatcccctggaagggaacacaataggtcggatagagtcgccaacggacgggacggtgttcttcgccttcaacaaacaactggttatggagcataccgatgtgtttaacatcgtaccgttttcaagcgtatga

SEQ ID NO: 48044 - protein, 167 aa, Unknown
  Obtained from environmental sample
  misc_feature (1)..(167): Xaa is any amino acid
MQKHESYKSLADFGLPYGLIRIPQPYDTATLNYNWQVWGCHAYSIFSTYTEHIGKQSTQTAVNAVLRFLIANGILKWALHGGMHTRILAEESIRTIQTSRAGILKKQVAVGDEVIEGDLLCEIIHPLEGNTIGRIESPTDGTVFFAFNKQLVMEHTDVFNIVPFSSV

SEQ ID NO: 48045 - DNA, 351 bp, Unknown
  Obtained from environmental sample
  misc_feature (1)..(351): n is a, c, g, or t
atgaataaaggggtctatatccttcataaatggcataatggggaaggcgacgacagggaactgatgtttgatttcaggtcttccaatggcagcattgaagatgtaataatggccatgatctcggtagaaaagatgttcaggtgctattataatcctaacgctgccggtgaaagccgggtattggtggacaagatagttgacgcttttttaaaaaaatactttctccaatacagggattattgttcttttaccgtagaaaaccctggcaatccggcgtatatatattatgatagcattatggaggatgagcagtgcgatgatctgaccatcctggggcttaagagaaaatag

SEQ ID NO: 48046 - protein, 116 aa, Unknown
  Obtained from environmental sample
  misc_feature (1)..(116): Xaa is any amino acid
MNKGVYILHKWHNGEGDDRELMFDFRSSNGSIEDVIMAMISVEKMFRCYYNPNAAGESRVLVDKIVDAFLKKYFLQYRDYCSFTVENPGNPAYIYYDSIMEDEQCDDLTILGLKRK

SEQ ID NO: 48047 - DNA, 309 bp, Unknown
  Obtained from environmental sample
  misc_feature (1)..(309): n is a, c, g, or t
ttgatcgatgaacgggcgcttgggctgatgaagcccaccgcctgtctggtgaacatggcccggggcacggtggtagatgaaacggcgctccacaaggcgctggtacacaagaccattgccatggcggcaagcgatgtatttgagaccgagcccctcccaaaagagagccctctctgggatctgcccaatttcgtgattaccccccattgtactcctgaggcacctgatctcgctttgaacggtcttaacatcatttgtgagaatatcaaacgttaccggaatggcgcgccgctacgtaactgcctttag

SEQ ID NO: 48048 - protein, 102 aa, Unknown
  Obtained from environmental sample
  DOMAIN (1)...(71): D-isomer specific 2-hydroxyacid dehydrogenase, NAD binding domain
  misc_feature (1)..(102): Xaa is any amino acid
MIDERALGLMKPTACLVNMARGTVVDETALHKALVHKTIAMAASDVFETEPLPKESPLWDLPNFVITPHCTPEAPDLALNGLNIICENIKRYRNGAPLRNCL

SEQ ID NO: 48049 - DNA, 1620 bp, Unknown
  Obtained from environmental sample
  misc_feature (1)..(1620): n is a, c, g, or t
atgaaaaaaatatccgcttcggtgcgtaagggggccaacgcctacctgaaacggcagtataccggggtggccatgttttttgtcgttatgtttgtggttttgggaattatggccataaacggcttgttaacgcctttcgtcccctttgcgtttatcaccggaggtttcttttccggtctttctggctttatcgggatgaaaatcgcgacttccgccaatgccagaaccgcccaggcctcgtctgaaagcctgaacaggggactcagggtcgccttttcatccggcacggtgatgggctttaccgtaatcggattggggcttctggacctgtcaatatggttttttctgttgaagtatgtgttttatacccccgagtcaaaagctattataggattcctcgcgagtaaccccggcaagtccatagatgccgcgcagattcagcttatttcttccgcgatgctgaccttcgggatgggcgcttccagcatggccctttttgcccgtgtcggcggcggtatctttaccaaggcagccgatgtgggcgcagacctggtcggaaaggttgaggcgggaatccctgaagacgatccccgcaatccggcggttattgccgacaacgtaggcgataacgtaggagacgtagcgggcatgggcgccgacctttatgagtcttatgtcggctccattgtcgccaccatcgccctggcggtttcggcgggttttgactttaacggcgcggtggttcccatgctgatggcggctgtcggaacggtagcgtccattatcggaactttcttcgtgcgctgcggagagaaggcggatcagaagtccctgctgggggcattgcggaaagggacctatatttcttccgcaattattgttatcgcttcctacccggtcattcgtatagcgcttcctaataaccagggcgtctattttgcgatattatcagggttgatcgcgggggtccttatcggatttttcaccgagtattacacttcggatcattacaatcctaccaagaatcttgcctccgccagtctgaccgggccagccaccattatcatcggtggaatttctttaggtatgctttccaccctgctgccggtaatcattgtcggcgcgtcggtgttgaccagtttctttgtttcaggcggtggaactaatttttcccatggcctgtacggggtcggcatttccgcggtaggcatgctttccactctgggtattaccctcgccaccgacgcttatggcccggttgcggataacgccggcggcattgccgaaatgtcccatctgccccacgaggttcgggaacgcaccgacgccctggattctctgggaaataccaccgccgccaccggcaagggcttcgcgattggttccgcggctctgaccgcccttgctcttattgtcgcttatcttgacgagattcagattcacgcaccgaactttaaattagatcttacgctgaccaatcccccggtactgatagggctctttgtcggcgttatgcttccccttccttttctcatccatgaccatgagcgcggtaggccggggcggcgcagaacatcgttaaagaagtccgccgtcagttcaaggaaatcaaaggtttga

SEQ ID NO: 48050 - protein, 539 aa, Unknown
  Obtained from environmental sample
  DOMAIN (1)...(534): Inorganic H+ pyrophosphatase
  misc_feature (1)..(539): Xaa is any amino acid
MKKISASVRKGANAYLKRQYTGVAMFFVVMFVVLGIMAINGLLTPFVPFAFITGGFFSGLSGFIGMKIATSANARTAQASSESLNRGLRVAFSSGTVMGFTVIGLGLLDLSIWFFLLKYVFYTPESKAIIGFLASNPGKSIDAAQIQLISSAMLTFGMGASSMALFARVGGGIFTKAADVGADLVGKVEAGIPEDDPRNPAVIADNVGDNVGDVAGMGADLYESYVGSIVATIALAVSAGFDFNGAVVPMLMAAVGTVASIIGTFFVRCGEKADQKSLLGALRKGTYISSAIIVIASYPVIRIALPNNQGVYFAILSGLIAGVLIGFFTEYYTSDHYNPTKNLASASLTGPATIIIGGISLGMLSTLLPVIIVGASVLTSFFVSGGGTNFSHGLYGVGISAVGMLSTLGITLATDAYGPVADNAGGIAEMSHLPHEVRERTDALDSLGNTTAATGKGFAIGSAALTALALIVAYLDEIQIHAPNFKLDLTLTNPPVLIGLFVGVMLPLPFLIHDHERGRPGRRRTSLKKSAVSSRKSKV

SEQ ID NO: 48051 - DNA, 432 bp, Unknown
  Obtained from environmental sample
  misc_feature (1)..(432): n is a, c, g, or t
ttgatggaaggcaccgcggaagcggactatgccacttgtgtggatatttgtacccgcggagcgcagaaagaaatgatacttcccgccctgaccggcattatttcacctattgttgttggattggccctgggtgtgaacggtgtggccggtatgctcgcgggcgcgacagcctccggctttgtacttgcggttatgatggcgaactcaggcggcgcgtgggacaacgccaagaaacatatcgaaggcggaaaacacggcggcaagggctcggatccccacaaggcggctgttgtcggcgatacggtaggcgatcccttcaaagacacttcgggtccctccattaatattcttattaagctgctttccatggtttccattgtttttgcggcctttatcctgaagtattctttagcaaactttttgtttaagtaa

SEQ ID NO: 48052 - protein, 143 aa, Unknown
  Obtained from environmental sample
  misc_feature (1)..(143): Xaa is any amino acid
MMEGTAEADYATCVDICTRGAQKEMILPALTGIISPIVVGLALGVNGVAGMLAGATASGFVLAVMMANSGGAWDNAKKHIEGGKHGGKGSDPHKAAVVGDTVGDPFKDTSGPSINILIKLLSMVSIVFAAFILKYSLANFLFK

SEQ ID NO: 48053 - DNA, 1599 bp, Unknown
  Obtained from environmental sample
  misc_feature (1)..(1599): n is a, c, g, or t
atggatgaaaaacaggctattagcgaaaccagaacctatctcgggatcgaacttggttccacgcggataaaggcggtattaattgacgatagttacgagcctatagcggcgggtattcatgattgggaaaacaggctggaaaacggggtctggacttatcatcttgacgatgtgtggaccggactgcaggactgtttttcgaaattggcgcttgatgtaaaaaaccgctacggcatgacgctttcttcggtcggcgctatcggcatttccgccatgatgcacgggtatttggtgtttgacaaagaggacaatcagatcgttcctttccgtacctggcgcaataccataaccgaaaaagcggcggcttctcttaccgaaaaattcaaattcaatataccccagcgctggagcatcgcccatttataccaggcgatcctgaacggggaatcccatgtaaaggatattaattatataactacccttgccggttatgtgcactggaaattaaccggtaaaaaggtccttggcatcggcgatgcttcgggtatgtttcctgtggacggcgatagttacaatcctttgatgttaaagcagtttgaagctcttattgctccctgtaattacggctggaaaatcgcgaatattctccccgccgttttgagcgccggtgaagacgccggaaccctcacggcgcaaggggcgaaactgcttgatccttccggctgtctgtgggaccacatacccttctgcccgccggaaggagatgccggtacgggcatggttgcgactaacagcgtagcccagcgtaccggcaatattgcggcgggcacttctatttttgccatgatcgttatggaaaaagaatgntcaaaggtataccccgaaattgatattgtcactactccgtcgggaaaacccgtggcgatggttcactgcaacaactgtacttcagatattgacgcatggataaaattgttcggcgaactacttgatataagcggaacaaagccggataaaaccgctctttacagcatgttgtataacaaagcccttgaagcggataatgattgcggcggtcttctttccttcaattactattcgggtgaaactattacgggaattgacgaagggcgtcccctgtttgcccgtctgccggacagtaatttcaatctggcgaattttatgcgtactcttctcttctccggcatggcgacattaaagtacggcatagatattcttacggaaaaagaaaaagcgaaaatagacagtttgttggggcacggcggcttgtttaagatcaaagacataggacagcgctatatggcggcggtctttaacgcgcctgtttctgtgatggaatccgccggagaaggcggcgcgtggggtatcgcccttcttgcctcgtttatgcgagaaggaaaagaaactttggaaaaatttctggcggaaaaagtcttcgccggaaagacaggaacaaagattgaacctgatccgaaagacgtggaaagctttagaaaatttatggaacgttataccgccggtctcaaaattgaaagagccgctgttgaaaatttgaaaaggagtgattatgaatcttaa

SEQ ID NO: 48054 - protein, 532 aa, Unknown
  Obtained from environmental sample
  DOMAIN (12)...(250): FGGY family of carbohydrate kinases, N-terminal domain
  misc_feature (1)..(532): Xaa is any amino acid
MDEKQAISETRTYLGIELGSTRIKAVLIDDSYEPIAAGIHDWENRLENGVWTYHLDDVWTGLQDCFSKLALDVKNRYGMTLSSVGAIGISAMMHGYLVFDKEDNQIVPFRTWRNTITEKAAASLTEKFKFNIPQRWSIAHLYQAILNGESHVKDINYITTLAGYVHWKLTGKKVLGIGDASGMFPVDGDSYNPLMLKQFEALIAPCNYGWKIANILPAVLSAGEDAGTLTAQGAKLLDPSGCLWDHIPFCPPEGDAGTGMVATNSVAQRTGNIAAGTSIFAMIVMEKEXSKVYPEIDIVTTPSGKPVAMVHCNNCTSDIDAWIKLFGELLDISGTKPDKTALYSMLYNKALEADNDCGGLLSFNYYSGETITGIDEGRPLFARLPDSNFNLANFMRTLLFSGMATLKYGIDILTEKEKAKIDSLLGHGGLFKIKDIGQRYMAAVFNAPVSVMESAGEGGAWGIALLASFMREGKETLEKFLAEKVFAGKTGTKIEPDPKDVESFRKFMERYTAGLKIERAAVENLKRSDYES

SEQ ID NO: 48055 - DNA, 417 bp, Unknown
  Obtained from environmental sample
  misc_feature (1)..(417): n is a, c, g, or t
atgacggaaaaagaaagcccgaaccggtgcggcgctataatcgaaaatttcagaaaagaaatggcgaagcgcatagtcggtcaaaatgaaatgatagacgggcttcttgccgggcttatcgccggagggcacgttcttctggaaggcgtgccgggtcttgcaaaaactctggccgttaaaagccttgcgcaaattacaggactggattttaagcgcattcaatttactcccgatcttctgccggcggatttaaccggaacattgatctgggaacaggcgagcgtcgcacatccgagcggtaatttttccgtgcggcgcggtccgatattcgcaaacataattcttgcggacgaaatcaaccgcgcccccgcaaagtacagtccgctcttcttgaagcaatggaagaaaagcaggtaa

SEQ ID NO: 48056 - protein, 138 aa, Unknown
  Obtained from environmental sample
  DOMAIN (44)...(136): ATPase family associated with various cellular activities (AAA)
  misc_feature (1)..(138): Xaa is any amino acid
MTEKESPNRCGAIIENFRKEMAKRIVGQNEMIDGLLAGLIAGGHVLLEGVPGLAKTLAVKSLAQITGLDFKRIQFTPDLLPADLTGTLIWEQASVAHPSGNFSVRRGPIFANIILADEINRAPAKYSPLFLKQWKKSR

SEQ ID NO: 48057 - DNA, 546 bp, Unknown
  Obtained from environmental sample
  misc_feature (1)..(546): n is a, c, g, or t
atggaagaaaagcaggtaacaataggagaaaaaagttatcccctgccgaatcctttttttgtgcttgcgacagaaaatcccattgaacatgaaggcacttattcgcttcctgaagcggagcttgaccgttttttaatgaaacttcttatcgcgtatcccaagcccgacgaagaacttgaaataataaaaaacagctctccgttttcagccgcttgcgctgaaaagcctgccaaacatactaagcatgacgattcgtcgcagcaagcagcgtcgtcgcaagcaacggcgccatcatcgcaagaggcgctttcgcaggtgttagatgccgaagccataaaacttttgcgtaacacggcggaatctatttcatatgatgagcaaatcaacaaatacattgtgtccattgtaccgctacccgccccgtctctaaatcaacgacggggtttaccgtatatgtcatcggcgcgtctccagggcgtcaataccttggacgctgctgcaaattttccgaagctggaaggcggaactttgccctccgaaaactaa

SEQ ID NO: 48058 - protein, 181 aa, Unknown
  Obtained from environmental sample
  misc_feature (1)..(181): Xaa is any amino acid
MEEKQVTIGEKSYPLPNPFFVLATENPIEHEGTYSLPEAELDRFLMKLLIAYPKPDEELEIIKNSSPFSAACAEKPAKHTKHDDSSQQAASSQATAPSSQEALSQVLDAEAIKLLRNTAESISYDEQINKYIVSIVPLPAPSLNQRRGLPYMSSARLQGVNTLDAAANFPKLEGGTLPSEN

SEQ ID NO: 48059 - DNA, 696 bp, Unknown
  Obtained from environmental sample
  misc_feature (1)..(696): n is a, c, g, or t
ttggaaaacgaacttgcccgcgcccttgccgcagaactttttgacagcgaaaacgcaatgcttcgctttgatatgagcgagtatatggaaaaacacagcgtagcaaggctcataggcgcgcccccaggatatgtgggctacgatgagggcggtcagctaacggaggcggttcgcacgcatccttatgctgtgttgctttttgacgaggtagaaaaagcccaccccgatgttttcaatgctttgctgcaagtgctagacgaggggcatttaacagatggcaaaggcagaaaggtgaatttcaaaaacacactgattttgatgacatcaaatttaccggagaaagacttgaaaacatttttccgcccagagtttttaaatcgtttggataatactttggtgttcaaatctttggaaaaaagcgagctgattcaaattgcacagattaaattgaatgctcttgaaaagcggttaaatgcgcagagaatagaggtggtttttgaaaaggctgttgcagaagccattgcagaaaacgcttgtgattctcaatatggcgcacgcccaattcagcggtatattcaaaagcatttggaatctttcctgtcaaaggaaataatttcggggaaaataaaagcggatagtaagattacggttgatttcaagaagggagagtggaagatatgtacgcccgatgcgtaa

SEQ ID NO: 48060 - protein, 231 aa, Unknown
  Obtained from environmental sample
  DOMAIN (2)...(131): ATPase family associated with various cellular activities (AAA)
  misc_feature (1)..(231): Xaa is any amino acid
MENELARALAAELFDSENAMLRFDMSEYMEKHSVARLIGAPPGYVGYDEGGQLTEAVRTHPYAVLLFDEVEKAHPDVFNALLQVLDEGHLTDGKGRKVNFKNTLILMTSNLPEKDLKTFFRPEFLNRLDNTLVFKSLEKSELIQIAQIKLNALEKRLNAQRIEVVFEKAVAEAIAENACDSQYGARPIQRYIQKHLESFLSKEIISGKIKADSKITVDFKKGEWKICTPDA

SEQ ID NO: 48061 - DNA, 507 bp, Unknown
  Obtained from environmental sample
  misc_feature (1)..(507): n is a, c, g, or t
gtgccgggactttgctactacggcgacccggtattgcgcaaaacggcggcgccggtcgaggtgtttgacgacggactccgcaacctcgttctggatatgatagaggctttgcgcgccgccaacggcgtagggctcgcggcgccgcagatcggggtgtcgtcgcgggtggtcgtcatagatacggagtacggcgaggcgccgccgcgcgtgttcgtcaatccggagataatttcgacctcggacgaaacggtcgtggaggacgagggttgcctgagcctgccggggatctcgcttgacgtgaagcgctcggctcgggtgagcgttaaggcgcaaaacgagaagggcgaggagtacgttatagacgacgcttccgggcttttagccaaggccctgcagcatgaaatcgatcaccttaacggcattttgttcatagaccatgtctcagctgtccaacgcggcttgctcagaggcaagctcaaaaagatatcggcgggcgagtttgactaa

SEQ ID NO: 48062 - protein, 168 aa, Unknown
  Obtained from environmental sample
  DOMAIN (1)...(153): Polypeptide deformylase
  misc_feature (1)..(168): Xaa is any amino acid
MPGLCYYGDPVLRKTAAPVEVFDDGLRNLVLDMIEALRAANGVGLAAPQIGVSSRVVVIDTEYGEAPPRVFVNPEIISTSDETVVEDEGCLSLPGISLDVKRSARVSVKAQNEKGEEYVIDDASGLLAKALQHEIDHLNGILFIDHVSAVQRGLLRGKLKKISAGEFD

SEQ ID NO: 48063 - DNA, 1563 bp, Unknown
  Obtained from environmental sample
  misc_feature (1)..(1563): n is a, c, g, or t
atgtctcagctgtccaacgcggcttgctcagaggcaagctcaaaaagatatcggcgggcgagtttgactaaggcggcgcttgcgcggttgctgcctctcttggcggcgctgccgctgcttctgccgctcggctgctccaagataggcatgacgccgaatcccggcggcggcgcgccgtcggacaagtcgatggcttcggcaaaatccgacaaatcctcggcgtggggggaagagggcctgcagggccgcgtcgtccacacacgcgacgttgactttgcacgcgccttcgacgaggagggcgcgccgcaccgcgataaacccgccgccgccgtcaagcccccgatacccgtcgcgcactcgttgcgctacccgtcgatcagcgcacgtaagcggcccgttcgggtgctgctcaaacgcggcgtcgccgaggcagtggcctactccgccgcctcggcgcagatatacacgccggacggctccgtgagcttccgagggcggatgcacatagacgcgacctacgacctcaaaggcgcggtgatcgccacggtgaacaacgtcaaaaaggaggtgcgcctgccgtgcacgctcttcgtcttctccgccacgaacctgcttgaactgggcgaaaacagctaccgcggcgccatcgtcgtcgttccggagggcaagggcgccgtttccatcataaacgtactccacatcgaggactacctgcggggcgttgtgccgctcgagatcgggagtctgagcgaggccgagctcgaggcgctgaaggcgcagactatagccgcccgcacctacacctacaagcggatgtcgctaaacgccgacaagctcttcgacctggcctccacggtcgccgaccaggtctacggcggggcgaacgccgaagccgccgcccccgacatggctatccgcgcgacaaaggatctgataatcgcctacaacaacgatataatagacgcgtactaccactcgacctgcggcgggacgaccgcgaacgtcgaggacgtgtggggcggcgaaagcctcccgtacctccggtcgaggagcgactcggacaagggcggcaaaacctactgcggccaagggggggcgttcaggtggacggagacttggagcatgaacaaactctccaacatcataaagcagcacgccgccgagggaaacatgaccccgcccaaaaacatcagccacggaggacgcggcacgccccaagaggactggacggtgcgccgcatagaggtgcgcgaacgcttgcagtgcggccgggtcaagcaagtggccattgtcactaagctcggagagtacaccgcgagcggcgaaagggcgcgcttcgtcctgcgccggaacaacgccgcgcagcaggccctgcgctcggcgaacttcaacaacgccgtaatggccaacggagaggtaataataagcggcgtcgggtacgggcacggcgtggggctgtgccaagtgggggcgatagcgagggcgcgggcgggagagagctttgagcagattttgcgggcttattatacggatattgcgattagaacggttgctgataaataa

SEQ ID NO: 48064 - protein, 520 aa, Unknown
  Obtained from environmental sample
  DOMAIN (219)...(315): Stage II sporulation protein
  misc_feature (1)..(520): Xaa is any amino acid
MSQLSNAACSEASSKRYRRASLTKAALARLLPLLAALPLLLPLGCSKIGMTPNPGGGAPSDKSMASAKSDKSSAWGEEGLQGRVVHTRDVDFARAFDEEGAPHRDKPAAAVKPPIPVAHSLRYPSISARKRPVRVLLKRGVAEAVAYSAASAQIYTPDGSVSFRGRMHIDATYDLKGAVIATVNNVKKEVRLPCTLFVFSATNLLELGENSYRGAIVVVPEGKGAVSIINVLHIEDYLRGVVPLEIGSLSEAELEALKAQTIAARTYTYKRMSLNADKLFDLASTVADQVYGGANAEAAAPDMAIRATKDLIIAYNNDIIDAYYHSTCGGTTANVEDVWGGESLPYLRSRSDSDKGGKTYCGQGGAFRWTETWSMNKLSNIIKQHAAEGNMTPPKNISHGGRGTPQEDWTVRRIEVRERLQCGRVKQVAIVTKLGEYTASGERARFVLRRNNAAQQALRSANFNNAVMANGEVIISGVGYGHGVGLCQVGAIARARAGESFEQILRAYYTDIAIRTVADK

SEQ ID NO: 48065 - DNA, 981 bp, Unknown
  Obtained from environmental sample
  misc_feature (1)..(981): n is a, c, g, or t
ttgaggcggcgaacctattgtaattcaaacgccgaaggcggacgtactacgccgtctgttgtcggttttaccggcaagggcgaaagggttgtcggcgctccggctaaaaatcaaatgattacaaatccggaaaacacgattttttcaattaagcgttttatgggacgccgtttttcagaagtcggcagcgaaatgaagcttgtgccgtatcgcgtaacggaacaaggcgacgatgtccgcgttgatattgatggtaaaaaatattcgccgcaggaaatttcagcgtttgttttgcaaaagatgaaacagactgccgaggattaccttggcgaagccgttaccgaagcggtaattaccgttcccgcttattttaacgacgctcagcgtcaggcgacaaaggacgcgggcaaaatcgcgggtcttgaggtaaagcgcatcattaacgagccgaccgccgcctcactggcattcggttttaacaaagattccaaaaaagataaagttattgccgtttacgatcttggcggcggcacttttgacgtttcaattctggaattgggcgacggcgttttcgaagttaaatccacaaacggcgacacccatcttggtggcgacgatttcgaccgccgcatcatggaatggcttattgccgaatttaagaaagacaccggcatcgatcttggaaaagacaggatggcgttacagcgcctgcgcgaagccgcggaaaaggcgaagattgagttatccgccatgcaaaccacggaagtcaacctgccgtttatcaccgccgaccagagcggaccgaagcatctgcaaaaatctcttacccgcgctaagtttgagcagatggtggaagacccttctgagcgttcaaagaccgtgcaaaaagcgcttgcggacgcgggtcttaccgcggaacagattgacgaggttattcttgtcggcggttcacccgtattcccgcggttcaacagattgtaa

SEQ ID NO: 48066 - protein, 326 aa, Unknown
  Obtained from environmental sample
  DOMAIN (5)...(324): Hsp70 protein
  misc_feature (1)..(326): Xaa is any amino acid
MRRRTYCNSNAEGGRTTPSVVGFTGKGERVVGAPAKNQMITNPENTIFSIKRFMGRRFSEVGSEMKLVPYRVTEQGDDVRVDIDGKKYSPQEISAFVLQKMKQTAEDYLGEAVTEAVITVPAYFNDAQRQATKDAGKIAGLEVKRIINEPTAASLAFGFNKDSKKDKVIAVYDLGGGTFDVSILELGDGVFEVKSTNGDTHLGGDDFDRRIMEWLIAEFKKDTGIDLGKDRMALQRLREAAEKAKIELSAMQTTEVNLPFITADQSGPKHLQKSLTRAKFEQMVEDPSERSKTVQKALADAGLTAEQIDEVILVGGSPVFPRFNRL

SEQ ID NO: 48067 - DNA, 459 bp, Unknown
  Obtained from environmental sample
  misc_feature (1)..(459): n is a, c, g, or t
ttgaaccgcgggaatacgggtgaaccgccgacaagaataacctcgtcaatctgttccgcggtaagacccgcgtccgcaagcgctttttgcacggtctttgaacgctcagaagggtcttccaccatctgctcaaacttagcgcgggtaagagatttttgcagatgcttcggtccgctctggtcggcggtgataaacggcaggttgacttccgtggtttgcatggcggataactcaatcttcgccttttccgcggcttcgcgcaggcgctgtaacgccatcctgtcttttccaagatcgatgccggtgtctttcttaaattcggcaataagccattccatgatgcggcggtcgaaatcgtcgccaccaagatgggtgtcgccgtttgtggatttaacttcgaaaacgccgtcgcccaattccagaattgaaacgtcaaaagtgccgccgccaagatcgtaa

SEQ ID NO: 48068 - protein, 152 aa, Unknown
  Obtained from environmental sample
  misc_feature (1)..(152): Xaa is any amino acid
MNRGNTGEPPTRITSSICSAVRPASASAFCTVFERSEGSSTICSNLARVRDFCRCFGPLWSAVINGRLTSVVCMADNSIFAFSAASRRRCNAILSFPRSMPVSFLNSAISHSMMRRSKSSPPRWVSPFVDLTSKTPSPNSRIETSKVPPPRS

SEQ ID NO: 48069 - DNA, 588 bp, Unknown
  Obtained from environmental sample
  misc_feature (1)..(588): n is a, c, g, or t
ttgtttaagcgcttcggtcttgttcttgatggactgaatgtcgccgctctcaagggctttacgcaagtcggcgatggcttcctctgttttggatttgtccgccgcgcttactttgtcgcccaagtccttgatgtttttttccgtggcgtaaatcatcgagtcggcctcgtttcgcacttcggctttttcacgctcttttttatcttcttcggcgtggagttccgcctctttaaccatgcggtcaatgtccgagtcgctcaagccgctggagctttcgatacggatcttctgctctttgcctgtaccaagatctttcgcgcttacgtggacaatgccgttcgcgtctatgtcgaaagttacttctatctgcggaactccgcgcggggcgggaggtattcccacaagatcgaagcggccaagcacgcggttctggttcgccatttcgcgttcgccctgcaatacctgaatggagacggctgtctgaccgtctgcggcggtggagaaaatctggctcttgcgggtgggaattgttgtgttacgtgtaatgagttttgtcataacgccgccgagcgtttcgatgccgagtga

SEQ ID NO: 48070 - protein, 195 aa, Unknown
  Obtained from environmental sample
  misc_feature (1)..(195): Xaa is any amino acid
MFKRFGLVLDGLNVAALKGFTQVGDGFLCFGFVRRAYFVAQVLDVFFRGVNHRVGLVSHFGFFTLFFIFFGVEFRLFNHAVNVRVAQAAGAFDTDLLLFACTKIFRAYVDNAVRVYVESYFYLRNSARGGRYSHKIEAAKHAVLVRHFAFALQYLNGDGCLTVCGGGENLALAGGNCCVTCNEFCHNAAERFDAE

SEQ ID NO: 48071 - DNA, 750 bp, Unknown
  Obtained from environmental sample
  misc_feature (1)..(750): n is a, c, g, or t
atgacaaaactcattacacgtaacacaacaattcccacccgcaagagccagattttctccaccgccgcagacggtcagacagccgtctccattcaggtattgcagggcgaacgcgaaatggcgaaccagaaccgcgtgcttggccgcttcgatcttgtgggaatacctcccgccccgcgcggagttccgcagatagaagtaactttcgacatagacgcgaacggcattgtccacgtaagcgcgaaagatcttggtacaggcaaagagcagaagatccgtatcgaaagctccagcggcttgagcgactcggacattgaccgcatggttaaagaggcggaactccacgccgaagaagataaaaaagagcgtgaaaaagccgaagtgcgaaacgaggccgactcgatgatttacgccacggaaaaaaacatcaaggacttgggcgacaaagtaagcgcggcggacaaatccaaaacagaggaagccatcgccgacttgcgtaaagcccttgagagcggcgacattcagtccatcaagaacaagaccgaagcgcttaaacaagcgtcctacaaaattgccgaagaaatttacaaacagcaggccgcgtcaggacagggcggcgctcagggagcgggtcccggcggcggttttgatccaaacatgggcgcgggtcccggcggcggtgattcaatgggcggcagcaacacaaagggcgccgaagacgcggactacgaagtggtagacgagaagtag

SEQ ID NO: 48072 - protein, 249 aa, Unknown
  Obtained from environmental sample
  DOMAIN (1)...(197): Hsp70 protein
  misc_feature (1)..(249): Xaa is any amino acid
MTKLITRNTTIPTRKSQIFSTAADGQTAVSIQVLQGEREMANQNRVLGRFDLVGIPPAPRGVPQIEVTFDIDANGIVHVSAKDLGTGKEQKIRIESSSGLSDSDIDRMVKEAELHAEEDKKEREKAEVRNEADSMIYATEKNIKDLGDKVSAADKSKTEEAIADLRKALESGDIQSIKNKTEALKQASYKIAEEIYKQQAASGQGGAQGAGPGGGFDPNMGAGPGGGDSMGGSNTKGAEDADYEVVDEK

SEQ ID NO: 48073 - DNA, 1044 bp, Unknown
  Obtained from environmental sample
  misc_feature (1)..(1044): n is a, c, g, or t
ttgccgccttcggcggccacaccccgtcaagcccacaaggggcttgccaccccgctagaagcggggaactgcataactttaatctcaaaatttcacattcacccctcaaaaaaggagttcattatgaaaactaaccgttttcttctcgcggcagcctttgggcttgctatggctttcacattttcctgctcatccaacattgagccttcggctttgccacaaggcgattctgcgggaaacggggataacggttcgtcatcttccagtggcaatggcaacagcggcgaagttggctccggctcgtcttcctccgttacaacagacgggaacggtagcaatagttctgtaacgggtagctcgtcttcctttggcggcggcagtagcagctctacgttgaaagagtgcgatgttgtattcaaccctgccaataaattctgctatgacggcgatgtttataataaatgcgatggcatgatctacgatccagtaacacaattttgtaaaggggacatagctgttaccgtcaagtattgcgattatggttatccagtcacagacgatcccaaaagagactgcattccaatagaaaaagtgagcgagtgcaatacagttaacaatagcggcgttttggctaccagttgcggcaggacagatatgaagtattgcgactggggtcctaagacggctaatgacaatggaggctgttatgtagcagaaagcgaatctcattgcaaaagtcataacggcaagttagtggacaaatgcccatcaacttcattaccacatgaccctgtttatggcacacctgtaatttacgatggtgaaacttatcaaacggttgtaattggcactcaaatttggttccagcgcaatttgaattatgtggttgaaggtagcaaatgtggcagcagcggcagtcttagcgatgcgaatactacaacttgcgatacctatggcaggctttacgattgggcaacggcgatgaaattggatgctagctgcaacacccagtactgcgctacccaagtgcaacctcggccataa

SEQ ID NO: 48074 - protein, 347 aa, Unknown
  Obtained from environmental sample
  misc_feature (1)..(347): Xaa is any amino acid
MPPSAATPRQAHKGLATPLEAGNCITLISKFHIHPSKKEFIMKTNRFLLAAAFGLAMAFTFSCSSNIEPSALPQGDSAGNGDNGSSSSSGNGNSGEVGSGSSSSVTTDGNGSNSSVTGSSSSFGGGSSSSTLKECDVVFNPANKFCYDGDVYNKCDGMIYDPVTQFCKGDIAVTVKYCDYGYPVTDDPKRDCIPIEKVSECNTVNNSGVLATSCGRTDMKYCDWGPKTANDNGGCYVAESESHCKSHNGKLVDKCPSTSLPHDPVYGTPVIYDGETYQTVVIGTQIWFQRNLNYVVEGSKCGSSGSLSDANTTTCDTYGRLYDWATAMKLDASCNTQYCATQVQPRP

SEQ ID NO: 48075 - DNA, 1320 bp, Unknown
  Obtained from environmental sample
  misc_feature (1)..(1320): n is a, c, g, or t
gtgtgcgaggttgggatatcccatgtttttgtaattgctaaactgcgaagttccggctcggaaataagaaaaattcaggaagtgggtcgaggcttacgccttccctttgatgaaaccggttcaagggttacaccggaaagatataacgaagattttaaattaacttatattattgattattcggaaaaagaatttgcaaaaaaactggtaggagaaattaacgccgatggcggtaagattgaaggaaaaatcacagatgaaattttggatattctggttaaagcaggttatgcggaagaaagagacaaggcttttggcgctttacttaacgcaggaataattgacagaaatggggagataaaaaataaagacaaatttttcagtctattaccggaagatagcggcttaaaagtaagaaacggagtaattacaggaaacgaaatgccgccaccgcccaaggtacgccttaatcgggagaattttaatataattcgagacctttgggatacggtaataaaacgacgtttagttgaatttgaaaaattaaatgaaaatgaaataaaaaaattactggtaagtcttttttccgatgatgaactctttgtaaaacctgtaacggagattaaaagcgcaaatatacaaagtaatggcaatactgcgattgttgaaatcggcgggtacaaagctattaagtctgatattggcattataacttacggcgagtttttgaaacgattaaataaacatacatcattaccgccggttatattacacaaagctctttcacaggcgcgcaaaggaaaaactactcctgttgattcaatcaataccgatactctccaaaaaattattgaagcgtttgaaacaaaatttgaggaaacctataatcaaaaattcacataccagtcacttgaatacgttgcccaaacaagtctattcataaatggtgattttgtttcggaagtaactcaaagttatcttggaaataatgttgtaaaagaagaaatggattacgctcgttatttatattacaaggcggtatatgacagtgagattgagcataaaattttaatagcaagactgccaaaacaagttaaagtttacggaaaattacctaaaaaaagcataagactgcctacttataccggaggtacaaccagccctgattttgtatttaccatccatgaacaaaactcggaacaagtaataattaactttatagtggaagctaaaagcgataatcctcgcaactctgataaaatcgcagtagcaacacagaaaaaattttttgaattattaaaaaagaaaatcccgatataa

SEQ ID NO: 48076 - protein, 439 aa, Unknown
  Obtained from environmental sample
  misc_feature (1)..(439): Xaa is any amino acid
MCEVGISHVFVIAKLRSSGSEIRKIQEVGRGLRLPFDETGSRVTPERYNEDFKLTYIIDYSEKEFAKKLVGEINADGGKIEGKITDEILDILVKAGYAEERDKAFGALLNAGIIDRNGEIKNKDKFFSLLPEDSGLKVRNGVITGNEMPPPPKVRLNRENFNIIRDLWDTVIKRRLVEFEKLNENEIKKLLVSLFSDDELFVKPVTEIKSANIQSNGNTAIVEIGGYKAIKSDIGIITYGEFLKRLNKHTSLPPVILHKALSQARKGKTTPVDSINTDTLQKIIEAFETKFEETYNQKFTYQSLEYVAQTSLFINGDFVSEVTQSYLGNNVVKEEMDYARYLYYKAVYDSEIEHKILIARLPKQVKVYGKLPKKSIRLPTYTGGTTSPDFVFTIHEQNSEQVIINFIVEAKSDNPRNSDKIAVATQKKFFELLKKKIPI

SEQ ID NO: 48077 - DNA, 1020 bp, Unknown
  Obtained from environmental sample
  misc_feature (1)..(1020): n is a, c, g, or t
atgcgaacgaatattaatgagagtcatgtgagcggcatcattataaacggaagcagtctgccgaacattccctgggaagaaaggccgccgtcaagcaatcccaaaaaggagctgatgtggcggtattcaaaaaacccgattattcccagggacttaaccttgcggtccaatagcatttttaacagcgctgttgtgccgtttaagggggagttcgccggcgtattccgctgcgatgataccgcgcgtcacatggatattcacgcggggaggagcaaggacggtattcattgggttattgaggatgaaccgataaagtttatcaaagacaacccagatgtgcccgattccgattacaagtacgatccccgcgtaatttttattgaagaccggtattacataatttggtgtaacggctatcacggccctaacctgggtatcggttatacttttgattttgaaaaattttatcaaatggaaaacgcgcttatgccctacaaccgcaacggcgcgctcttcccgcgcaagataggaaaaaattacgccatgtacagccgtcccagcgattcagggcatactccctttggtgatattgtttactctgaaagtcccgatctggtttactggggcaaacatcgtcatgttatgtccccgtcagacggatggcaaagcactaaagtaggcgcgggtccttgccccattgaaacatcagaaggttggcttgttttttatcacggggtactgacaagttgtaatggctttgtatattcgttcagcgcggcattgatggatctagaaaagccgtggaaagttatagcgcggccaagaccgtacatcatcaacccacgtgagatttacgaattggctggtgacgtgcctaatgttactttccccgtagccgcgcttgttgacaaagacacaggtagagtggcgatttattacggctgcgcggatacggttacggggcttgtctttggtagggtagacgagattgtcgattggataaaaaagaaccggatgtaa

SEQ ID NO: 48078 - protein, 339 aa, Unknown
  Obtained from environmental sample
  DOMAIN (20)...(336): Domain of unknown function (DUF377)
  misc_feature (1)..(339): Xaa is any amino acid
MRTNINESHVSGIIINGSSLPNIPWEERPPSSNPKKELMWRYSKNPIIPRDLTLRSNSIFNSAVVPFKGEFAGVFRCDDTARHMDIHAGRSKDGIHWVIEDEPIKFIKDNPDVPDSDYKYDPRVIFIEDRYYIIWCNGYHGPNLGIGYTFDFEKFYQMENALMPYNRNGALFPRKIGKNYAMYSRPSDSGHTPFGDIVYSESPDLVYWGKHRHVMSPSDGWQSTKVGAGPCPIETSEGWLVFYHGVLTSCNGFVYSFSAALMDLEKPWKVIARPRPYIINPREIYELAGDVPNVTFPVAALVDKDTGRVAIYYGCADTVTGLVFGRVDEIVDWIKKNRM

SEQ ID NO: 48079 - DNA, 573 bp, Unknown
  Obtained from environmental sample
  misc_feature (1)..(573): n is a, c, g, or t
atggatagcgctttgatagtttcctgcatggaaaaagatacggcttttttaacagagctgttaggcgcggcttccgttcgtcatattacttcgctaaagtctgtcgacaacgcgcagaagcaaattttacaggaggatttcgacctggtgattgtcaacgcgccgttgcgcgacgaaagcggagaaaatttttccagatacctcgcttccaaaagcgcgtcgcaggttatcctcctggtaaaaaatgaatgtattaattctgtttcctcatcctgtgaagacgccggggtgtttgtaattccaaaaccggtggaaaaggcggtttttttatccgcgctgtccctgataaaatcgactcaaagcaggattaaaaggatacagaatgaaaacgcgcagctaaagcaaaaaatcgaagacataaggatcatcgaccgcgcgaaatgtatattaatatccattatgaaaatgaatgagcaggaagcccacaggtatatagaaaaacaggcgatggacattcgctcaacanagagaattgtagccgaagggatcttaaagctgtatgagaactattag

SEQ ID NO: 48080 - protein, 190 aa, Unknown
  Obtained from environmental sample
  DOMAIN (129)...(184): ANTAR domain
  misc_feature (1)..(190): Xaa is any amino acid
MDSALIVSCMEKDTAFLTELLGAASVRHITSLKSVDNAQKQILQEDFDLVIVNAPLRDESGENFSRYLASKSASQVILLVKNECINSVSSSCEDAGVFVIPKPVEKAVFLSALSLIKSTQSRIKRIQNENAQLKQKIEDIRIIDRAKCILISIMKMNEQEAHRYIEKQAMDIRSTXRIVAEGILKLYENY

SEQ ID NO: 48081 - DNA, 1380 bp, Unknown
  Obtained from environmental sample
  misc_feature (1)..(1380): n is a, c, g, or t
gtgccgtttttgccgtcagcctggcgattgacgaagcccgccgggcttacctacaacggccttttgtcgctgcagcaccggggccaggaaggcgctggcatagccgttgtaaacgatggccatattttctgccacaaggacacggggcttgtcagtgaggttttttccactgccgagctcgaaaaactgcccaaaggaaaaattgccgtcgggcatacgcggtattcgactaccggagtcaacaaaagagaaaacgtgggaccgtttgtaacggattacctgacaggaaggatcgcggtagcgcataacggtaacgtaacaaatgcccttgtaatacgagaaaatttaaagcgccagggcttgcgcttcggcgcgacaagcgacagcgaggttgtttcatcgtttatggcatactacatgatgaacgatgaaaacgctttgtcaggcctcataaaagccgcggatatgctgcggggcgcgttttcgctggcaatagtctgcaacgatgataagctgattgccatccgcgatccaaacggtttccgccccctgtgcatcgggcaaaacgaactgggctatgccgtggtttcggagagctgtgcccttgacgcctgcgattttaaatttgtcagggatgtaaagcctggcgaggttgtcgtaatcgaaaacggcgaaataacagacgagggcataaagttaaaaaataaagaagacaatcgtgggctgtgtatttttgagtacgtttatttcgcgaggccggattcggtagtcgacggactttctgtttataaagcgcggtacaaaatgggactgatactcgcggaagaacaccctgtggaagcggacatggtctgcggcgtgccggaattcggcctggacgccgcgntcggatacagcgaaaaaagcgggataccgattgccgcangctttgttaaaaaccgttacattggccgcagctttatttatcccacgcagacccagcgggacaacgccgtcaagctaaagctcaaccctctggcagccggcattcgcgggaaaaagattgtgcttgtggacgattctattgtccgcggtacgacaagcgaaaaaattgtcagaagcctaaaaaactcaggcgccaaagaggtgcacatgagggtctcttcaccgccttttcgccacacctgccattacggaaccgacatagacagcgaagaaaacctgatagcgaataaaatgagccttgaagaaatcagggcaaaaatcggcgcggacagccttggctatatcagcatagaaggcttgaaacgcgcctgcggcggatgtgcgctggacttttgcaccgcctgctttacaggcaccggcgaatcttcacgggcaaagaaagatgtgttcgaatag

SEQ ID NO: 48082 - protein, 459 aa, Unknown
  Obtained from environmental sample
  DOMAIN (254)...(402): Phosphoribosyl transferase domain
  misc_feature (1)..(459): Xaa is any amino acid
MPFLPSAWRLTKPAGLTYNGLLSLQHRGQEGAGIAVVNDGHIFCHKDTGLVSEVFSTAELEKLPKGKIAVGHTRYSTTGVNKRENVGPFVTDYLTGRIAVAHNGNVTNALVIRENLKRQGLRFGATSDSEVVSSFMAYYMMNDENALSGLIKAADMLRGAFSLAIVCNDDKLIAIRDPNGFRPLCIGQNELGYAVVSESCALDACDFKFVRDVKPGEVVVIENGEITDEGIKLKNKEDNRGLCIFEYVYFARPDSVVDGLSVYKARYKMGLILAEEHPVEADMVCGVPEFGLDAAXGYSEKSGIPIAAXFVKNRYIGRSFIYPTQTQRDNAVKLKLNPLAAGIRGKKIVLVDDSIVRGTTSEKIVRSLKNSGAKEVHMRVSSPPFRHTCHYGTDIDSEENLIANKMSLEEIRAKIGADSLGYISIEGLKRACGGCALDFCTACFTGTGESSRAKKDVFE

SEQ ID NO: 48083 - DNA, 1551 bp, Unknown
  Obtained from environmental sample
  misc_feature (1)..(1551): n is a, c, g, or t
atggccgagaaggccctgcaggaaactcggctctgcgctgttaatctgcgccctgccatgtccgacggagggatcgtttttttccgctgcccggatttattggcggatttgggcagggcctaccagtatactccctctttgcaggatgagggggcgaggcttttcaaaaactgggcggcgcttcttgaggggcaaaatagcatggacgagtacaaagagttgggaatttaccttggtactctggacggcgaaaccattaaagggcgaaagttctttgtcaatttctactcaggcagaattgagcgggcaagagcgcaatacgctgaatcgacggaatactttaaacgggcgctggaattctcacctgacgaactacagtccgatgcctgccaatggtacttactgatgaacgcccaggccggaagccccgcggccgcaatgcggcaggctttggcaagcatgaacaaatggaacgatgtaaattatttttccgatattttggacagcctttcctgttattttgtcggcaggcggcaatggggcaatgtgttggaattattcaccgggcttgaaactattggcgcaagtaagtcccttgcccaatacgcctggatactggggagggcagttcaggaagggtatatcaaaacggaacgcagcgcggaggattttttcagaattgcctttgagaggggtaaggattccctttactaccgggctatggcggcttccgccctgggagtttcttttgcctttgaggaaggtaaatcttccgaggaaacacagaaaggttcagagcccggttccgaactggaattccttttgggcttttttgaatatggcgcgtcttcgttcgcgcttccgtacattcaggcggtcgagaatgatctttcccctcccgaactcagaaaggttgccgaagccctcgccgcttcagaccgctggaaggatacccttgattttgtttccaggtatacaagccggaaagattttgaaataaccaggcaggatcttctgctgttttatccccagccttttaaggaattgatagaaaaatacgcaagcgaagcggaacttggggcggaaacgctctacggtcttgtccgaacagaaagttattttgtaagcgacgccgtttcccgttccggcgctgtcggccttgtccagctcatggctcccactgccgaagatatggccaaccggatagcccgaagcggcgggccggattaccgcaattcggcgatgaacctgaaagacccggagacaagtattcacatcggttcgtattaccttcgttaccttatagagcaaatgggaaaccccatgctggcccttctggcatataacggaggtatgggcagggtacggcgctggcttaccgctgacaggcagaaggcaggaggcgctcttccctacgatctttttcttgaaagcatagaaatcagcgaaaccagggattacggacgccaggttttgtccgccgcctctgtctacggctatctttattacgggctaagtatggaaaaagtcgcagcggatatttacaagtaa

SEQ ID NO: 48084 - protein, 516 aa, Unknown
  Obtained from environmental sample
  DOMAIN (348)...(471): Transglycosylase SLT domain
  misc_feature (1)..(516): Xaa is any amino acid
MAEKALQETRLCAVNLRPAMSDGGIVFFRCPDLLADLGRAYQYTPSLQDEGARLFKNWAALLEGQNSMDEYKELGIYLGTLDGETIKGRKFFVNFYSGRIERARAQYAESTEYFKRALEFSPDELQSDACQWYLLMNAQAGSPAAAMRQALASMNKWNDVNYFSDILDSLSCYFVGRRQWGNVLELFTGLETIGASKSLAQYAWILGRAVQEGYIKTERSAEDFFRIAFERGKDSLYYRAMAASALGVSFAFEEGKSSEETQKGSEPGSELEFLLGFFEYGASSFALPYIQAVENDLSPPELRKVAEALAASDRWKDTLDFVSRYTSRKDFEITRQDLLLFYPQPFKELIEKYASEAELGAETLYGLVRTESYFVSDAVSRSGAVGLVQLMAPTAEDMANRIARSGGPDYRNSAMNLKDPETSIHIGSYYLRYLIEQMGNPMLALLAYNGGMGRVRRWLTADRQKAGGALPYDLFLESIEISETRDYGRQVLSAASVYGYLYYGLSMEKVAADIYK

SEQ ID NO: 48085 - DNA, 375 bp, Unknown
  Obtained from environmental sample
  misc_feature (1)..(375): n is a, c, g, or t
ttggatgcagttggggtgatgatggataaaagaagtatggcggtatccgaaaatcaggatgtttctgaaaaattatcaatattaattgatgcgacagttaaagaaatccctggtactgaaaaaatttatttatttggttcttatgcctacggaaagccttcaggagaaagcgatcttgatttaatggttattactgacaaagaaattgatgatgcaatactatcggtaacagaaattcggtataacacatgggggaaagttggtgtatttgatatgttggtctacagtgaagaaatatttaatgacagaaaagagaaatacaatttagaaaacaaggtttttaatgaaggaaaaataatatatgaaagaatatga

SEQ ID NO: 48086 - protein, 124 aa, Unknown
  Obtained from environmental sample
  DOMAIN (21)...(120): Nucleotidyltransferase domain
  misc_feature (1)..(124): Xaa is any amino acid
MDAVGVMMDKRSMAVSENQDVSEKLSILIDATVKEIPGTEKIYLFGSYAYGKPSGESDLDLMVITDKEIDDAILSVTEIRYNTWGKVGVFDMLVYSEEIFNDRKEKYNLENKVFNEGKIIYERI

SEQ ID NO: 48087 - DNA, 873 bp, Unknown
  Obtained from environmental sample
  misc_feature (1)..(873): n is a, c, g, or t
ttgggaaagaacacagagattatcaatgtcgggcacgccgatctttttgacgatacaaacggaaactggtggatggttcttttggcgtcccgcccacattacggggtatgcccgcttggacgggaaacttttatggttcctgtccactgggaagacaactggccgtttatctcttcaaaatccgggcttgtagaaccggagtttaaccttcagcctttgcctattacaaacgcggatccggaatggagttatgaaccgaactgcgatcatttttacgggaaactgccgctccactggctgatgctgcgaatgccagcaaataaaaaagactgcgcggtaggttttaattcgcattccggggcgcttaggctttttacaaaagcggcgagcctgcgaatgacggatcatccttcttttgcgggaagaaggattaagcataaaaactgggcgttcacagttgcaatggaatttacgccaaagactgcgggtgaaagcgcaggtatagttttactgcaaagcgaaaaataccagtaccgctatgaaatttgcatagggctttccggaaaaccgtctttacgccttatgcgcgccgccggaaaagaagatgaaaaattggcggagaccgagtgtccggtaagcgaaaaacatattgtgcttgcggtaaggtgcgaagaaatggctctttcatttttttgcggcaaggatcaatattcccttgcgtgtttttcggatcatcacgacgcgaaaatgctaagcacggaattttcaggcggctttacaggccttgtcgccggagttttcgcgtcgggcaacggaaaggataccgatcattacgcggatgttttatgggcggaatacagggaactgttatga

SEQ ID NO: 48088 - protein, 290 aa, Unknown
  Obtained from environmental sample
  misc_feature (1)..(290): Xaa is any amino acid
MGKNTEIINVGHADLFDDTNGNWWMVLLASRPHYGVCPLGRETFMVPVHWEDNWPFISSKSGLVEPEFNLQPLPITNADPEWSYEPNCDHFYGKLPLHWLMLRMPANKKDCAVGFNSHSGALRLFTKAASLRMTDHPSFAGRRIKHKNWAFTVAMEFTPKTAGESAGIVLLQSEKYQYRYEICIGLSGKPSLRLMRAAGKEDEKLAETECPVSEKHIVLAVRCEEMALSFFCGKDQYSLACFSDHHDAKMLSTEFSGGFTGLVAGVFASGNGKDTDHYADVLWAEYRELL

SEQ ID NO: 48089 - DNA, 771 bp, Unknown
  Obtained from environmental sample
  misc_feature (1)..(771): n is a, c, g, or t
atgaggcattctgcagaaaaacttgatatctgggcaaagcttgatatttggatgagtaaatatccatcgccagttagaataatatacgatagcttgcgaatatttttgctagagcattgcacaataagagcaacagcactcgcatatacatcgctcttggcagcaatacccatgtttattttgctcacctccataagcctctcccttggggttggggatttattcatagaccatttgccaagccttttgccagagttgctggaaaaaataacgccccatatagacaatgcattgcatttatttttgcccgatagcaatattgaaataaacactttgactgttgtgattctagatagcattatgccatttttagtcaaggctcaggggattaaactcgggtctttgggaattataggtgcctttggtttgctggttacatttatacttgcaatagacacaatagaaacaaatatgaacatagtttggggggtcaacgaagcccgcggctatgggcaaaaggcggcgatattcattccctttttgcttttgtttgctgcgggaataggcttgttcagtttgtttttgcactatatgcgagaaattttagatgatattttagttcaaagactgccatttggggagtttggcgcatggcttgtggatttgagcattcccgttgttttgatggttttgatattgtttgctttgtggcttttgtattgctatatgccttatgttcctgatgattgtgggtttggagagcgagcatga

SEQ ID NO: 48090 - protein, 256 aa, Unknown
  Obtained from environmental sample
  misc_feature (1)..(256): Xaa is any amino acid
MRHSAEKLDIWAKLDIWMSKYPSPVRIIYDSLRIFLLEHCTIRATALAYTSLLAAIPMFILLTSISLSLGVGDLFIDHLPSLLPELLEKITPHIDNALHLFLPDSNIEINTLTVVILDSIMPFLVKAQGIKLGSLGIIGAFGLLVTFILAIDTIETNMNIVWGVNEARGYGQKAAIFIPFLLLFAAGIGLFSLFLHYMREILDDILVQRLPFGEFGAWLVDLSIPVVLMVLILFALWLLYCYMPYVPDDCGFGERA

SEQ ID NO: 48091 - DNA, 1221 bp, Unknown
  Obtained from environmental sample
  misc_feature (1)..(1221): n is a, c, g, or t
gtgcttttaactatatttttcatcatgaataaagttttaattatcggggcaggtggggttgccaatgtggttgcacaaaaatgcgcgcaaaatagcgaggtgtttggggagttgctgatagcaagccgcacagagagcaaagccaaaacaatagctagccgcataaagaacattcctgtttgcacagcaaaggtggacgcagacaaatccgcagaagttgctgctataataaaggattttaagcccaaaatggttttgaacatagcactcccctatcaagacttggcaataatggatgcctgccttgaaactggggttgattacctagacacagcaaactacgaacccaaagacattgcccactttgaatattcttggcaatgggcttaccacgaaaggttccaaaacgcaggcataatggcactcttgggttcaggttttgaccctggcgtgacaaacgtctatacagcttatgcaaaaaaacaccactttgacaaaatagatacccttgatattgtggactgcaacaacggcaaccacggaaaggcattcgcaacaaatttcaacccagaaataaacataagagaaataacccaaaatggcagatactacgaaaacggagaatggaaagaaattcctccgctttcagttcacaaagatataagctacccggaggttgcagtacgcggctcttatgtgctgttccacgaggagttggaatctcttgtaaagcacttcccagaaataaaaagagcaagattttggatgacattcggcgatgaatacataaagcatttgaccgttctaaaaaatgttggaatgacacgcatagaccctgtgaaattcaacggcatagatataatccctctggaatttttaaaggcacttcttcccgaaccctcaacccttggcgaaaactattccggcaaaacctgcataggctgccaaataacagggcaaaaaaacgggaaccagcaaacatatttcgtttacaatgtttgcgaccacgcagagtgtttcaaagaagttcaagggcaggcaatagcctacacaacaggtgttcccgcaatgctaggtgcagcccttatgctcacaggaaaatggagaggcaaaggtgtgttcaatatggaacaattagaccccgatccttttatggcagaaataggcaaatgggggcttccttggaaggaactatttggcaaacaagcggagttggtataa

SEQ ID NO: 48092 - protein, 406 aa, Unknown
  Obtained from environmental sample
  SIGNAL (1)...(27)
  DOMAIN (12)...(396): Saccharopine dehydrogenase
  misc_feature (1)..(406): Xaa is any amino acid
MLLTIFFIMNKVLIIGAGGVANVVAQKCAQNSEVFGELLIASRTESKAKTIASRIKNIPVCTAKVDADKSAEVAAIIKDFKPKMVLNIALPYQDLAIMDACLETGVDYLDTANYEPKDIAHFEYSWQWAYHERFQNAGIMALLGSGFDPGVTNVYTAYAKKHHFDKIDTLDIVDCNNGNHGKAFATNFNPEINIREITQNGRYYENGEWKEIPPLSVHKDISYPEVAVRGSYVLFHEELESLVKHFPEIKRARFWMTFGDEYIKHLTVLKNVGMTRIDPVKFNGIDIIPLEFLKALLPEPSTLGENYSGKTCIGCQITGQKNGNQQTYFVYNVCDHAECFKEVQGQAIAYTTGVPAMLGAALMLTGKWRGKGVFNMEQLDPDPFMAEIGKWGLPWKELFGKQAELV

SEQ ID NO: 48093 - DNA, 465 bp, Unknown
  Obtained from environmental sample
  misc_feature (1)..(465): n is a, c, g, or t
atggccgagcaaagttcgccaaataccaaggaactgggcggcatcggcgataacaacggccttatcgccgaggagattgtgttccattcgttggcgaaaaacaagattttcgccggaataaagtttgattccgttgatcatggaactgtgcgctcgagaacgcttcccgatggcaaagacgtgaagggagagtacgacgttcttctttacaacgggacgtcggtcgcgattatcgaggtcaaacaccgtgtggggcgagaggcgcttaagcgtttgatagaagtgcagctgccgagattcaggctgatttttccggagtataaggatcgcaagatgtacttgggtctcggcgggatgtcttttgaaaaaaacatcgcggaggaagcgcatagtttgggcatagccacgctgacgctcagcggcgacgcggtggaaattgacgacaagaacgttaaggcgtggtag

SEQ ID NO: 48094 - protein, 154 aa, Unknown
  Obtained from environmental sample
  misc_feature (1)..(154): Xaa is any amino acid
MAEQSSPNTKELGGIGDNNGLIAEEIVFHSLAKNKIFAGIKFDSVDHGTVRSRTLPDGKDVKGEYDVLLYNGTSVAIIEVKHRVGREALKRLIEVQLPRFRLIFPEYKDRKMYLGLGGMSFEKNIAEEAHSLGIATLTLSGDAVEIDDKNVKAW

SEQ ID NO: 48095 - DNA, 366 bp, Unknown
  Obtained from environmental sample
  misc_feature (1)..(366): n is a, c, g, or t
atgcgcgagctcttcctccagatcgcctacggacgcacacagacggccttctccgaaggcggtctccccatcggcgccggacttgaagacctcggcaagggcctccgctcccaaatcggcaccatgtacgggacggtcgccaagggcgtccgctacctcgaaatggccgagggctacgtcacccgcttagccttagacaaggaagatttagtcatcggatacgagttcgttaacctcggcaaggtgatggagtccgtcagcaagggcgtcgatcccaaagaggccattgccaaagccaccggcacttacggcaggttcaaggaagaggacggcgctgtcaaacacattaaccccagacacgaataa

SEQ ID NO: 48096 - protein, 121 aa, Unknown
  Obtained from environmental sample
  misc_feature (1)..(121): Xaa is any amino acid
MRELFLQIAYGRTQTAFSEGGLPIGAGLEDLGKGLRSQIGTMYGTVAKGVRYLEMAEGYVTRLALDKEDLVIGYEFVNLGKVMESVSKGVDPKEAIAKATGTYGRFKEEDGAVKHINPRHE

SEQ ID NO: 48097 - DNA, 999 bp, Unknown
  Obtained from environmental sample
  misc_feature (1)..(999): n is a, c, g, or t
atggctctattcgaaagttatgagagaaggataaaccaaatcactcccgtgctcaaaaagtacggccttgagtctttggagaaggcggaagaactctgcttggggcgaggcgtggacgcgcgcaaaatcgtcaaagaaattcagcccatctgcttcgataacgcctgctgggcctacgtcttaggcgccgcgatagcgttcaagaagggtgaaaagaaggccagcgagattgccaagacgctcggcgagggcatgcaggccttctgcatcccgggctccgtagccgacgaccgcaaagtgggattgggccacggtaacctcgcttcgatgctgctggaagaggggactaagtgcttcgccttcttagccggccacgagtccttcgccgccgccgaaggcgccataggcttagccaagagcgccaacaaggcccgcacatccccgctaaaggtgatactcaacggactcggcaaggacgccgcccagatcatctcgaggatcaacggcttcacctacgtccagacgaagttcgactattacacaggcaagctgaacgtggtcaaggagataaagtacagcgagggcgccagagccgccgtgcggtgctacggcgccgacgacgtccgcgagggcgtggccatcaaccaccacgagggcgtggacgtctccatcaccggaaactcgaccaacccaacgcgcttccagcatccggtagccggcacgtacaagaaagagtgcgtggaacaggggaaaaagtacttctccgtagcctccggcggcggcacaggccgcaccctccaccccgacaacatggccgccggccccgcctcctacggcatgaccgacaccatgggccgcatgcactccgacgcccagttcgccggctcgtcgtctgtgcccgcgcacgtcgaaatgatgggcttcctcggcatgggcaacaaccccatggtaggcgcgtcggtggcaatcgcggtggcggtggagcaggcgtctaagtag

SEQ ID NO: 48098 - protein, 332 aa, Unknown
  Obtained from environmental sample
  misc_feature (1)..(332): Xaa is any amino acid
MALFESYERRINQITPVLKKYGLESLEKAEELCLGRGVDARKIVKEIQPICFDNACWAYVLGAAIAFKKGEKKASEIAKTLGEGMQAFCIPGSVADDRKVGLGHGNLASMLLEEGTKCFAFLAGHESFAAAEGAIGLAKSANKARTSPLKVILNGLGKDAAQIISRINGFTYVQTKFDYYTGKLNVVKEIKYSEGARAAVRCYGADDVREGVAINHHEGVDVSITGNSTNPTRFQHPVAGTYKKECVEQGKKYFSVASGGGTGRTLHPDNMAAGPASYGMTDTMGRMHSDAQFAGSSSVPAHVEMMGFLGMGNNPMVGASVAIAVAVEQASK

SEQ ID NO: 48099 - DNA, 645 bp, Unknown
  Obtained from environmental sample
  misc_feature (1)..(645): n is a, c, g, or t
gtgcttcgccttcttagccggccacgagtccttcgccgccgccgaaggcgccataggcttagccaagagcgccaacaaggcccgcacatccccgctaaaggtgatactcaacggactcggcaaggacgccgcccagatcatctcgaggatcaacggcttcacctacgtccagacgaagttcgactattacacaggcaagctgaacgtggtcaaggagataaagtacagcgagggcgccagagccgccgtgcggtgctacggcgccgacgacgtccgcgagggcgtggccatcaaccaccacgagggcgtggacgtctccatcaccggaaactcgaccaacccaacgcgcttccagcatccggtagccggcacgtacaagaaagagtgcgtggaacaggggaaaaagtacttctccgtagcctccggcggcggcacaggccgcaccctccaccccgacaacatggccgccggccccgcctcctacggcatgaccgacaccatgggccgcatgcactccgacgcccagttcgccggctcgtcgtctgtgcccgcgcacgtcgaaatgatgggcttcctcggcatgggcaacaaccccatggtaggcgcgtcggtggcaatcgcggtggcggtggagcaggcgtctaa

SEQ ID NO: 48100 - protein, 214 aa, Unknown
  Obtained from environmental sample
  misc_feature (1)..(214): Xaa is any amino acid
MLRLLSRPRVLRRRRRRHRLSQERQQGPHIPAKGDTQRTRQGRRPDHLEDQRLHLRPDEVRLLHRQAERGQGDKVQRGRQSRRAVLRRRRRPRGRGHQPPRGRGRLHHRKLDQPNALPASGSRHVQERVRGTGEKVLLRSLRRRHRPHPPPRQHGRRPRLLRHDRHHGPHALRRPVRRLVVCARARRNDGLPRHGQQPHGRRVGGNRGGGGAGV

SEQ ID NO: 48101 - DNA, 1263 bp, Unknown
  Obtained from environmental sample
  misc_feature (1)..(1263): n is a, c, g, or t
atgatgaacgctatggattttattgaatcttgtatcaccgtaaacaaagggaacgtttctccccaaatgcgtaacgccattaaagaaagtcttgagctgatgcgcgaggacaaagtcgcctcccaccggcgcaccattactacgttccttcaaaatgtcaattacaatgatcctattacaaacagacctgtcattaaagatatgttaggtgattatcttcttacaggtaaatacggtaaaatttttgacgcggaggcctccgccctttctcttgatacgcgcttccttgccattgagatggaagccctgatgaacaggggagagagctgcgtcgttccggctcttgtctatctttttaattttgtcgaaaagaaatttgacggacggcttactttccttatccttgacgaagcatggctttttcttaaaaacgagactttctcacaaaaaatttcggaatggcttaaagtcctgcgaaagaaaaacgtttatgtcattttcgccactcaggaagtcgcggatgtcgcaaagtctcctttaaaaactacaattattcaacagtgccttacaaaaatttatcttgccgacccttcggctggtacaatgatgaacgtctacggggaattcgggcttactccttctgaaatttctttaatcgcttccgccaccatgaagcgagattatttttatacaagccctgccggtaaacggctttttcaacttgatctcggacagcttacgctctcccttatcggctctcccaaccacgcgctcctcgatgagctcgctgcctgttatgagcccggaagcgccttatgcgccgaaatactttccgcgaaacgtgttaatttcaaacgttttcttaacgaagactcccccgttgatcccgagccgcttctcaggcaaaaatctgttttacgttccgctgttcccgaacaaattgtccaacagacggaatcttcaactgaaataaaaccggaaatttccatagtccagccaaatattgttaacatggctgattttattgacgctgtggcttctcttccgaaacgcaagaaaaataacggatcaggtagagccgcttccgctatcgccgaacagttcaagacaagtacttctattgtttacaaagttaaaaaaattcttaaatatggaagtaacgaaattattgaatctttacgtaatagaaacattcctgtaagtactgcctataaacgcatgattaaggaacgcaaaactgaaccggaacaggtcgaaggataa

SEQ ID NO: 48102 - protein, 420 aa, Unknown
  Obtained from environmental sample
  misc_feature (1)..(420): Xaa is any amino acid
MMNAMDFIESCITVNKGNVSPQMRNAIKESLELMREDKVASHRRTITTFLQNVNYNDPITNRPVIKDMLGDYLLTGKYGKIFDAEASALSLDTRFLAIEMEALMNRGESCVVPALVYLFNFVEKKFDGRLTFLILDEAWLFLKNETFSQKISEWLKVLRKKNVYVIFATQEVADVAKSPLKTTIIQQCLTKIYLADPSAGTMMNVYGEFGLTPSEISLIASATMKRDYFYTSPAGKRLFQLDLGQLTLSLIGSPNHALLDELAACYEPGSALCAEILSAKRVNFKRFLNEDSPVDPEPLLRQKSVLRSAVPEQIVQQTESSTEIKPEISIVQPNIVNMADFIDAVASLPKRKKNNGSGRAASAIAEQFKTSTSIVYKVKKILKYGSNEIIESLRNRNIPVSTAYKRMIKERKTEPEQVEG

SEQ ID NO: 48103 - DNA, 777 bp, Unknown
  Obtained from environmental sample
  misc_feature (1)..(777): n is a, c, g, or t
atgaacgacggcgatctgcttgttctctcgtatcccacctattcgctctatcccgtactcgcggaggcaaacggctgccgcgtggaatcggcggatacgcgcgaagatttttcaatagacactgaggcaatgcttgcggtacgcaacgcgcgtatggcgatcatagcgaatccgaacgccccgacaggactgctcctcgataaaaagcagattcgggattttgcgaaacgctttgacgggctggttgtggtggatgaggcctacatcgattttgcgggcgagggcgcttcctgcctctccgagctcggcgcgttggataatctgatcatcctgcgcaccttttctaaatccttctcgctctgcgggatacgcgtgggctacgcctttgccgcgccggctctcgcggaggggctcatagccatgaaggattcctataacatcgatcgcgtggcgcaatgcggcgcggaggcagccatccgtgatactgcctggatgcgcgcgaatgccgcgcgtatctgcaagacgcgcgccaaatttacgaaggcgcttgcggagcgcgggtttgagacgcttccgagcgcgagcaattttgtgttcacgcggcacccgaaaattgccgccgccgaattgaaatcgcggctccagcgggaagagatatacgtccggcattttgacgcgcgccggctttctgagtatctgcgcatttccataggcaccgacagggatatggcacgccttgcgggcgcgctcgatcgcgcgcttttggttcggcgatag

SEQ ID NO: 48104 - protein, 258 aa, Unknown
  Obtained from environmental sample
  DOMAIN (1)...(250): Aminotransferase class I and II
  misc_feature (1)..(258): Xaa is any amino acid
MNDGDLLVLSYPTYSLYPVLAEANGCRVESADTREDFSIDTEAMLAVRNARMAIIANPNAPTGLLLDKKQIRDFAKRFDGLVVVDEAYIDFAGEGASCLSELGALDNLIILRTFSKSFSLCGIRVGYAFAAPALAEGLIAMKDSYNIDRVAQCGAEAAIRDTAWMRANAARICKTRAKFTKALAERGFETLPSASNFVFTRHPKIAAAELKSRLQREEIYVRHFDARRLSEYLRISIGTDRDMARLAGALDRALLVRR

SEQ ID NO: 48105 - DNA, 873 bp, Unknown
  Obtained from environmental sample
  misc_feature (1)..(873): n is a, c, g, or t
ttgcgggcgcgctcgatcgcgcgcttttggttcggcgatagccatgcccagggcgatcatcaccggagcaagcggaaaatggggcgcatatttgcgcttaccctcgcgaagaacggctactcgcttgtgctgcattatcacaaaaacaaaaaggcgctcgccccgctcaaagaggagcttgccgcgatgggctgctccgtgatcgttcgggcgtgcgatctcacgaatcccggggaacgcgcgcgttttgcgctgaggtgctttaccgccgagacggaggtgctgatcaacagtgccgcgtgtttttcctgcgggacgatggcggagacgctcgcggaagacgcggctgatgtcttttcgctgaacactctcgccccgtacgatctcatcgccctttttgccgcttccaggacggaagcgccccggggagccacggatggcggtttggaacggggcgcatccaggacggaagcgccccggggagccacggagggcggtttggaacggggcgcttcccgggcgcggcttcgctcttccggtctggtcgtcaacctcctcgattccaagatatatcggaacgcctcgcgctatgccgcctataccctctcgaaaaaatccctcgccgatatcaccctcctcgcggcccgcgaattcgcgccctcgctgcgcgtcaacgcaatcgcgccgggctgtctctttccggaaggtgactcggatcggggtatgtctggggagggcggttggactcggggcgcgcctctcgggaacgcgggaacggcggaagatatcgggcacgcgctggaattttttgtgcgggcacagagcgtcacggggcagatactttgcgttgacggcggcatctcgcttgggtag

SEQ ID NO: 48106 - protein, 290 aa, Unknown
  Obtained from environmental sample
  misc_feature (1)..(290): Xaa is any amino acid
MRARSIARFWFGDSHAQGDHHRSKRKMGRIFALTLAKNGYSLVLHYHKNKKALAPLKEELAAMGCSVIVRACDLTNPGERARFALRCFTAETEVLINSAACFSCGTMAETLAEDAADVFSLNTLAPYDLIALFAASRTEAPRGATDGGLERGASRTEAPRGATEGGLERGASRARLRSSGLVVNLLDSKIYRNASRYAAYTLSKKSLADITLLAAREFAPSLRVNAIAPGCLFPEGDSDRGMSGEGGWTRGAPLGNAGTAEDIGHALEFFVRAQSVTGQILCVDGGISLG

SEQ ID NO: 48107 - DNA, 915 bp, Unknown
  Obtained from environmental sample
  misc_feature (1)..(915): n is a, c, g, or t
ttgtccccgaatataccgggaaagatcgcgcaaatttttacggcgattttctttgagatctgttattcaaaacaggaaattctggaagcctatcttaacatggttccatgcggcggcaatattgaggggtttccggcggcggcatggtattattttgacaaggatgtaaaggaactttcgttatctgaaatcctaagccttgttgtgattccgcaaaaccccgcaaaacgcgcgccgttgaacggacgggcttcaactgaattgatatattcccgcaagatactgtacgaagcatggcttgagcagcaccccgaagatactttggtggaaacggaaatggatatgcccccctttcttgcaaatagttttccccggcggcttcttcacctaacggagtatcttaatacgcggcctttgcctaaagcgaatctgtccacgttaaaccgttaccgcactacaatcgacttaactctgcaaaatatctgtgaaagggaacttgagttttttcttgtgcgtaacagaggatggggaataaaaaacggcagcctccttcttgttgattatacaagcatggaagtgctggcggcgataggctccgcggattattttgatgataaaatacaggggcaagtaaacggctttgcatccaaacgttctccgggttcaactcttaaaccttttatctacgcgctggcgctggaacagggattgattcatcctgaaaaaatgctgaaagatacgcctgccggttttagcgagtatacgccggataactttcgcggcgattttaaaggaccggtgagcgcgtggtacgctctggtagaaagccggaacattcccgccgtacgacttgcgagggacattcataatccggatctttacgattttctgaaactgggcggagtttccgcttaa

SEQ ID NO: 48108 - protein, 304 aa, Unknown
  Obtained from environmental sample
  DOMAIN (1)...(83): Transglycosylase
  misc_feature (1)..(304): Xaa is any amino acid
MSPNIPGKIAQIFTAIFFEICYSKQEILEAYLNMVPCGGNIEGFPAAAWYYFDKDVKELSLSEILSLVVIPQNPAKRAPLNGRASTELIYSRKILYEAWLEQHPEDTLVETEMDMPPFLANSFPRRLLHLTEYLNTRPLPKANLSTLNRYRTTIDLTLQNICERELEFFLVRNRGWGIKNGSLLLVDYTSMEVLAAIGSADYFDDKIQGQVNGFASKRSPGSTLKPFIYALALEQGLIHPEKMLKDTPAGFSEYTPDNFRGDFKGPVSAWYALVESRNIPAVRLARDIHNPDLYDFLKLGGVSA

SEQ ID NO: 48109 - DNA, 1530 bp, Unknown
  Obtained from environmental sample
  misc_feature (1)..(1530): n is a, c, g, or t
atgacgataaccgcgcacaccgccagtttgattacaaataagccgcggttgggtattgatcgctggaagtgcaaaatttgggatacgatgacggcagcgtgggttgtcgatcccgagcgtaacacttattcattagattcgcttgtagcttacacttttgactgcgctcccataaaatatatggacatagttccaaaaggtatgacgtttaacgctgtctctttggaaattgcaacgcgctattcgggtgaagatgcggatttttgtctcagattgaaacatcatcttgagccaattttaaagaaaacggaatctatcgctctttttgaaaatttggaaatgcccctacttcccattcttgcggaaatggagggagagggaattaaaattgaaccaaaagcgctgacaaattacggcaaggagcttgcaattgagcttgataaaattcaatctgacacatggaaaattgtcggacacgagtttaatctcgcctcgacaaaacagcttcaggaagtgctttatgtggagcgcaaactcactcccggcaagaaaactaaaaccggctactccacagacgcggcggcgcttgaagaactggcgcatgaagaccccgtacccgcctttatcctgcgccaccgcaccttgtcaaaattaaaatcaacttatgtagatacgttagctgacatggccgatagcgaagggcggttacacacaaactttgtgcagaccggaaccgccacgggccgcctttccagccgcgaacccaatctgcaaaacatacccgtccgcgccgaagaaggccgtcgtatccgcgaagcttttatcgctaaaagcggctgtgtgcttatttccgccgactatagccagatagaacttgtagtacttgcgcatctttcacaggataaaaatcttatttcagcgttcagggaaaaccgagatgttcacgccagaacagcgtcattaatttttggcattgacgaaaacgaagtaaaacccgaacagaggcgcatggcaaagacaattaacttcggcgtaatttacggtatgagcgccttccgtcttgccaatgaattaaacatcagccgtacggaagcgcagaattttattagcgcgtattttaacacatactcaggcgtacggcaatttatagaaaacacgattaaaaagacggaacagacaggctatgttacgacattttcaggccgcagacgttacattcccacaattaattcgcataacaagactgaaaaatccgccgcagagcgcattgcagttaacactcccattcaagggtcggcggctgacattgtaaaaatggcaatgctcaatttggacaaacgtcttaccgcggagaaaagcaaagcgcgtcttttactgcaagttcacgatgaactgattcttgagtgtccaaagagtgatgccgaaaaaacttcaatattgattaaaacggaaatggaacaggcggcggctttaagtattcctctgcgagtgagtgtggagaccgggagtcggtggggggattttcattga

SEQ ID NO: 48110 - protein, 509 aa, Unknown
  Obtained from environmental sample
  DOMAIN (130)...(508): DNA polymerase family A
  misc_feature (1)..(509): Xaa is any amino acid
MTITAHTASLITNKPRLGIDRWKCKIWDTMTAAWVVDPERNTYSLDSLVAYTFDCAPIKYMDIVPKGMTFNAVSLEIATRYSGEDADFCLRLKHHLEPILKKTESIALFENLEMPLLPILAEMEGEGIKIEPKALTNYGKELAIELDKIQSDTWKIVGHEFNLASTKQLQEVLYVERKLTPGKKTKTGYSTDAAALEELAHEDPVPAFILRHRTLSKLKSTYVDTLADMADSEGRLHTNFVQTGTATGRLSSREPNLQNIPVRAEEGRRIREAFIAKSGCVLISADYSQIELVVLAHLSQDKNLISAFRENRDVHARTASLIFGIDENEVKPEQRRMAKTINFGVIYGMSAFRLANELNISRTEAQNFISAYFNTYSGVRQFIENTIKKTEQTGYVTTFSGRRRYIPTINSHNKTEKSAAERIAVNTPIQGSAADIVKMAMLNLDKRLTAEKSKARLLLQVHDELILECPKSDAEKTSILIKTEMEQAAALSIPLRVSVETGSRWGDFH

SEQ ID NO: 48111 - DNA, 621 bp, Unknown
  Obtained from environmental sample
  misc_feature (1)..(621): n is a, c, g, or t
atgcggattccgggaactaacacttacaggactctggattttcccgaaactgtaaagatcactaaccgcgtcatggaaaccattactaacaattccagattgaacaatgggcttttcctgactatagccgcgctgttctttttctggatcgttatggaaaaaacccggctgggctattcgctcagggcaacaggttttaacagggacgcggctctttacggcggcatcagcgtaaacgccaacataacgacggcgatggctatttccggagcttttgccggactcgctggcgcgattgtcagcctggggagcttttcctacggcagggttctcgcggtgcaggacggctacggttttgacggcatcgccgtcgcgcttgtcggtaacagcggtgcctgggggaccgccttggcggggctcctgttcgggatgctcagagccgcacagcctttaatgcagtcccgtcagatacccaaagaaataaccgttatcatcatgggcctcatcgtcgtcttcatatcgcttcgcgccggcgtgaagctcctcttggaatggcagatgaaagaaaaagcccgcaaagcccagatcctgcaagacagtaaaaggagtggcgatggatga

SEQ ID NO: 48112 - protein, 206 aa, Unknown
  Obtained from environmental sample
  misc_feature (1)..(206): Xaa is any amino acid
MRIPGTNTYRTLDFPETVKITNRVMETITNNSRLNNGLFLTIAALFFFWIVMEKTRLGYSLRATGFNRDAALYGGISVNANITTAMAISGAFAGLAGAIVSLGSFSYGRVLAVQDGYGFDGIAVALVGNSGAWGTALAGLLFGMLRAAQPLMQSRQIPKEITVIIMGLIVVFISLRAGVKLLLEWQMKEKARKAQILQDSKRSGDG

SEQ ID NO: 48113 - DNA, 708 bp, Unknown
  Obtained from environmental sample
  misc_feature (1)..(708): n is a, c, g, or t
atgggtcaaaaagttaacccgatagggctgagagtcggtatcaacaggacatggggttcccgctggtatgtggatccaaaggaatacgcggacaccctgcatgaggatcttagattccgcaaacagatcatgaatatgcccgagacaaagggcgcggacatcgccgagatcgatattaccaggcatccgcagcgcataaccattacgatccataccgccaggcccggcgttatgatcggggtgaaaggcgcgaacatagagaagatcaacgctgaattacaaaagaacacgaccaaagaaatcaagataaagataaaggaaatacgcagcgccgaaggcaacgcccagataatcgcccagaatatagcgcggcagcttttagcccgctcgtctttcaggcggaccatgaagcaggctatttccaacgcgatgaaaaaaggcaacgcacagggcgtaaaagtaaggttatccgggaggctgggcggcgcggaaatgtcccgcaccgaggaagccaaggaaggccgcatccccctgcacaccctgcgcgctgatattgaatacggttttgccgaagcgcagaccacctttggcgccatcggcgtcaaggtatgggtgtacaacggcatgaaattcggaaaagaacaaaaagaagacgcgggagcgcttgtccgcaaacggcgggatcgcgctccgggcggtagaggttaa

SEQ ID NO: 48114 - protein, 235 aa, Unknown
  Obtained from environmental sample
  DOMAIN (65)...(119): KH domain
  misc_feature (1)..(235): Xaa is any amino acid
MGQKVNPIGLRVGINRTWGSRWYVDPKEYADTLHEDLRFRKQIMNMPETKGADIAEIDITRHPQRITITIHTARPGVMIGVKGANIEKINAELQKNTTKEIKIKIKEIRSAEGNAQIIAQNIARQLLARSSFRRTMKQAISNAMKKGNAQGVKVRLSGRLGGAEMSRTEEAKEGRIPLHTLRADIEYGFAEAQTTFGAIGVKVWVYNGMKFGKEQKEDAGALVRKRRDRAPGGRG

SEQ ID NO: 48115 - DNA, 663 bp, Unknown
  Obtained from environmental sample
  misc_feature (1)..(663): n is a, c, g, or t
ttgtccacatggccaattaccatctggaaacgcagatccatgtacttttttttcagctcttccctctttgctttaagctccgggtatgtaagggtcttgaatgaattcttcaccgcctctctctcctacgctcccagttccatgtcggaacgggcgacaaatttggtttttatgggcagctttgaaccggcgagggtcatagcttcctgggcgagcgtcttgttgacaccgccgcccagctcgaacataacggttcccggctttacaacggcgacccagtattcggggccgccctttcccttgcccatgcgggtttccgcgggcttcttggaaaaaggcttgtccggaaaaatccgtatccatatcttgccgccgcgttttatgtggcggttaagcgcaatacgcgccgcttctatctgcctgttggtaatccacatccgctccatggcgacaagggcgtactcgccgaataccaccgtattgcatctggtggcattgccgggcatcctgcccctttgcaccttgcggcgctttacacgtttcgggcttaacataattaacctctaccgcccggagcgcgatcccgccgtttgcggacaagcgctcccgcgtcttctttttgttcttttccgaatttcatgccgttgtacacccataccttga

SEQ ID NO: 48116 - protein, 220 aa, Unknown
  Obtained from environmental sample
  SIGNAL (1)...(26)
  misc_feature (1)..(220): Xaa is any amino acid
MSTWPITIWKRRSMYFFFSSSLFALSSGYVRVLNEFFTASLSYAPSSMSERATNLVFMGSFEPARVIASWASVLLTPPPSSNITVPGFTTATQYSGPPFPLPMRVSAGFLEKGLSGKIRIHILPPRFMWRLSAIRAASICLLVIHIRSMATRAYSPNTTVLHLVALPGILPLCTLRRFTRFGLNIINLYRPERDPAVCGQALPRLLFVLFRISCRCTPIP

SEQ ID NO: 48117 - DNA, 429 bp, Unknown
  Obtained from environmental sample
  misc_feature (1)..(429): n is a, c, g, or t
atgttaagcccgaaacgtgtaaagcgccgcaaggtgcaaaggggcaggatgcccggcaatgccaccagatgcaatacggtggtattcggcgagtacgcccttgtcgccatggagcggatgtggattaccaacaggcagatagaagcggcgcgtattgcgcttaaccgccacataaaacgcggcggcaagatatggatacggatttttccggacaagcctttttccaagaagcccgcggaaacccgcatgggcaagggaaagggcggccccgaatactgggtcgccgttgtaaagccgggaaccgttatgttcgagctgggcggcggtgtcaacaagacgctcgcccaggaagctatgaccctcgccggttcaaagctgcccataaaaaccaaatttgtcgcccgttccgacatggaactgggagcgtag

SEQ ID NO: 48118 - protein, 142 aa, Unknown
  Obtained from environmental sample
  DOMAIN (1)...(133): Ribosomal protein L16
  misc_feature (1)..(142): Xaa is any amino acid
MLSPKRVKRRKVQRGRMPGNATRCNTVVFGEYALVAMERMWITNRQIEAARIALNRHIKRGGKIWIRIFPDKPFSKKPAETRMGKGKGGPEYWVAVVKPGTVMFELGGGVNKTLAQEAMTLAGSKLPIKTKFVARSDMELGA

SEQ ID NO: 48119 - DNA, 924 bp, Unknown
  Obtained from environmental sample
  misc_feature (1)..(924): n is a, c, g, or t
gtgagcaccgtcgtcagcaataaggtgatactgctgtacaccaagacgagcgaggtcgttccgccgccgcccgcggtcagttacacgataacgttgaacgcgacggtttgggaggcgacccgtcagaccaactccgccggacgtctcagttcgcttgatctcagggagcctacgcgggagggttacacgttcaagggctggttcttggaggacggtttgacgcgcgtgactccgagttacacgttcaccgcggatgccgccgtctacgcgatgtgggaggagtggggttcggagaggtacgcggtaacgttcagagccggagccaacggctcgctgtcggcgtcggtggaggggtctgatatatcgtccggcgtgctggtgcagcgcggcaaggacgtagtgttcaccgccgttccgatagagggctacagcgtagttcgctggacgataaacggcgttgtggtaacggacacgtcgagggcctacgtgctggccggtatatcgagggagacgattgtgttggtatcgttcgacaagctgaacgctataaaggatcccgacagggagatcccgaagtccggttcaaagggagaagccgcgatagcacccccgtcgtcgttgtcggcggaattggtagtgggcccgaaccccgtaagcaagtcgcaaggttcgataaccctataccgcagcggcagcagaatcgcaagcgcgacgttgacaattcttgacgccacgggcagtgtagtgaataaaataaaaatcaccgacgacgcgtcaacaggtctaaagagaaaagtaggctcatggaacctgcgagacgcaaagggccgcgcggtccccgttggaacgtacgtgatcaagggattgatcaagacgtcaacaggcaaggcggagcgggtgtcggtggtgttgggtatgaagtga

SEQ ID NO: 48120 - protein, 307 aa, Unknown
  Obtained from environmental sample
  misc_feature (1)..(307): Xaa is any amino acid
MSTVVSNKVILLYTKTSEVVPPPPAVSYTITLNATVWEATRQTNSAGRLSSLDLREPTREGYTFKGWFLEDGLTRVTPSYTFTADAAVYAMWEEWGSERYAVTFRAGANGSLSASVEGSDISSGVLVQRGKDVVFTAVPIEGYSVVRWTINGVVVTDTSRAYVLAGISRETIVLVSFDKLNAIKDPDREIPKSGSKGEAAIAPPSSLSAELVVGPNPVSKSQGSITLYRSGSRIASATLTILDATGSVVNKIKITDDASTGLKRKVGSWNLRDAKGRAVPVGTYVIKGLIKTSTGKAERVSVVLGMK

SEQ ID NO: 48121 - DNA, 915 bp, Unknown
  Obtained from environmental sample
  misc_feature (1)..(915): n is a, c, g, or t
gtggtgttctgtgtttttaacttgtggcctacattgtacacctttttgctgagttttaccgatctgcggggtttaaaacccgaattcaattttgtcggtcttgtcaattttaccagactgatcaatgaccagtatttctggggcgccctgggaaatacctttattatctggggaattaatttcattccccagttggggcttgccctggtactcgcgatttggctgtccgacgtcaggcttgacctgagcggcaagagcctgttccgggcaattgtttacatgcccaacctgctgaccgccgcgtcggtggccctgctcttccgcagtattttcggctacgccgggcatgtcacagccccggcgaaccaatttttgtattcattggggattcaggcgacaaagattgatccaattaccggagcgactgtaagagaagctattgactttttccgcagcgtgccgttttcacgcggtttggtatcctttatccagtggtggatgtggtatggttataccctaattatactgatggcgggtattaccactatctccccctcgctgtatgaatccgcggtgattgacggcgccaacagccgccaaaccacctggtatataaccctgcccctgctccgccccatcatgctgtacattctggtgacatcggcgatcggcggtatgcagatgtttgacattcccttcctgcttaccgatatgcaaggcgctccggatttcaagattcggaccacaacggtgtatcagtacgatacggcctttttaaggggcgctaacaactattcgtatggcgcggccatttccattggtatattcgttgtcaccattgtgctggcccttctgatatttttcttcctgcaggaccgcagtgatcttaaaaaacgaaaaggaggcagagcatga

SEQ ID NO: 48122 - protein, 304 aa, Unknown
  Obtained from environmental sample
  DOMAIN (46)...(300): Binding-protein-dependent transport system inner membrane component
  misc_feature (1)..(304): Xaa is any amino acid
MVFCVFNLWPTLYTFLLSFTDLRGLKPEFNFVGLVNFTRLINDQYFWGALGNTFIIWGINFIPQLGLALVLAIWLSDVRLDLSGKSLFRAIVYMPNLLTAASVALLFRSIFGYAGHVTAPANQFLYSLGIQATKIDPITGATVREAIDFFRSVPFSRGLVSFIQWWMWYGYTLIILMAGITTISPSLYESAVIDGANSRQTTWYITLPLLRPIMLYILVTSAIGGMQMFDIPFLLTDMQGAPDFKIRTTTVYQYDTAFLRGANNYSYGAAISIGIFVVTIVLALLIFFFLQDRSDLKKRKGGRA

SEQ ID NO: 48123 - DNA, 1056 bp, Unknown
  Obtained from environmental sample
  misc_feature (1)..(1056): n is a, c, g, or t
gtgcccatgaagacggtttttattgtggacgacaacaccaccaacgtcgtgacggcgaaggacgcgctggacggcgtgtataagacctttgccgtgccctcggcggagaggatgtttaagcttttggagaagatcacgcccgatttgattctgcttgacgtggagatgccggagatgaacggttatgaggcgctctccgttttgaagtctaacgagaagctgaanaccatcccggtggtctttctgacggccaataacgattcggagtctgaaacacgcggttttgagatgggggcgatagatttcatcaccaagccgttcttcgcgccggtgcttattaggcgtatcgagacgcacattgatacggacaagttgataaagaagagcctgaaggctgcgcaggagagcctgatggctgtgaataagattcaagacgcgacgattaacgttatcgccaatatggtggagcaacgcgacaaggtgacgggggagcatatcgaccggacgcagaagtatctatccatactcgtaaaagagatgatgagcagcaaggtttacatcgacgagatgtcgaagtgggatttgaagctgcttctgccgtcggcgcaactgcacgatgtgggcaagatagtgataagcgataagatcctcaacaaacccggagagctggacgatgatgagttcgaaacgattaagctccacagcgccgagggcgagcggatcatcgacgagatcatcgcaaaatccgggattagggagggcgaatatatgacccacgccaagaagttcgccggttatcaccacgagaagtgggacggctccggttatccgcacgggctaaaagaggatgatatcccgcttgagggtcgcattatggccatcgcggacgtatacgacgcgcttgtttccgagcgcccgtataagaaaccgttcacccacgaggatgcggtggatattatcaagaagggcagcggcacgcaattcgacccgaaaattgtcgaggtgtttctgaaagtggagggtgattttaagaagaaaagaactatatttgcgtaa

SEQ ID NO: 48124 - protein, 351 aa, Unknown
  Obtained from environmental sample
  DOMAIN (162)...(301): HD domain
  misc_feature (1)..(351): Xaa is any amino acid
MPMKTVFIVDDNTTNVVTAKDALDGVYKTFAVPSAERMFKLLEKITPDLILLDVEMPEMNGYEALSVLKSNEKLXTIPVVFLTANNDSESETRGFEMGAIDFITKPFFAPVLIRRIETHIDTDKLIKKSLKAAQESLMAVNKIQDATINVIANMVEQRDKVTGEHIDRTQKYLSILVKEMMSSKVYIDEMSKWDLKLLLPSAQLHDVGKIVISDKILNKPGELDDDEFETIKLHSAEGERIIDEIIAKSGIREGEYMTHAKKFAGYHHEKWDGSGYPHGLKEDDIPLEGRIMAIADVYDALVSERPYKKPFTHEDAVDIIKKGSGTQFDPKIVEVFLKVEGDFKKKRTIFA

SEQ ID NO: 48125 - DNA, 1419 bp, Unknown
  Obtained from environmental sample
  misc_feature (1)..(1419): n is a, c, g, or t
ttgatagtaagcgcatttgctccttgcgaagatgtgtgcaaaagtctaactcccgaactccaaaaagtcgaaaattcaattctaattctggcggatttgggtcaaggcaaaaacagaatgggtggttcaatagcttgcgaagtgttcaaccaaataggtggcgaagttccagatgcagacgcacagatattaaaacaattctttggcgcagttcaaaccctaaacgcagaaaacaaaatcctagcctaccacgaccgctccgatggcggacttttcacaacccttgcggagatggcttttgctgggcacattggaatagagttggaacaaaaaaccgttgaatttctttttaacgaggaattaggtgctgttttacagattaaagaaagtgattttgcagcggcttgcaagttattcccttatgaaaaaatcggaaaattgacagatgatttttgcttaaaaataggcgaatacaaagaaaatttatccgagctgagaaaaatttggagcagaacttcttttgaaatagcaaagcttcgcgacaacccagactgcgcaaaacaggaatacgactggaaatgcagcgaacaggacaagggaatcaacgcacacatcgttagcttcgctgctaccccgccaaaagcgggcaaacccctaatcgcaatccttcgcgagcaaggcgtgaatggcgaagtggaaatggcggcagcctttgacaaagctggatttaaagcagtggatgttcacacgggcgatattataaatggcaaaatggatttaagtgaattttctggcttagtggcttgcggtggttttagctatggagatgttttgggagcaggcgagggctgggcgaagagcattttgttcaatgaaagagcgcgtgatgtttttcagaaattctttgagcgaaaggacacgttctcgcttggagtttgcaatggctgccaaatgctttccaacttaaaaagcattataccaggtgccacccactggcctaaattcaagcaaaatttatctgaacgctttgaggctcgctttgtaagtgttaaaattgaaaaatccccctctgttctgctcacgggaatggagaacttggttattccaatacctgtggctcacggcgaggggagagcagaatttacctcccaagatgatttggaaaaaagcctagtgagcattcgctatgttgataatgaacacaatgcaacggaaatgtatccgctgaatcctaatggcagcccacaaggcataactggtttaactaccgaagacggcagagttctaattttaatgccgcaccctgaacgtgcattcagaatgctccaaaacacttgggcaaagccgagggagggtgagggttattggatgcaaatgtttagaaatgcgcgggagttttttctaaattcccctaagtga

SEQ ID NO: 48126 - protein, 472 aa, Unknown
  Obtained from environmental sample
  DOMAIN (22)...(158): AIR synthase related protein, C-terminal domain
  misc_feature (1)..(472): Xaa is any amino acid
MIVSAFAPCEDVCKSLTPELQKVENSILILADLGQGKNRMGGSIACEVFNQIGGEVPDADAQILKQFFGAVQTLNAENKILAYHDRSDGGLFTTLAEMAFAGHIGIELEQKTVEFLFNEELGAVLQIKESDFAAACKLFPYEKIGKLTDDFCLKIGEYKENLSELRKIWSRTSFEIAKLRDNPDCAKQEYDWKCSEQDKGINAHIVSFAATPPKAGKPLIAILREQGVNGEVEMAAAFDKAGFKAVDVHTGDIINGKMDLSEFSGLVACGGFSYGDVLGAGEGWAKSILFNERARDVFQKFFERKDTFSLGVCNGCQMLSNLKSIIPGATHWPKFKQNLSERFEARFVSVKIEKSPSVLLTGMENLVIPIPVAHGEGRAEFTSQDDLEKSLVSIRYVDNEHNATEMYPLNPNGSPQGITGLTTEDGRVLILMPHPERAFRMLQNTWAKPREGEGYWMQMFRNAREFFLNSPK

SEQ ID NO: 48127 - DNA, 1551 bp, Unknown
  Obtained from environmental sample
  misc_feature (1)..(1551): n is a, c, g, or t
ttgatcagatcggcacgagcagatggcattttaagcgcatacaaagacaatgccgctgtgatggaaggttttgaagctcaacgtttttacgcagagccaaaaagcaatgaatatgcttggcacagagaacctgtgcatattttgatgaaggtagaaacccacaaccatccaacggcaattagccccttcccaggtgctgcaaccggaagcggcggtgaaattagagacgagggagcaactggcataggttcaaaacccaaggcaggcttgtgcggattttctgtttccaatttgaaaataccaagttatgttcagccttgggaacgttactttggaaaaccaagccgcatagaaagtcctttgcaaataatgatagatgggcctcttggagcggcggcttttaataatgaatttggcagaccaaatatttgcggttattttagaacttatgagcaagaggtgaacggagaaattcgcggctatcacaagcccataatgctcgcaggtggaataggtaacataaaagctcgccacgttcaaaaaggctctctcaaagaaggcgatttgctaattgtgctgggtggccctgctatgctcattgggctggggggaggggcggcaagctcaatggcaaccggaagcggtggcgaagatttggattttgcaagcgttcagcgcggcaatgcagaaatgcagcggcgatgccaagaggttatagacaggtgctgggcattggaagaaaaaaatccaatagcctttatacacgatgtgggggcagggggcctttcaaatgctttccccgaactggtgaaagatgccggctttggcggcaaattcaggttacgcgatattccaagcgaagaaaaaggaatgagccccttggaaatatggtgcaacgaagctcaggagcgttatgtacttgcaatttccaaagaaagcctacccacattcaaagaactatgcgaaagagaacgctgcccctttgccgtagcaggcgaagccataacagaacagaatttaattttaagcgacgagcattttaagaacaaccccatagatattccaattgaattgttgctgggtaatccgccaaagatgatgcgcagagataaaaaaataattgaaaataataaatctcaaatctcaaatctcaaattcccaataaacgaaatcgctcaacgtgtcctctcacaccccgctgtggcggataagggatttttaatcacgataggagaccgttctgtaactggtatggttgttcgggagcagatggttggtccttggcaggttcctgttgcggactgtgcggtgacgacaagtaccttggattcaacgacaggggaggcattttccattggggaacgtactccgctcgcctcgctgaattcagcggctgctgccagaatggcagtagcggaagcaataacaaatattgctgcggcaaaaataagcgatatttcaaaaattcgtctctctgcaaactggatggctaaccctgcgacagcaggggagggagctgctttatacgaggctgtccaagctatggaatga

SEQ ID NO: 48128 - protein, 516 aa, Unknown
  Obtained from environmental sample
  DOMAIN (1)...(175): AIR synthase related protein, N-terminal domain
  misc_feature (1)..(516): Xaa is any amino acid
MIRSARADGILSAYKDNAAVMEGFEAQRFYAEPKSNEYAWHREPVHILMKVETHNHPTAISPFPGAATGSGGEIRDEGATGIGSKPKAGLCGFSVSNLKIPSYVQPWERYFGKPSRIESPLQIMIDGPLGAAAFNNEFGRPNICGYFRTYEQEVNGEIRGYHKPIMLAGGIGNIKARHVQKGSLKEGDLLIVLGGPAMLIGLGGGAASSMATGSGGEDLDFASVQRGNAEMQRRCQEVIDRCWALEEKNPIAFIHDVGAGGLSNAFPELVKDAGFGGKFRLRDIPSEEKGMSPLEIWCNEAQERYVLAISKESLPTFKELCERERCPFAVAGEAITEQNLILSDEHFKNNPIDIPIELLLGNPPKMMRRDKKIIENNKSQISNLKFPINEIAQRVLSHPAVADKGFLITIGDRSVTGMVVREQMVGPWQVPVADCAVTTSTLDSTTGEAFSIGERTPLASLNSAAAARMAVAEAITNIAAAKISDISKIRLSANWMANPATAGEGAALYEAVQAME

SEQ ID NO: 48129 - DNA, 390 bp, Unknown
  Obtained from environmental sample
  misc_feature (1)..(390): n is a, c, g, or t
atggcgagggcaaatcattccatagcttggacagcctcgtataaagcagctccctcccctgctgtcgcagggttagccatccagtttgcagagagacgaatttttgaaatatcgcttatttttgccgcagcaatatttgttattgcttccgctactgccattctggcagcagccgctgaattcagcgaggcgagcggagtacgttccccaatggaaaatgcctcccctgtcgttgaatccaaggtacttgtcgtcaccgcacagtccgcaacaggaacctgccaaggaccaaccatctgctcccgaacaaccataccagttacagaacggtctcctatcgtgattaaaaatcccttatccgccacagcggggtgtgagaggacacgttga

SEQ ID NO: 48130 - protein, 129 aa, Unknown
  Obtained from environmental sample
  misc_feature (1)..(129): Xaa is any amino acid
MARANHSIAWTASYKAAPSPAVAGLAIQFAERRIFEISLIFAAAIFVIASATAILAAAAEFSEASGVRSPMENASPVVESKVLVVTAQSATGTCQGPTICSRTTIPVTERSPIVIKNPLSATAGCERTR

SEQ ID NO: 48131 - DNA, 1080 bp, Unknown
  Obtained from environmental sample
  misc_feature (1)..(1080): n is a, c, g, or t
atgcggattattccagtagcgagcggaaagggaggcgtgggcaagtcccttgtctcggcaaatcttggcgtagctttcgctcaggcagggcagcgggtaatactggccgatcttgacctgggggcttcgaaccttcacctggttcttgggcatcaatcgcccaaaacaggaataggcgtctttctaagtgacaccaggtcaggattcagggacgtcattgtcgatacggatgtgcgagggctcaggttcattccgggggatacggaaatacccggtacggcaaatctaaagcccttccaactaaaagcccttgtaggccaccttctgtccttaaaagacgatgcggatattctgatcctggacctgggcgctgggacacatcagtctatcctggactttttccttctttccggtcagggcatagtagtttcagcgccgatagttaccgcgatacttaacgcctatgtgtttctaaaaaataccgtgttccgcctgatgtttacggcttttggaaaaggcagccctgccgcggtttatctggaaaaggcccgcaaggatggttcaggccatcaaaaactatatattcccaaaatgctgcctgaaataaaaagaatagatcctgattcctataataaatttatgaaacgcattgatcattttcatccccgccttataatgaacatgatcgacgatccgaaagacgcggatgttgcaatgaagatccgccgttcctgcgaagaataccttgatttaaaaatagaacatctcggcataatctatcgtgattcattccaggatactgccctgtcctcaaggctgcctatagtgctttataaacctcaatcggttttatcccaggctatttaccggattgcggataaaatacttcagagcgaagaagacagcttcggccttagcgataaagaaattgaggacagtttccaggaagcagggatggaagcggaagttgactttgagacaaagatggattatgtggaagaccttttacattcaggtgccctttcccagggcgatctggttgagaccataaaatcccagcagtttgaaattcaaaattaa

SEQ ID NO: 48132 - protein, 359 aa, Unknown
  Obtained from environmental sample
  DOMAIN (4)...(207): CobQ/CobB/MinD/ParA nucleotide binding domain
  misc_feature (1)..(359): Xaa is any amino acid
MRIIPVASGKGGVGKSLVSANLGVAFAQAGQRVILADLDLGASNLHLVLGHQSPKTGIGVFLSDTRSGFRDVIVDTDVRGLRFIPGDTEIPGTANLKPFQLKALVGHLLSLKDDADILILDLGAGTHQSILDFFLLSGQGIVVSAPIVTAILNAYVFLKNTVFRLMFTAFGKGSPAAVYLEKARKDGSGHQKLYIPKMLPEIKRIDPDSYNKFMKRIDHFHPRLIMNMIDDPKDADVAMKIRRSCEEYLDLKIEHLGIIYRDSFQDTALSSRLPIVLYKPQSVLSQAIYRIADKILQSEEDSFGLSDKEIEDSFQEAGMEAEVDFETKMDYVEDLLHSGALSQGDLVETIKSQQFEIQN

SEQ ID NO: 48133 - DNA, 1092 bp, Unknown
  Obtained from environmental sample
  misc_feature (1)..(1092): n is a, c, g, or t
atgcagaatgaagggcaagttagaataccatccggttgcgccatatccggcattattgacaagacgggacggcgtatgagcggcgaggcgatgattaagtccatttccgtcatgcatgaccgatccaacggtctgggcggcggttttgccgcgtatggaatctatcccgagtacaaagattactacgctttgcatctattttacgattcaacatcggctaaaagagagtgcgaggaatttttagaagagcattttgacatcatcaacctttctaaaattccaacgcgaaaaataaaagaaattaccgatgagccattaatctggcgttattttgtaattcccctgccgacaaaacttgcggacagccagcttgacgagagggaatttaccgccaaatgcgtgttcaacgtcaacacaaagataaacggcgcttatgtcttttcaagcgggaaaaacatgggcgtgttcaaagcggtcggcttcccggaagatgtcgggcggttttacaaacttgaagaatatgagggctggtgctttacggcgcacggacgttacccgacaaatactccaggctggtggggcggcgcccacccgttttcattgcttgattattcagttgtgcataacggcgaaatatcctcctatgataccaaccgcagggcaatcgaaatgtacgggtacaaatgtactctccaaacagacaccgaagttatcacctatattatagattacctgcacagaanacaaaaactttcctttactgaaatcgcttcggttatcgccgcttcgttttggcagaccattgaaaaacagccgccggacgagagggagacgcatgaatttttgcgcgtaaatgtcagtgcccagctaataacaggtccgttttcgatactttgtggttttgacnngagactgatggcgttaaacgacaggctaaaactgcggagcatggtggttggtgaaaaagacgaccttgtttatatggcgagcgaagaggcggctatccgcatcattgaaccaaaccttgacaatatttgggccccaaaaggcggccagcccgttatcgtttgtttaaatggagggcaggcataa

SEQ ID NO: 48134 - protein, 363 aa, Unknown
  Obtained from environmental sample
  DOMAIN (133)...(332): Glutamine amidotransferases class-II
  misc_feature (1)..(363): Xaa is any amino acid
MQNEGQVRIPSGCAISGIIDKTGRRMSGEAMIKSISVMHDRSNGLGGGFAAYGIYPEYKDYYALHLFYDSTSAKRECEEFLEEHFDIINLSKIPTRKIKEITDEPLIWRYFVIPLPTKLADSQLDEREFTAKCVFNVNTKINGAYVFSSGKNMGVFKAVGFPEDVGRFYKLEEYEGWCFTAHGRYPTNTPGWWGGAHPFSLLDYSVVHNGEISSYDTNRRAIEMYGYKCTLQTDTEVITYIIDYLHRXQKLSFTEIASVIAASFWQTIEKQPPDERETHEFLRVNVSAQLITGPFSILCGFDXRLMALNDRLKLRSMVVGEKDDLVYMASEEAAIRIIEPNLDNIWAPKGGQPVIVCLNGGQA

SEQ ID NO: 48135 - DNA, 774 bp, Unknown
  Obtained from environmental sample
  misc_feature (1)..(774): n is a, c, g, or t
ttgggccccaaaaggcggccagcccgttatcgtttgtttaaatggagggcaggcataatggcaattaattttttatatcccgattatgaaatgattaggaattacgacagatgtatctgctgccgcgcctgcgagcgccaatgcgccaacgaagctcacgaatatgttgccgatgcggacaaaatgttatgcgatgatacaaaatgcgtaaattgccaccgctgtgtttccctctgccccacccgcgccctaaaagttataaaatgcggcaacacctacaaacttaacgcaaactggaacagtaaaaatattgatgaaatttacaagcaggcggactcgggcggcgtgttgttgtccagcatgggtaacccggaaaattatcccgtgtactttgataaaatactgttaaacgcctctcaggttacaaacccgtccatagacccattgcgggagccgatggagacaagggtatctctcggcgctaaaccgataaatatcgaacggaataaaaaaggaagaattataaacaatttgccaccacagcttcatctgtccatgcccgtaatgttttccgcaatgagttacggttccataagttacaacgcgcatgaaagtttagcgcgagccgcagaagatctcggcattctttataacaccggcgaaggcggtcttcatgaagatttttataaatacggaaaaaaacactatcgtgcaagtcgcgtcggggcgtttcggcgttcatccncaatatttaaattcaggcgcggcggttga

SEQ ID NO: 48136 - protein, 257 aa, Unknown
  Obtained from environmental sample
  DOMAIN (62)...(85): 4Fe-4S binding domain
  misc_feature (1)..(257): Xaa is any amino acid
MGPKRRPARYRLFKWRAGIMAINFLYPDYEMIRNYDRCICCRACERQCANEAHEYVADADKMLCDDTKCVNCHRCVSLCPTRALKVIKCGNTYKLNANWNSKNIDEIYKQADSGGVLLSSMGNPENYPVYFDKILLNASQVTNPSIDPLREPMETRVSLGAKPINIERNKKGRIINNLPPQLHLSMPVMFSAMSYGSISYNAHESLARAAEDLGILYNTGEGGLHEDFYKYGKKHYRASRVGAFRRSSXIFKFRRGG

SEQ ID NO: 48137 - DNA, 876 bp, Unknown
  Obtained from environmental sample
  misc_feature (1)..(876): n is a, c, g, or t
atgaagatttttataaatacggaaaaaaacactatcgtgcaagtcgcgtcggggcgtttcggcgttcatccncaatatttaaattcaggcgcggcggttgagattaaaatgggtcaaggcgcgaaacccggtattggaggacatctgccgggagcgaaaattgtaggcgacatttcccgcaccagaatgattcccgaagggactgacgcgatttctccggcgccgcaccacgacatatactctattgaagatttgcgccaacttgtcttctctttgaaagaagccacgaattatcaaaagccggtaattgtaaaaattgccgcagtacataacgtgaccgctattgcaagcggcatagccagaagcggtgctgacataatagccattgacggcttccgtggcggaacgggagccgctcccacacgcatacgcgatcatgtcggcatcccaatagaacttgcccttgccggcgttgacaaacggttacgcgatgagggcatacgcgacaacgtgtccatcgtagttggaggtagtatccgctcaagcgcagacattataaaagcaatcgcccttggcgctgattgcgtttacatagcgacatcggctctggtcgctcttggctgtcatttgtgcagaagctgtcacgcgggaaaatgcaattggggtatagccacgcaggttcccgaactggtcaagcgcctgaatcccgacatagggtacaaacgcctcatcaatcttttaacggcgtggcagcatgaaataaaagagatgatgggcggcatggggatcaattcaattgacggattaaaaggaaataggttaatgcttcgcggagtcggattaaatgaaaaagagttagaaactcggccgatctga

SEQ ID NO: 48138 - protein, 291 aa, Unknown
  Obtained from environmental sample
  DOMAIN (1)...(264): Conserved region in glutamate synthase
  misc_feature (1)..(291): Xaa is any amino acid
MKIFINTEKNTIVQVASGRFGVHPQYLNSGAAVEIKMGQGAKPGIGGHLPGAKIVGDISRTRMIPEGTDAISPAPHHDIYSIEDLRQLVFSLKEATNYQKPVIVKIAAVHNVTAIASGIARSGADIIAIDGFRGGTGAAPTRIRDHVGIPIELALAGVDKRLRDEGIRDNVSIVVGGSIRSSADIIKAIALGADCVYIATSALVALGCHLCRSCHAGKCNWGIATQVPELVKRLNPDIGYKRLINLLTAWQHEIKEMMGGMGINSIDGLKGNRLMLRGVGLNEKELETRPI

SEQ ID NO: 48139 - DNA, 870 bp, Unknown
  Obtained from environmental sample
  misc_feature (1)..(870): n is a, c, g, or t
gtgctttgctatcttcaattcaagggtgctgccatgttttctgtgaaaatagacaaggttgtaaaggaatatgcaaatatcccaggcgttagagaagatgtaacagacatcattttgaacttgaagtccattcgcgttaaacttttgagcgataaagacgaaactttgcgccttgatgtttctggcgaaggcgatgtaacggcaaaagatatagatgcaaatccagctgttgttattctcaatcccgatgtacatatagcaaccctcagcggcgataacgcttctctttgcatagagatgaaagtttctcctggccgcggttatgttcccgcagacgatccagaccgcagaagggctgccgagaatgctcctgttggcgaaattttaatagatgcaaactataatcctgttttgaatgtggcaatgtatgtttctgataccagagttgaagagcgtacagattttaatcgtttggaactggacataaccacagatggaagcatagatccagaagatgctctggcttatgctgctaaacttttgatagaccatttggaaatattcataaactttgaagacgattttgaaagtgctggtggtgctgaacctgatggcgatgtgcaggctgttgttcagaaactattgctgaatgtggacgatttagagctttcggtgcgttccagcaattgcttgaggcaggcaggaattcgcacaatagcagaactcgttcgccacaaagaaagcgatatgctaaagcacaaaaactttggcagaaaatcgttgatagaactaaacgaattgctatcttcaatgggacttagttttggcatggatgtggatgcctatttaaaagagggtaatgcagaatga

SEQ ID NO: 48140 - protein, 289 aa, Unknown
  Obtained from environmental sample
  DOMAIN (83)...(190): RNA polymerase Rpb3/Rpb11 dimerisation domain
  misc_feature (1)..(289): Xaa is any amino acid
MLCYLQFKGAAMFSVKIDKVVKEYANIPGVREDVTDIILNLKSIRVKLLSDKDETLRLDVSGEGDVTAKDIDANPAVVILNPDVHIATLSGDNASLCIEMKVSPGRGYVPADDPDRRRAAENAPVGEILIDANYNPVLNVAMYVSDTRVEERTDFNRLELDITTDGSIDPEDALAYAAKLLIDHLEIFINFEDDFESAGGAEPDGDVQAVVQKLLLNVDDLELSVRSSNCLRQAGIRTIAELVRHKESDMLKHKNFGRKSLIELNELLSSMGLSFGMDVDAYLKEGNAE

SEQ ID NO: 48141 - DNA, 1227 bp, Unknown
  Obtained from environmental sample
  misc_feature (1)..(1227): n is a, c, g, or t
gtgttgaatacatttatgtttaatgccaagtccgtcactctgactaaaacgagtggtagcggtaacaacggtggagaaggcaacaacggtggagaaggcaataccggaggtggggataccgaggtaacattaatcagcgtaaccgcaaacggttatgcttcgcaaaccacaacgcagttgacgcttacctttagtcaggcgataacatttctttccgccaatgatataatcttgggccatgtattcggtgtatatgtaaccaaaggaaccctcagcggttcagggccgtcgtatactttggacatcagtggttttaccacaggcggaaaccttagtgtggaggtggcgaaatcgggttatattataaacaattcgcaaaaatttgtaactattcattattattatagtggtgtcagtccgggagagatagaaatggtttcgatccccgccggaacatttatgatgggtagtcctgcgagtgagccgaacagggataatgatgaaacacaacattcggtaacattgagcggcttttcaatgagcaagcatctggtaacgcaggcgcaatggattgcggtaatgggcgtaggtgaggataggacaacttattggaaaggggataattatccaattaactttgtaaattggtataaagcgatagtattctgcaacaaattgagtgttctggaaggattaaaccccgtatacagtattggcggcagtaccgatcctgcgatttggataacaaataacgggggaataataccctttgacaataacgatacatggaacggggcggtaatggataatagcaaaaacggatatcgcctgcccaccgaagcggaatgggaatacgcctgccgcgcgggaacgacgacggcgtacaattttggagatgatgcgagcagtctcggcaattatgcgtggtatggcgtcagctacgacgacggcggcaagacgcatgaagtgggcaagaagcccgccaacgcctggggtttgtatgatatgcacggcaatgtacatgaatggtgctatgatcggctcggcagctatggtacagattcggtttcagatccggtgggggcggatacgggtgtgccgcgtgtgttacgcggcggcggttggagccacagcgcgcggatgctgcgctcggcctatcggcgagaattctaccctgcggaaacgcaaaactttacaggcttacgtgttgtgcgcggtctggattaa

SEQ ID NO: 48142 - protein, 408 aa, Unknown
  Obtained from environmental sample
  DOMAIN (141)...(405): Domain of unknown function (DUF323)
  misc_feature (1)..(408): Xaa is any amino acid
MLNTFMFNAKSVTLTKTSGSGNNGGEGNNGGEGNTGGGDTEVTLISVTANGYASQTTTQLTLTFSQAITFLSANDIILGHVFGVYVTKGTLSGSGPSYTLDISGFTTGGNLSVEVAKSGYIINNSQKFVTIHYYYSGVSPGEIEMVSIPAGTFMMGSPASEPNRDNDETQHSVTLSGFSMSKHLVTQAQWIAVMGVGEDRTTYWKGDNYPINFVNWYKAIVFCNKLSVLEGLNPVYSIGGSTDPAIWITNNGGIIPFDNNDTWNGAVMDNSKNGYRLPTEAEWEYACRAGTTTAYNFGDDASSLGNYAWYGVSYDDGGKTHEVGKKPANAWGLYDMHGNVHEWCYDRLGSYGTDSVSDPVGADTGVPRVLRGGGWSHSARMLRSAYRREFYPAETQNFTGLRVVRGLD

SEQ ID NO: 48143 - DNA, 1671 bp, Unknown
  Obtained from environmental sample
  misc_feature (1)..(1671): n is a, c, g, or t
atgtgcggcatttttggttatatcggaagtcaggacgccgttcccattatagttgagggattaaaaaagcttgaataccggggctatgactcggccggaatagcggtttacggccagaacgggatgggcgttgtaaagcagaaggggcgcctgacggcgctggaagcgcggctggcggaacagccgcttgccggacgcatagggatcggccatacccgctgggccactcacggggagccttcggatgtaaactcccatcctcatgtggggagtaaaaacaaaatcgccgttgtccataacggtataatagagaactataagcagttaaaggaacgccttgagcactggggcgtaaatttcgcctcacaaaccgacagcgaggtaatcgcgcagcttgcggaacattactataccggggatttgctggatacgatcatccatgtctcaaacgccctggaaggatcttacgcgttagggatcatgtgtgttgacgatcctgatatccttatcgccgtcaaaaaagataatccccttatcatcggcgaatcatctcacgggaattttatcgcttccgatgtgcccgccgtattaaagcatacgaacaaggtttattaccttaacgacaaggaaattgtcgtactgcggaaaaacagcgtccaattttttaaccttgacaaagaaccgcttgaaaggcgggcggaaacaataacatggaatattgacagcgcggaaaagggcggctatccgcatttcatgcttaaagagatcatggagcagccaaagatactccgcgataccattaattccgcggtaaaatctggcggttataaagacattcttgataatattgatgttaagcgtcttaacaagatcgtgataagcgcgtgcggttcggcttacaatgcgggagttgtcgccagatatgtatttgaaaagctgtgcaggtttccgtcggtggaaacggagcttgccagcgaattccggtacaaggacgccgttattgacgaaaaaacgctggttattttaatcagccagtcaggtgaaacggcggatactatcgcggcaatgcgggaggcaaagcgtaaaggcgccgttaccctgtcaatcgtcaatgttgtcggcagcactatagcaaaagaatccgactactgtctatttactgcggcgggccccgagattgccgtggcgacaacaaaagccttttcagcgcagcttgtactgctatatattctggcaatttggttcgccgccaaattgggaaaaataccgcctgaaacggaatgcgaactgttagctgaaattgaagccctgcctgggaaagcggagcgtctgcttaaacagatcgacgccgttcaaatgtacgcttctacctgcgtcggctgcaagagtattttcttcatcggaagaaatatcgattacgccatcgcgctggaaggctcgctcaaactaaaggagatttcctatattcattcggaagcctacgccggcggcgaattgaaacacggcacaatttctctggttgagcaggatacgctggtggtcgctatttccaactgcgctccattatacggcaaaattatgagcaatgcggagcaggtgataagccggggcgcgaaagttctgcttatcggcaactgtccgaacgcgaaacactcggccactctgccatga

SEQ ID NO: 48144 - protein, 556 aa, Unknown
  Obtained from environmental sample
  DOMAIN (2)...(193): Glutamine amidotransferases class-II
  misc_feature (1)..(556): Xaa is any amino acid
MCGIFGYIGSQDAVPIIVEGLKKLEYRGYDSAGIAVYGQNGMGVVKQKGRLTALEARLAEQPLAGRIGIGHTRWATHGEPSDVNSHPHVGSKNKIAVVHNGIIENYKQLKERLEHWGVNFASQTDSEVIAQLAEHYYTGDLLDTIIHVSNALEGSYALGIMCVDDPDILIAVKKDNPLIIGESSHGNFIASDVPAVLKHTNKVYYLNDKEIVVLRKNSVQFFNLDKEPLERRAETITWNIDSAEKGGYPHFMLKEIMEQPKILRDTINSAVKSGGYKDILDNIDVKRLNKIVISACGSAYNAGVVARYVFEKLCRFPSVETELASEFRYKDAVIDEKTLVILISQSGETADTIAAMREAKRKGAVTLSIVNVVGSTIAKESDYCLFTAAGPEIAVATTKAFSAQLVLLYILAIWFAAKLGKIPPETECELLAEIEALPGKAERLLKQIDAVQMYASTCVGCKSIFFIGRNIDYAIALEGSLKLKEISYIHSEAYAGGELKHGTISLVEQDTLVVAISNCAPLYGKIMSNAEQVISRGAKVLLIGNCPNAKHSATLP

SEQ ID NO: 48145 - DNA, 720 bp, Unknown
  Obtained from environmental sample
  misc_feature (1)..(720): n is a, c, g, or t
atgaatatagcggcgcaacatcttagtttcaaggaactgaacaaccggataagaacatccaaagaagccgtctgcatagacggttgtttcggacacagatttatcgcgagtggtatgacagataaaaacgtgacaattaacggaacgccggggaacgcgttaggcgcgtattttaacggcggaaccattatggtaaacggcaacgcgcaggacgcggtcggcgacacgatgaatgacggcgaaattatcattcacggcagcgcgggcgacgcgctgggttacgccatgcgtggcggaaaaatatacgtccgcgacaacgcaggatacagggttggtattcacatgaaagaatacaaggaaaaaaaacctgtaatcgttattggcggcagggcgggcagttttctgggcgaataccttgctggcgggctcattgtggttctgggcataggctgcaaccatgagattcctgtctggtattttaccggaaccggaatgcacggcggaaaaatattcatcagaaccgacaaagagctttcttcgcttcccgcgcaggtcgttgaggatgtggccaaagatgatgatttacgtgagattgcgccctatgtcggcgagtttgcgaagcattttggcatggacgcgaagcagttaatgaaagacaggtattatgtgttgagaccccacgcgaagaacccgtataagcagttgtatacggcgaattaa

SEQ ID NO: 48146 - protein, 239 aa, Unknown
  Obtained from environmental sample
  DOMAIN (1)...(209): GXGXG motif
  misc_feature (1)..(239): Xaa is any amino acid
MNIAAQHLSFKELNNRIRTSKEAVCIDGCFGHRFIASGMTDKNVTINGTPGNALGAYFNGGTIMVNGNAQDAVGDTMNDGEIIIHGSAGDALGYAMRGGKIYVRDNAGYRVGIHMKEYKEKKPVIVIGGRAGSFLGEYLAGGLIVVLGIGCNHEIPVWYFTGTGMHGGKIFIRTDKELSSLPAQVVEDVAKDDDLREIAPYVGEFAKHFGMDAKQLMKDRYYVLRPHAKNPYKQLYTAN

SEQ ID NO: 48147 - DNA, 444 bp, Unknown
  Obtained from environmental sample
  misc_feature (1)..(444): n is a, c, g, or t
atgcggagacaaagaatcgaggacgcgtatcacgtgctgtccatgcgccacggcagggccgcggaggacgaggaggtggcactgcacttgggcgtgccgctcgaggccttgcacaagtcgctggacgacctgaagggggtctcgctaggctcctttggggacgaaagtggggaaggcgaggggctgctggcattcatagccgaccccgacgcggaggatccgcacttggtattgcacgggaaggagatgaaggacttgctggccaaaatggtggacgagctacccgaaaaagagaagcaggtcatggactactactacaaggaagagatgaacatgaaggagatcgggcggagcttgggcattacggagagccgagtctcacagctgcacaccaaggccatactaaggctgagggcgaaactcaggcgggctagggcggcgtag

SEQ ID NO: 48148 - protein, 147 aa, Unknown
  Obtained from environmental sample
  DOMAIN (84)...(137): Sigma-70, region 4
  misc_feature (1)..(147): Xaa is any amino acid
MRRQRIEDAYHVLSMRHGRAAEDEEVALHLGVPLEALHKSLDDLKGVSLGSFGDESGEGEGLLAFIADPDAEDPHLVLHGKEMKDLLAKMVDELPEKEKQVMDYYYKEEMNMKEIGRSLGITESRVSQLHTKAILRLRAKLRRARAA

SEQ ID NO: 48149 - DNA, 462 bp, Unknown
  Obtained from environmental sample
  misc_feature (1)..(462): n is a, c, g, or t
atggcaaaaattctcagccaagaagaagtcgatgcgctgctgaaaacccacgccaagggggaaatcaagccaacggctggttctgtgcaggaaaagccagccagcggcggtggcggcggggcggccaagcccaagaagcaggggccgcagaagaaggtcagcctctacaacttccgcaggcccgacagggtcagcagggagcagatgaggtcgctgcacttcatgcacgaccgctttgccagaaacttcagctccagcctgtccgcttacatcagattcatcacggaggtgaacctgataagcgtcgagcaactgagctatcaggaattcctgctgtccgtgcccgacccgacgtgcttcaacgccatctcgctgcgcccgctggagggcgcgatagccatggaggtgaacccgcagctcgtctttcccataatcgacaagatgctggggcggcccaggtga

SEQ ID NO: 48150 - protein, 153 aa, Unknown
  Obtained from environmental sample
  DOMAIN (56)...(153): Flagellar motor switch protein FliM
  misc_feature (1)..(153): Xaa is any amino acid
MAKILSQEEVDALLKTHAKGEIKPTAGSVQEKPASGGGGGAAKPKKQGPQKKVSLYNFRRPDRVSREQMRSLHFMHDRFARNFSSSLSAYIRFITEVNLISVEQLSYQEFLLSVPDPTCFNAISLRPLEGAIAMEVNPQLVFPIIDKMLGRPR

SEQ ID NO: 48151 - DNA, 357 bp, Unknown
  Obtained from environmental sample
  misc_feature (1)..(357): n is a, c, g, or t
atggcggtagttatttttttctgcagaatatttccgtttctgttcttttataaaaagaacggcaatatccgggatgaaggcggttcacaggacgggcgcagtgacacggcaagacacactgccgggagagatagcgcaggcatctttcttgtttttgtcgaaaaaacagcgccgcctgtggcgatgactgttttagctttcaatgctctgcctataaaatcaagcctgtgcgagataatccctgcaatagcggcggctatccttaccgccttagtccatctgtggaagcgaaatgcgctattaagcatctgcggcgggacggcgttgtatatgcttttgatcaggttctggtcataa

SEQ ID NO: 48152 - protein, 118 aa, Unknown
  Obtained from environmental sample
  DOMAIN (1)...(115): Branched-chain amino acid transport protein (AzlD)
  misc_feature (1)..(118): Xaa is any amino acid
MAVVIFFCRIFPFLFFYKKNGNIRDEGGSQDGRSDTARHTAGRDSAGIFLVFVEKTAPPVAMTVLAFNALPIKSSLCEIIPAIAAAILTALVHLWKRNALLSICGGTALYMLLIRFWS

SEQ ID NO: 48153 - DNA, 1281 bp, Unknown
  Obtained from environmental sample
  misc_feature (1)..(1281): n is a, c, g, or t
atggggagaaaaaaaataggaaggaggaaggaggaattaggaataaattccctggcatcctctctccaattttctaaccgctctttattcctcattcctcattcctccttcctccttcctccttcctccttcctaattattttgttatctgttacctgttccctgttatctgcctgcgcttctccccccgcgccctccggcccggttgtaatccctgaggacattgccgggattgtccatgccggccaaaccaatacgccgcaggaatacgcccttctggacagaatgggcgcaagctggattcttagaacttttaactggaaccagattgaaggaacggaaggccagtggaattttgacagttacgataagtatgttgatacggcaaaagcggcaggaaaaaaaataatcggcattcttgcttatgacgtcccctggatccacaaagacggcaaaaaccgcaagtatattccgccggacaaggtacatttgtatttgaattatgtgcggcggacagcggagcattttaagggcagggttgacgcgtggtgtatctggaacgagccaaactttatcttttggaagggaagcagggacgaatatctgtcgcttgcccgccaggctgcggacgcgttgagggaagtcgattctgaggtgatccttttgggcggggcttttaaccgtgggattttcggcctgccaacggcgtatatcaaaggtttgtttgaatcgggcgcaatggataaggcggatgccgtcgcctttcatccctatgagctaaaccccaatcgtaccgtcagactgttcttggaattccgcgcccaagttgccaaatacggctttgaagatcgtatatggataaccgaaacaggataccccaccgggggctggtatccaacttcagtttcagaaaaaaaattccccgcgtatattgttaaaacctttgttggacttaccattaacggcgcgaaaaaaattttatggtatcagttgtttgatccgcttaaacgctccaaatcagagtcagaagactattttgggcttgtacggagtaaagacgattacacgtccaagggagcggaagcgctccgtctctgcgctgtatacctttccggaaccgcgtaccgtccggatcttcctctgcgggaaaatcttcccaatagtttacattcgttttattttgaacaaccttcagagggacggacgcttgtcatgtggaaggaaggaaaagcgataagccttatgttacaggcttcagaaaagcggttacaccagacatga

SEQ ID NO: 48154 - protein, 426 aa, Unknown
  Obtained from environmental sample
  misc_feature (1)..(426): Xaa is any amino acid
MGRKKIGRRKEELGINSLASSLQFSNRSLFLIPHSSFLLPPSSFLIILLSVTCSLLSACASPPAPSGPVVIPEDIAGIVHAGQTNTPQEYALLDRMGASWILRTFNWNQIEGTEGQWNFDSYDKYVDTAKAAGKKIIGILAYDVPWIHKDGKNRKYIPPDKVHLYLNYVRRTAEHFKGRVDAWCIWNEPNFIFWKGSRDEYLSLARQAADALREVDSEVILLGGAFNRGIFGLPTAYIKGLFESGAMDKADAVAFHPYELNPNRTVRLFLEFRAQVAKYGFEDRIWITETGYPTGGWYPTSVSEKKFPAYIVKTFVGLTINGAKKILWYQLFDPLKRSKSESEDYFGLVRSKDDYTSKGAEALRLCAVYLSGTAYRPDLPLRENLPNSLHSFYFEQPSEGRTLVMWKEGKAISLMLQASEKRLHQT

SEQ ID NO: 48155 - DNA, 954 bp, Unknown
  Obtained from environmental sample
  misc_feature (1)..(954): n is a, c, g, or t
atgagaatttccagtcatgtacaggcgataattgacgcggcttacaatgaggctaaattgcgaagccacgaatatgtaacgccggaacatattttatacgcggcattggcttttgaagaagtgcaaggagttttgttttcctgcggagcggatctggcgcagatcaagtccggcatggaaaatttctttgatcaaaaagtgccttcttccaaagccgcggaacccgcaaaaaccgtcggctttcacagcattatggagagggctataattcagagcagatccgcacaaaaagacaaaatcgacgtggcggatatattagtgtcgctttatgacgaaaaacactgttacagctcctattacctccgcaaagccggagtaaaacggcttgaacttttacaggtgctgtcccacagttccggaagcgaaggcggaaaagaagccgatacggccgacgacgagcagatagacgggcaaagagcaaagcaaggcaaaaagacagcgcttgaacgttacgcggcagaccttaccgaacttgcgcgtaacaacaagcttgagcctgtcatcggcagggaggaagaactggacaggaccgttcaggtgctttgccgcaggctgaaaaacaaccctattcatgtcggggattccggcgtgggaaaaacggcgattaccgaaggcctcgcgcagagaatcgtcgccggcgacgtgccgccgacgctgaaaggtttcagtattttctcgcttgatatgggcgctcttttggcgggtacaaaataccgaggcgattttgaggaaagagtcaaacgcgtcgtggaagaaatgatgaaaaaagaaaaggccattctttttatagacgagattcacaccctggtcggagccggcgctgtttcangcggggcgctggacgctccaacatgctcaagccggcgcttacttccggcaaactccgctgtatag

SEQ ID NO: 48156 - protein, 317 aa, Unknown
  Obtained from environmental sample
  DOMAIN (14)...(64): Clp amino terminal domain
  misc_feature (1)..(317): Xaa is any amino acid
MRISSHVQAIIDAAYNEAKLRSHEYVTPEHILYAALAFEEVQGVLFSCGADLAQIKSGMENFFDQKVPSSKAAEPAKTVGFHSIMERAIIQSRSAQKDKIDVADILVSLYDEKHCYSSYYLRKAGVKRLELLQVLSHSSGSEGGKEADTADDEQIDGQRAKQGKKTALERYAADLTELARNNKLEPVIGREEELDRTVQVLCRRLKNNPIHVGDSGVGKTAITEGLAQRIVAGDVPPTLKGFSIFSLDMGALLAGTKYRGDFEERVKRVVEEMMKKEKAILFIDEIHTLVGAGAVSXGALDAPTCSSRRLLPANSAV

SEQ ID NO: 48157 - DNA, 468 bp, Unknown
  Obtained from environmental sample
  misc_feature (1)..(468): n is a, c, g, or t
gtgaatctcgtctataaaaagaatggccttttcttttttcatcatttcttccacgacgcgtttgactctttcctcaaaatcgcctcggtattttgtacccgccaaaagagcgcccatatcaagcgagaaaatactgaaacctttcagcgtcggcggcacgtcgccggcgacgattctctgcgcgaggccttcggtaatcgccgtttttcccacgccggaatccccgacatgaatagggttgtttttcagcctgcggcaaagcacctgaacggtcctgtccagttcttcctccctgccgatgacaggctcaagcttgttgttacgcgcaagttcggtaaggtctgccgcgtaacgttcaagcgctgtctttttgccttgctttgctctttgcccgtctatctgctcgtcgtcggccgtatcggcttcttttccgccttcgcttccggaactgtgggacagcacctgtaa

SEQ ID NO: 48158 - protein, 155 aa, Unknown
  Obtained from environmental sample
  misc_feature (1)..(155): Xaa is any amino acid
MNLVYKKNGLFFFHHFFHDAFDSFLKIASVFCTRQKSAHIKRENTETFQRRRHVAGDDSLREAFGNRRFSHAGIPDMNRVVFQPAAKHLNGPVQFFLPADDRLKLVVTRKFGKVCRVTFKRCLFALLCSLPVYLLVVGRIGFFSAFASGTVGQHL

SEQ ID NO: 48159 - DNA, 306 bp, Unknown
  Obtained from environmental sample
  misc_feature (1)..(306): n is a, c, g, or t
atggaacctcttgtcatagacaaaccatcagaaaaaatcgaggaaaacatcaaagaaccggaagattacagggttattctgctcaacgataactatacaaccatggaatttgtagttgctgtattgatcgaaatcttccataaagatataacggacgcaaaccggataatgctggacgttcacaaaaaaggcaagggaatagtgggggtatatacatgggatattgccgcctcaaaaaccgagcaggtccaccttgtggcaagggcgcacgagtacccccttcgctgtattatcgaaccggtataa

SEQ ID NO: 48160 - protein, 101 aa, Unknown
  Obtained from environmental sample
  DOMAIN (17)...(98): ATP-dependent Clp protease adaptor protein ClpS
  misc_feature (1)..(101): Xaa is any amino acid
MEPLVIDKPSEKIEENIKEPEDYRVILLNDNYTTMEFVVAVLIEIFHKDITDANRIMLDVHKKGKGIVGVYTWDIAASKTEQVHLVARAHEYPLRCIIEPV

SEQ ID NO: 48161 - DNA, 972 bp, Unknown
  Obtained from environmental sample
  misc_feature (1)..(972): n is a, c, g, or t
atgtctcgatcttattgcttctccggaacgaatncatcgttatttatggtcgaagtacatatacctatcggaaaattacgcgctcgtatccaacatgattttccgaatatcagcatcggcgaaattcaatacgcgaaaatcggtcttattaaaagcacggcctgggctgatatatttcaaagctggtttcctgaagccgcaaatgtaactatgtttgattcccaggacgacgctttcctggcccttgaccgcggtataattgatttggtcatggcgggtacaaatgccctttccagcgtaaccaactattatgagctttcaaattataaagctaattatttatttaacagtaccattgattatgttatcgcctacaataaaaccgagcatgttctttggtctattattgacaaggcgcttaagtacgttgatataggaatcatttcaaagcggtgggaaaataaaacttttaattatgaggcaaaattggagcgcgcgcagcgtccgtggctgataggagcaatatttgtgtctttgggcgcgtttgtcgtaattcttttttcttttaagaaaaatcaacaaatgaaaaatcagctggaactcatactcaacaatgttgaaagcggcattgccataattgacatggagacgcgtgaaatactggacatcaatccggttgttattcgtatgttcggcgatgccaaagaaaagattgttggtcatacttgcgaaacgcttttcagcggaactaaaggctgtccggtaattgataacagccaaaccatgatccaggccgagcggcaatttagaaacgcagccgatcaaatcattccgatagtaaaatccgtgtcaaaaataatttataacggacgcccggcgttactggaaagtttttccgacatatcgcatctaaaagaagccgaagaaagcaagagcgcgtcggaggcaaagacccgctttatcgcaatatga

SEQ ID NO: 48162 - protein, 323 aa, Unknown
  Obtained from environmental sample
  misc_feature (1)..(323): Xaa is any amino acid
MSRSYCFSGTNXSLFMVEVHIPIGKLRARIQHDFPNISIGEIQYAKIGLIKSTAWADIFQSWFPEAANVTMFDSQDDAFLALDRGIIDLVMAGTNALSSVTNYYELSNYKANYLFNSTIDYVIAYNKTEHVLWSIIDKALKYVDIGIISKRWENKTFNYEAKLERAQRPWLIGAIFVSLGAFVVILFSFKKNQQMKNQLELILNNVESGIAIIDMETREILDINPVVIRMFGDAKEKIVGHTCETLFSGTKGCPVIDNSQTMIQAERQFRNAADQIIPIVKSVSKIIYNGRPALLESFSDISHLKEAEESKSASEAKTRFIAI

SEQ ID NO: 48163 - DNA, 669 bp, Unknown
  Obtained from environmental sample
  misc_feature (1)..(669): n is a, c, g, or t
atgaaaccggacgacgcgcagaccaattacaatatggctatagttaaacttgaactgaaaaaaaatacggaagcggtaaatttcgccaaaatcgccgttgatttaagtccgactaacgcggtttatgtttatacgctggggcttacctgcgaaacggcgggcgtacaggaagcggcaatttccgcgtatcagctttcatctactctggacacaaaataccttcgcccgcggataaatctgggcagtatatatcttgccgccggaaaatataacgaagcggttcattatctgaatgaagcgtataaagttgagccttccaactttgaagttaacaacaatttaggcgccgtgtacgcgaagcaggaaaactggacatacagtattattcattatgagcgcgccctgaacacaaagcaaaatgatcctaccgtgctttttaaccttgcgcgcgcttatgccggagcgaatgaacttgaaaaagcgacaaagacataccaatccttattgcatttagtccccgacaattgggacgcaatgtatgagcttggaatggcttgcgtatctcttgggaagagcgtagacgcaaaacgttatttgaatgaccttataagcagaaaccccaattattccggcaaggcggaagcggagaggattctaagaagcctatga

SEQ ID NO: 48164 - protein, 222 aa, Unknown
  Obtained from environmental sample
  DOMAIN (74)...(107): Tetratricopeptide repeat
  misc_feature (1)..(222): Xaa is any amino acid
MKPDDAQTNYNMAIVKLELKKNTEAVNFAKIAVDLSPTNAVYVYTLGLTCETAGVQEAAISAYQLSSTLDTKYLRPRINLGSIYLAAGKYNEAVHYLNEAYKVEPSNFEVNNNLGAVYAKQENWTYSIIHYERALNTKQNDPTVLFNLARAYAGANELEKATKTYQSLLHLVPDNWDAMYELGMACVSLGKSVDAKRYLNDLISRNPNYSGKAEAERILRSL

SEQ ID NO: 48165 - DNA, 393 bp, Unknown
  Obtained from environmental sample
  misc_feature (1)..(393): n is a, c, g, or t
atgttatttacgccgtttgaaattaaagaaactgttgatatgtttatgcgctacaagttggacatacgcgcaattactttgggcgtctctctcttagattgcattggctctacgggagatgtaacgcgaaaaaaaatacgtgagaaacttttacgcgttgcggggcctttagttaaaactggctgcgacattgaaacagaatacggtataccaatcatcaacaagcgtatatccgttaccccaatttcactcgtcgccgcttcatgtgaggatganaattatacgccgtttgccaagactctggacgaaacggcgaaagaattgggcgttgattttatcggcggcttttccgcccttgtcaaaaagggatttctccnggcgattgaaaactga

SEQ ID NO: 48166 - protein, 130 aa, Unknown
  Obtained from environmental sample
  misc_feature (1)..(130): Xaa is any amino acid
MLFTPFEIKETVDMFMRYKLDIRAITLGVSLLDCIGSTGDVTRKKIREKLLRVAGPLVKTGCDIETEYGIPIINKRISVTPISLVAASCEDXNYTPFAKTLDETAKELGVDFIGGFSALVKKGFLXAIEN

SEQ ID NO: 48167 - DNA, 876 bp, Unknown
  Obtained from environmental sample
  misc_feature (1)..(876): n is a, c, g, or t
ttgcccgacgcgctttccgcgacgggaagaacgtgcgcttccgtaaacgtcgccctcacaaagagcggcattaacatggacgctgtgcgccttatgggagagacaataaaaaaaattgccgaagcgaccgctgataaatccggcatcggctgcgcgaaactggttgttttttgcaacgcgcctgaagacaatccctttatggcgggagcttttcacggggtaggggaggcggagagcgtgcttaatgtcggagtttccggccccggcgtaataaaagccgccattgaaaactgccgcgaaatgagttttgacgcgttagctgacaccatcaaaaaaaccgcttttaaaataacgcgaatgggacagcttgtaggatttgaagccgcgcgcagaataggagtcccattcggcattttagacctttcacttgcgccgactccggcggtaggtgattctgtcgcgcgaatccttgaagaaatcggccttgaagccgccggaacccacgggacgacagccgctcttgcgatgttaaccgacatggtaaaaaaaggcggcgtaatggcctccacccatgtaggcggcttttccggcgcgtttattcccgtctcagaagacgaaggcatggtggcggcagtcaaaaacggctcgctctcccttgataaactggaagctctgacttgcgtctgctccgtaggactggacatgattcccctccccggcgacacgtcagcggcgacaatcgccgcaattattgccgatgagatggcaataggcatggtgaacaacaaaacaaccgcagtgcgcgtaattcccgttcccggcaaaaaatcaggcgattgggcggagttcggcggccttctggaggctccccaataa

SEQ ID NO: 48168 - protein, 291 aa, Unknown
  Obtained from environmental sample
  DOMAIN (1)...(291): Uncharacterized ACR (DUF711)
  misc_feature (1)..(291): Xaa is any amino acid
MPDALSATGRTCASVNVALTKSGINMDAVRLMGETIKKIAEATADKSGIGCAKLVVFCNAPEDNPFMAGAFHGVGEAESVLNVGVSGPGVIKAAIENCREMSFDALADTIKKTAFKITRMGQLVGFEAARRIGVPFGILDLSLAPTPAVGDSVARILEEIGLEAAGTHGTTAALAMLTDMVKKGGVMASTHVGGFSGAFIPVSEDEGMVAAVKNGSLSLDKLEALTCVCSVGLDMIPLPGDTSAATIAAIIADEMAIGMVNNKTTAVRVIPVPGKKSGDWAEFGGLLEAPQ

SEQ ID NO: 48169 - DNA, 612 bp, Unknown
  Obtained from environmental sample
  misc_feature (1)..(612): n is a, c, g, or t
ttgccgggaacgggaattacgcgcactgcggttgttttgttgttcaccatgcctattgccatctcatcggcaataattgcggcgattgtcgccgctgacgtgtcgccggggaggggaatcatgtccagtcctacggagcagacgcaagtcagagcttccagtttatcaagggagagcgagccgtttttgactgccgccaccatgccttcgtcttctgagacgggaataaacgcgccggaaaagccgcctacatgggtggaggccattacgccgcctttttttaccatgtcggttaacatcgcaagagcggctgtcgtcccgtgggttccggcggcttcaaggccgatttcttcaaggattcgcgcgacagaatcacctaccgccggagtcggcgcaagtgaaaggtctaaaatgccgaatgggactcctattctgcgcgcggcttcaaatcctacaagctgtcccattcgcgttattttaaaagcggtttttttgatggtgtcagctaacgcgtcaaaactcatttcgcggcagttttcaatggcggcttttattacgccggggccggaaactccgacattaagcacgctctccgcctcccctaccccgtga

SEQ ID NO: 48170 - protein, 203 aa, Unknown
  Obtained from environmental sample
  misc_feature (1)..(203): Xaa is any amino acid
MPGTGITRTAVVLLFTMPIAISSAIIAAIVAADVSPGRGIMSSPTEQTQVRASSLSRESEPFLTAATMPSSSETGINAPEKPPTWVEAITPPFFTMSVNIARAAVVPWVPAASRPISSRIRATESPTAGVGASERSKMPNGTPILRAASNPTSCPIRVILKAVFLMVSANASKLISRQFSMAAFITPGPETPTLSTLSASPTP

SEQ ID NO: 48171 - DNA, 1158 bp, Unknown
  Obtained from environmental sample
  misc_feature (1)..(1158): n is a, c, g, or t
ttgaccgcgtttattctgattattgtagtgctgtttctctgtatagttttgttcgcccgttcgggcggtgaaaagaacaaggcaaattggcttaaattcttctctaagggcaaagaagccggtttttcaataagggaacttgaacagataagaaagcttgtagcaaataatgacattgacgatccggcgttaatttttacatcccaaaagcatcttgaaacctgtatccgctccgtggtaaacgccgtccgcatgtccggggaaagcgaggatcccgcaattcaggattttctttcaaggctctttgattactgtaaacagcttggaataatgaatgccgaaaaaaaatcgaatattactacttcccgtcaaatcggcgaaggccaggtgttaaaagttttagttgccggcactggggtatttaagtcatcggtaattaagaatttcgggaattatcttaccattgcccggccgacaaatcaaaagatgacaagccatatgcaatgggacggtttaagcatatccgtatatttttggcgggaagacgacgcgggctatgtatttgactcgcaagtgctggacgaagttttttccatgggcctttcagccttaaaaatagcccataatgacgctcttttcagaacccagaaacggacgtctttgcgcgttaaactgaataaagcggcgtttgtttaccttgttaatgatatggatccccacaaaatggaaaagtcacccggcctaagatgcatgatggaagatatttccgacacgggatgcgccttcagggtaacaggcttggctcccgtagggcagcgccttaaagtacagttctcgctggatcatattccggtatgcataccgggtaccatccgttcagttgattatcagaaggagacgaatatatcggttgttcacatggaggcggatgagcttccgatttcgactaaaaaccatatcctttgcgaagtttttgatatgctgccgggcgatgatgatgacgaactgccgtacagggtgattgaaaaggaaataaaacgccttcggcgacgcctgcggcgaggactccctccgcgcccacaacgaaaagggaccgctccctctttaaccgatgatagccacgggttgaaagactttcaggacataataaatggctaa

SEQ ID NO: 48172 - protein, 385 aa, Unknown
  Obtained from environmental sample
  SIGNAL (1)...(19)
  DOMAIN (216)...(326): PilZ domain
  misc_feature (1)..(385): Xaa is any amino acid
MTAFILIIVVLFLCIVLFARSGGEKNKANWLKFFSKGKEAGFSIRELEQIRKLVANNDIDDPALIFTSQKHLETCIRSVVNAVRMSGESEDPAIQDFLSRLFDYCKQLGIMNAEKKSNITTSRQIGEGQVLKVLVAGTGVFKSSVIKNFGNYLTIARPTNQKMTSHMQWDGLSISVYFWREDDAGYVFDSQVLDEVFSMGLSALKIAHNDALFRTQKRTSLRVKLNKAAFVYLVNDMDPHKMEKSPGLRCMMEDISDTGCAFRVTGLAPVGQRLKVQFSLDHIPVCIPGTIRSVDYQKETNISVVHMEADELPISTKNHILCEVFDMLPGDDDDELPYRVIEKEIKRLRRRLRRGLPPRPQRKGTAPSLTDDSHGLKDFQDIING

SEQ ID NO: 48173 - DNA, 1074 bp, Unknown
  Obtained from environmental sample
  misc_feature (1)..(1074): n is a, c, g, or t
atgtcatcggtatacggtaacaatttaaaagtgtcgattttcgggcagtcccactcccccgctatcggcgtgtgcattgacgggcttccgtcaggttttaaaattgacttaaacgaactaggcgcttttttaaaacggcgcgctccgggacagaacgcgcattctacggcgcgcaaagaagcggacgagcctgaatttttatcaggtcttgtagacggcgttacgtgcggcgcgcctttaaccgccgttatacgcaatacggatacccgctcatcagattacgattcattaaaagatatcccacgccccagccacgcggattttacggcgtttgtaaaaaacggacctgcgcgtgatcatcgcggcggcggcgaattttccgggcggcttaccgctcctctttgcattgccggcggtatttgcttgcagttactaaaacgcgaaggaatcagtattgcggcgcacatcgtacaaatcgggaatattacggcaaaaccttttgatcctgttaatgtcggtgaagctgaaatacgctccttgcaaaacgcggagtttcccgtcatggatacgcaggccggagagcgaatgcgcgccgcgatagaagcggctaaaaaagacggcgactccgtaggcggaataattgagtgctgtataataggcgttcccgcgggtcttggagagccgatttttgacgggatagagaaccgtattgcggcggcgcttttcggcattcccgcggttaagggtgtggagttcgggaatggttttgccgccgcttcccttcgcggttctgaaaataacgacgctttttatatgaagggagataccatacaaacaaagactaaccgtcacggcggcattctggggggcatttcttcggggatgccggttattttccgcgccgcgtttaagcccaccccgtccatcgcgaaggagcaagacagcgtgagcctctcccgccgcgaaaatgtaaaacttgccgttacgggccgccatgatccatgcatagtgcctcgggcggttccctgcgtcgaagccgcggcggcaatagcgctttatgacataatgttatag

SEQ ID NO: 48174 - protein, 357 aa, Unknown
  Obtained from environmental sample
  DOMAIN (9)...(357): Chorismate synthase
  misc_feature (1)..(357): Xaa is any amino acid
MSSVYGNNLKVSIFGQSHSPAIGVCIDGLPSGFKIDLNELGAFLKRRAPGQNAHSTARKEADEPEFLSGLVDGVTCGAPLTAVIRNTDTRSSDYDSLKDIPRPSHADFTAFVKNGPARDHRGGGEFSGRLTAPLCIAGGICLQLLKREGISIAAHIVQIGNITAKPFDPVNVGEAEIRSLQNAEFPVMDTQAGERMRAAIEAAKKDGDSVGGIIECCIIGVPAGLGEPIFDGIENRIAAALFGIPAVKGVEFGNGFAAASLRGSENNDAFYMKGDTIQTKTNRHGGILGGISSGMPVIFRAAFKPTPSIAKEQDSVSLSRRENVKLAVTGRHDPCIVPRAVPCVEAAAAIALYDIML

SEQ ID NO: 48175 - DNA, 1059 bp, Unknown
  Obtained from environmental sample
  misc_feature (1)..(1059): n is a, c, g, or t
atgtctcggagatttggaaaaagaacgttcttggactgcggcgaaagcggatcaacatgcgttnttctgctccccgtctgcggcgcacttggaacaaaagtaaaatttaacatggaaggccgtcttcccgcccgccctcttacaggattgtacgaggaaatgacatctcacggctgtacgctctcggaacagggacgctccccgcttgttcttggcgggaaactaaaaaacggcaattattccctgccggggaatatttcctctcagtttataagcgggctgttatttgcccttcctctgctcgaaggcgacagcgcaatttgcgtaacaggcaatttggaatcgcgtccctatgttgacatgacgctggacgcattgcgtcttttcggcataattgtccgggaagaagaaaaacccgcttttgcctttcgcgtaacaggaactcaaacttaccgctcaccaaagagcgtccaaaccgagggagactggtctaatgcggctttttggctctgcgcgggtgcaataggaacgggcggcataacctgtaccgggcttaacattaattcacgtcaaggcgaccgcgctattgtcgaacttttaaaaaaattcggggcgcgtgtttcagttaacggcggtgaagtaactgtatcacctaacggactcaaaggaatcgaaattgacgcggaaaatactcccgaccttgtaccggttttagccgcagtagcgtctacggcgcagggagaaaccgtaatcaagggcgcggcaaggctgaggttgaaagaaagcgacaggcttcgcacggttgccgcatccctttccgctctgggcgcagatgtaaaggaaacagacgacggacttgtcattcaaggtaaaaagaaactgcaaggcggcgcggtacagtccttcggcgatcacaggatcgcgatggcagccgccgtcctgtcagtcgcgtgttcaaatccggtaacaatccaaaacgccgaggcggtaaataaatcctatcctgctttttttgacgattttcacataacacttggcggtatttgcgaaaaggagtaa

SEQ ID NO: 48176 - protein, 352 aa, Unknown
  Obtained from environmental sample
  DOMAIN (7)...(341): EPSP synthase (3-phosphoshikimate 1-carboxyvinyltransferase)
  misc_feature (1)..(352): Xaa is any amino acid
MSRRFGKRTFLDCGESGSTCVXLLPVCGALGTKVKFNMEGRLPARPLTGLYEEMTSHGCTLSEQGRSPLVLGGKLKNGNYSLPGNISSQFISGLLFALPLLEGDSAICVTGNLESRPYVDMTLDALRLFGIIVREEEKPAFAFRVTGTQTYRSPKSVQTEGDWSNAAFWLCAGAIGTGGITCTGLNINSRQGDRAIVELLKKFGARVSVNGGEVTVSPNGLKGIEIDAENTPDLVPVLAAVASTAQGETVIKGAARLRLKESDRLRTVAASLSALGADVKETDDGLVIQGKKKLQGGAVQSFGDHRIAMAAAVLSVACSNPVTIQNAEAVNKSYPAFFDDFHITLGGICEKE

SEQ ID NO: 48177 - DNA, 1053 bp, Unknown
  Obtained from environmental sample
  misc_feature (1)..(1053): n is a, c, g, or t
gtgcaaaatatgaatagaatagtaatcattggcaacggttttgatttagcccacggcttagaaacaagctataaacattttattgattatttgtgggaaaaagaaaaagaaataattactaaaaataaacttgcttattgccatggctatttagattcatctgattatcatatatacaatagtgcttttattgaaattcgctcaacaacgttctctactataaaagagaattttgcaaacggatacggatatgcttggtttaaagatcttaaaaaacgaggtaatatacgtgtagttgagtttcagaatacttttttagaaactatttgcaaagaagttgaatcgaaaaaatgggtagatatagaagcagagtattatcatgaattaaaaatgtgtttaaacaacaaaagaacgggtggaataaagaaactcaatgaagaattttcaaagataaaaactgcgttagaaatgtatttagaaaagttacaaaaaaatgttttgtccgatggtacaattggtacaatttctcaacacttaaaaatgacaagctatagtggaaaacctattgacaatgtgatttttctaaactttaattatacttcaacaatagatcattacaaaaatagcaacgaccttgttatctatatacacggcaaattaaacgatccgaataatcccataattttcggctacgcagacgaacttgacgaaaactataaacagattgaaaacaaaaatgacaacgaatatctcaaaaatatgaaatctatggaatatttgaaaactggtaacaatactaaattacaagcacttattgattcggatgaatacgagatattcatcatgggacattcttgcggcatttcagaccgaacattattaaaaaacgtgtttgaacataaaaattgccggtcaataagaatattttatcataaagacaataactccgataattacattgaccttgtgaataacatctctaggatttttgatgataagaacacaatgtggcgcaaggttgtcagtaagaacaaatgtgtgccgctattataa

SEQ ID NO: 48178 - protein, 350 aa, Unknown
  Obtained from environmental sample
  misc_feature (1)..(350): Xaa is any amino acid
MQNMNRIVIIGNGFDLAHGLETSYKHFIDYLWEKEKEIITKNKLAYCHGYLDSSDYHIYNSAFIEIRSTTFSTIKENFANGYGYAWFKDLKKRGNIRVVEFQNTFLETICKEVESKKWVDIEAEYYHELKMCLNNKRTGGIKKLNEEFSKIKTALEMYLEKLQKNVLSDGTIGTISQHLKMTSYSGKPIDNVIFLNFNYTSTIDHYKNSNDLVIYIHGKLNDPNNPIIFGYADELDENYKQIENKNDNEYLKNMKSMEYLKTGNNTKLQALIDSDEYEIFIMGHSCGISDRTLLKNVFEHKNCRSIRIFYHKDNNSDNYIDLVNNISRIFDDKNTMWRKVVSKNKCVPLL

SEQ ID NO: 48179 - DNA, 690 bp, Unknown
  Obtained from environmental sample
  misc_feature (1)..(690): n is a, c, g, or t
gtggagcggcgtggccagcaaaaatattttgtcgagcgggatatccgccacggcgaaggcggcggcggcgtagagggcggcgaaagagacgcactccccggcgccgccggcgtacccctccttgaacttgaacgcctccatagcctctatggtctccgtcttccagtaggggatgatgttcgacgtgtacttgtccagcccgaagtggcgccggatgtctatatcgaagtagtacttgtcgccctcgtacccgaagagggcgttgctgcgcgccaatatctcctcgcttataaacgcggagaaccgcccgatctcgcgctccttggaggtcagcccccaggtatcaaggtcgaggttgaaggagaagcggtccattatgtactgcttgagccgctggacgcgcttcatctcgccctgagcgcggcttttcgagaaccacggatcgcccttccacgcccagaggcggttggacatgatgttcgcgaggacgagggcgtacatgagttccgggaagatgaagacctccatgtcggagagggtcacggcagaagagtacttttctacggaggcaagggagcgcgggtcgtatgtcgccggcagtttagccattcttcctccgggattgggggacaacgggtcgtgattcgagtatgtaaaaatacatcatgggcggcggatttcggtcaataa

SEQ ID NO: 48180 - protein, 229 aa, Unknown
  Obtained from environmental sample
  misc_feature (1)..(229): Xaa is any amino acid
MERRGQQKYFVERDIRHGEGGGGVEGGERDALPGAAGVPLLELERLHSLYGLRLPVGDDVRRVLVQPEVAPDVYIEVVLVALVPEEGVAARQYLLAYKRGEPPDLALLGGQPPGIKVEVEGEAVHYVLLEPLDALHLALSAAFREPRIALPRPEAVGHDVREDEGVHEFREDEDLHVGEGHGRRVLFYGGKGARVVCRRQFSHSSSGIGGQRVVIRVCKNTSWAADFGQ

SEQ ID NO: 48181 - DNA, 1209 bp, Unknown
  Obtained from environmental sample
  misc_feature (1)..(1209): n is a, c, g, or t
atgaatcttttgctccacaatgcccaatacggcggcaaagccgtcgatctgctcgtgcgggacggacgcatacactgcctcggccccggcggcagcgtgcaggcgccgaaagggacggaaagcttcgacgcgaaacggcgtctgctcttccccagcttcattgatgcccatacccatctgcgtgagccgggctttgaatacaaggaagacatcgcttccggcctcaaagccgccgcctgtggcggcttcggcgccgtgatgtgcatggccaacacgcgcccggtcaacgacaacgccgccacaacgcgcttcctgcgggaaaagcgggcgctgctgttccctcacggcccgcggctgtatccggtgggcgcgtcgggcgtcggctgggaagacaaggccatggcgccgctgggcgaactggccgacgcggggtgcgtcgccttttccaatgacggacgctcggtggaaagcgccgacttcatgcgccgggtcatggaatacgcctcggacctcgacaggatcgtcatcgaccactgcgaagacgcaagcatggccaagggcgcgcacatgaacgagggcgtcaccagcgcgcgcatcggcatcaagggccagcccgatgcgggcgaggccatgcaggcggcgcgcgatatcctgcttgccctgtatctgaacctgcccgtgcatatcgcccacgtctcctgccgccgcacggcggacctgatcgcctggggcaaggcgcagggcgcgcgggtcacggcggaaacctgcccgcactacctgctgctcgacgacagcgaactggcgcaatacaatcccaacgccaaggtcaatccgccgctgcgtacgccggaagaccgcgacgccttgcgcgcggccgtgaaaagcggcgtcatcgacatcctggttacggatcacgccccgcacgccccgcatgaaaaggaatgcccgctggatgaagctccgaacggctttacgggcctcgacctcgccgtcagcctcagctacgaactggtaagagaaaaagttctggatgaacacgacctgatccggctctggagcgtcgaaccggcccgcatcttcaagctgcccgtcaatcgttttcagcccggcgatcctgcggacttcttcctcttcgaccccaaaacgcgatggaaagtcacgccggaaagcctccattccaaaagctgcaatacacctcggccgatctga

SEQ ID NO: 48182 - protein, 402 aa, Unknown
  Obtained from environmental sample
  DOMAIN (48)...(379): Amidohydrolase family
  misc_feature (1)..(402): Xaa is any amino acid
MNLLLHNAQYGGKAVDLLVRDGRIHCLGPGGSVQAPKGTESFDAKRRLLFPSFIDAHTHLREPGFEYKEDIASGLKAAACGGFGAVMCMANTRPVNDNAATTRFLREKRALLFPHGPRLYPVGASGVGWEDKAMAPLGELADAGCVAFSNDGRSVESADFMRRVMEYASDLDRIVIDHCEDASMAKGAHMNEGVTSARIGIKGQPDAGEAMQAARDILLALYLNLPVHIAHVSCRRTADLIAWGKAQGARVTAETCPHYLLLDDSELAQYNPNAKVNPPLRTPEDRDALRAAVKSGVIDILVTDHAPHAPHEKECPLDEAPNGFTGLDLAVSLSYELVREKVLDEHDLIRLWSVEPARIFKLPVNRFQPGDPADFFLFDPKTRWKVTPESLHSKSCNTPRPI

SEQ ID NO: 48183 - DNA, 573 bp, Unknown
  Obtained from environmental sample
  misc_feature (1)..(573): n is a, c, g, or t
ttgcggcgtcatcaatgccggggacggacggcacgcccacccacccaggcgctcttggactgcttctccctgcgccaaatctggggcgaggactttgccggcaaaaccgtgctcatcgtgggcgacatcacccacagccgggtagcccgctccaacattctgctgctttcgctccttggcgtgcgcctgcgcgtgtgcgctccgcgcaccctgctgccctccgccgtcgaccactggccggtggaggtctacggcacgctcaacgacgccgtgcgcgacgcggatgccgtcatgtgtctgcgtttgcagcttgaacgccaacaggcgggcctgctgcccgacctgtcggaatactcgaggcgtttctgcttggatatgaaacacctggaactggcgaaaccgggcgccaaagtactccatcccggccccatcaaccgagggctggacctttcatccgctctggccgacagcccgcaaagcctgatcctcgatcaggtggcggcgggcgtcgccgtgcgcatggccattcttttcctcatggcaaccagaaacgacggaggggccgacatatga

SEQ ID NO: 48184 - protein, 190 aa, Unknown
  Obtained from environmental sample
  DOMAIN (32)...(180): Aspartate/ornithine carbamoyltransferase, Asp/Orn binding domain
  misc_feature (1)..(190): Xaa is any amino acid
MRRHQCRGRTARPPTQALLDCFSLRQIWGEDFAGKTVLIVGDITHSRVARSNILLLSLLGVRLRVCAPRTLLPSAVDHWPVEVYGTLNDAVRDADAVMCLRLQLERQQAGLLPDLSEYSRRFCLDMKHLELAKPGAKVLHPGPINRGLDLSSALADSPQSLILDQVAAGVAVRMAILFLMATRNDGGADI

SEQ ID NO: 48185 - DNA, 528 bp, Unknown
  Obtained from environmental sample
  misc_feature (1)..(528): n is a, c, g, or t
atgaacgacacgcatatccgctgggcgcacaaagacttgctggacgtggatcagctctcccgccgggatgtcgccatcctgctggaacaagcctcgcaatttcaggaaatcaatcaacgtcccgtcaaaaaggttcccgtgctgcgggggaaaagcgtcgtgctcttcttcgccgaacccagcacacgcacgaagacctcgtttgacatcgccggcaaacgcctgtccgccgataccctctcgctgggcaaaagcgaatcgagcctgaccaagggagaaagcctgaaagacaccgccctgaccttgcaagccatggcgccggatgtaatcgtcatccggcattccagcagcggcgcggcgcaattcctggcggaacgcctgcattgcggcgtcatcaatgccggggacggacggcacgcccacccacccaggcgctcttggactgcttctccctgcgccaaatctggggcgaggactttgccggcaaaaccgtgctcatcgtgggcgacatcacccacagccgggtag

SEQ ID NO: 48186 - protein, 175 aa, Unknown
  Obtained from environmental sample
  DOMAIN (11)...(145): Aspartate/ornithine carbamoyltransferase, carbamoyl-P binding domain
  misc_feature (1)..(175): Xaa is any amino acid
MNDTHIRWAHKDLLDVDQLSRRDVAILLEQASQFQEINQRPVKKVPVLRGKSVVLFFAEPSTRTKTSFDIAGKRLSADTLSLGKSESSLTKGESLKDTALTLQAMAPDVIVIRHSSSGAAQFLAERLHCGVINAGDGRHAHPPRRSWTASPCAKSGARTLPAKPCSSWATSPTAG

SEQ ID NO: 48187 - DNA, 348 bp, Unknown
  Obtained from environmental sample
  misc_feature (1)..(348): n is a, c, g, or t
ttgcacgcgcaggaagccgaatcgctcgccgcaaccggcgccgcggtctgcctgtgcccgcgctccaacgccgccatcaacacgggcggggaggcgccggtgcaactttttctggacaagggagtgctgctctgcctcgggacggacagtccggcttccaacaacgatatgaacctgtggaatgaggcccgcgcgttgcgcgatgcgcatcagcttcccacgcgggcgctggcgcgtcttatgaccgtgaacgcggcgcacgccctgcgccgtcccgaactgggcaggctggcgcccggctgccgggcagcttggaccgtactgcccgaagattttaccgtccaatga

SEQ ID NO: 48188 - protein, 115 aa, Unknown
  Obtained from environmental sample
  SIGNAL (1)...(24)
  misc_feature (1)..(115): Xaa is any amino acid
MHAQEAESLAATGAAVCLCPRSNAAINTGGEAPVQLFLDKGVLLCLGTDSPASNNDMNLWNEARALRDAHQLPTRALARLMTVNAAHALRRPELGRLAPGCRAAWTVLPEDFTVQ

SEQ ID NO: 48189 - DNA, 1188 bp, Unknown
  Obtained from environmental sample
  misc_feature (1)..(1188): n is a, c, g, or t
atggcgagcgaggaattgggcatgacgttggacagcggcgcggtgtggaagggggatgagcctcgttggtccgggtactccttcttgggttggtttgacggggaagaggagtacgtctccaacgtaacgcgagccaccaagaacgtaacgctcttggcgcggtggcaggaggtgcaggaagcgcccaagtatacggtatcgttcgacgtaaacggcggcagtccgagcgtcattaagccggcgacggttgacagcggcagcactaccggcaggaatttcccggaagccccaaggaaagcgaattacgtttttgacggttggtacgacggtgagacgcagtatacgtcggagacggtgattaccaaggacgtaacgcttgtggcgcagtggcgggaggtgacggctacgcggttcaccgttaggttcaacacaaacggaggaactccgagcagcatagggtctatggcggtggacagcggcgccgcgcttggggcgagattccccgccgacccgacaaaagccgacgtcgtcttcagaggatggttcgacggtgagacgcggtataacgcgcaaacgccgattacgaaggacgtaacgctcgtggcggtgtttgaggcggtcgtccctgtgaacggcacgtttaccgacagcagaaacaatcagacgtacaaaacggtaaaattaattaatcagacgtggatggcggagaatctgaactacgagacgggcaacagttggtgctacggcaacaacgccgccaactgcgatacatacggcaggttgtacgattggggttctgcgaaaaccgcctgtccgaccggttggcacttgccgacacgcgcggagtggggaacgctggccgtagtcgtcggcgataccggcacctacggggtcaacggtaaggccggtaaaaaactgaaagcgaaaagcggttggaacaatcggaatgatgggagcagcggcaacggaacggacgaatacggattttcagccctgcccggcggcttctacgacggagccaaaaactctttcaacgcaattgacaactacggccgctggtggacagccacggaatacgacggcagcaccgcttacgaccggtatatattctacagcgccgattacatcaacgagaacaccagtttaaaaagcagcggtttttcggttcgctgcctgcaaaacaactga

SEQ ID NO: 48190 - protein, 395 aa, Unknown
  Obtained from environmental sample
  misc_feature (1)..(395): Xaa is any amino acid
MASEELGMTLDSGAVWKGDEPRWSGYSFLGWFDGEEEYVSNVTRATKNVTLLARWQEVQEAPKYTVSFDVNGGSPSVIKPATVDSGSTTGRNFPEAPRKANYVFDGWYDGETQYTSETVITKDVTLVAQWREVTATRFTVRFNTNGGTPSSIGSMAVDSGAALGARFPADPTKADVVFRGWFDGETRYNAQTPITKDVTLVAVFEAVVPVNGTFTDSRNNQTYKTVKLINQTWMAENLNYETGNSWCYGNNAANCDTYGRLYDWGSAKTACPTGWHLPTRAEWGTLAVVVGDTGTYGVNGKAGKKLKAKSGWNNRNDGSSGNGTDEYGFSALPGGFYDGAKNSFNAIDNYGRWWTATEYDGSTAYDRYIFYSADYINENTSLKSSGFSVRCLQNN

SEQ ID NO: 48191 - DNA, 843 bp, Unknown
  Obtained from environmental sample
  misc_feature (1)..(843): n is a, c, g, or t
atggaattatcagagtcagaacaattgcaaaatgaacattcgaaaattcatccgcctgtaaaaatcgaacggcggatgaattttcgaaatgtaaagatggaggtagtagttcctctgttttttgggttaataggctctcttcttttatgctctgttgtttccgcagataccgctattttttccaaagattacgccgcaataagaataagaggcgaaatgggggaagacattgaagacagtaatttttttcttgcggtaacggaaagggctcccgaccctattattgaatattaccgcagaagcgaatataaagactgggtaattgatttttttaccgatatttgttcaagcaaggaaatatcgcaggtaattctgatgaacgcggatgaatttgaagttcccgccgcgcttgcctttgcccttagctgggaagagagcaggtttaacccgcgcgcggtttcaaggcctaaccgcgacggaagcatagaccgcggtctgtttcagcttaacaaccgctcttttcccgatttggatccgctcgcttattttaacgttcgatacaacacgcgcttcggcatcagccatttacggtattgtctggatataggcggcagtgaagtttccgctcttgccatgtacaatgcgggggcgggacgggtttcgtctacgggcgcgcctaaggttacacttaattatataagccgtattttggaaaacaagagcaagatagaaagccgttttcacaccatgctgatgaaagaagaagaaaaaagatattccgaaaatgaacagagttcaaatccgcttcagtttaacccgactttaagaattacttccccgtga

SEQ ID NO: 48192 - protein, 280 aa, Unknown
  Obtained from environmental sample
  DOMAIN (122)...(236): Transglycosylase SLT domain
  misc_feature (1)..(280): Xaa is any amino acid
MELSESEQLQNEHSKIHPPVKIERRMNFRNVKMEVVVPLFFGLIGSLLLCSVVSADTAIFSKDYAAIRIRGEMGEDIEDSNFFLAVTERAPDPIIEYYRRSEYKDWVIDFFTDICSSKEISQVILMNADEFEVPAALAFALSWEESRFNPRAVSRPNRDGSIDRGLFQLNNRSFPDLDPLAYFNVRYNTRFGISHLRYCLDIGGSEVSALAMYNAGAGRVSSTGAPKVTLNYISRILENKSKIESRFHTMLMKEEEKRYSENEQSSNPLQFNPTLRITSP

SEQ ID NO: 48193 - DNA, 582 bp, Unknown
  Obtained from environmental sample
  misc_feature (1)..(582): n is a, c, g, or t
ttggccgagtttaggattgtcttgcaaaggaataaaattacaagggagaaaatgggaaatgtgccgtgcttcctgggagagttcggccttgcctttgatttaaacaacaaggacggttttaaaaaaggcgattattcattgcacgaggaagcgctgtccatgtactacgacgcggtagacgccaacctgctccactgtactatttggaattattcggcaagcaatacaaatgaatacggcgacagttggaacgaagaagacctctcgatcttttccgaagggaaagaaagagcgatactaggctggaaacggccctaccccatggctacagcgggcgagccgctttctttttcatgggacagaaaacataaaacatttgtctttcggtacaaagcaaacaaaaatattacttcgccaagcattatttatctgccgggggaaatcttcagggccgagccaagaatcgagaccgcctgcggcgggagaaatctgcggcgggaatttcatccggaaaaacagcgcctgtttgtttacaacgacggctttcacggggaagtaattcttaaagtcgggttaaactga

SEQ ID NO: 48194 - protein, 193 aa, Unknown
  Obtained from environmental sample
  misc_feature (1)..(193): Xaa is any amino acid
MAEFRIVLQRNKITREKMGNVPCFLGEFGLAFDLNNKDGFKKGDYSLHEEALSMYYDAVDANLLHCTIWNYSASNTNEYGDSWNEEDLSIFSEGKERAILGWKRPYPMATAGEPLSFSWDRKHKTFVFRYKANKNITSPSIIYLPGEIFRAEPRIETACGGRNLRREFHPEKQRLFVYNDGFHGEVILKVGLN

SEQ ID NO: 48195 - DNA, 906 bp, Unknown
  Obtained from environmental sample
  misc_feature (1)..(906): n is a, c, g, or t
gtgcctttgtgttctctgtgcctctgtgagagtctctcccttgtatgccgcggaaaacccgncttggccctagctcgnagattaccagactggaaaagattggcgcaagctccgtgtcatcgcaggaacggcacaacgctttttttgactcttgccaggctttatcagctttcggggaacaacgaagcggcgctaaaggcatgggaaaacgcgcttaaaatcaacagtgacaacggacgctcgcttttggaaagggggcggcttttaatttcccagggcgaatacgagaaagcctttgagtctctgacggtaatatttaccggaaactacgcgaaagatcttctgctcgaagcccgcttcctgattgcccatctcgaagcgtttcgttccggcaatttaagtccgctctccgcccttgccaatgacgccgatttttccgactatcgcaggttaatttattataccctctggaaaattgagcaaagcccgtcatggaaagccctcttagccaaagattttcccctaagtcctgaagcaaaaattaccgccggtaaggcgctttcggcccaaacaccgctatggattctattccccggcagggaagctcttgccttaatcaccgcgccatccacgacagcgccggatacgccgacgcaaacgcctgtggtaacgccgacggtacaaggcacaacggttttgcaaacgggtcttttcagccgcgaagaaaacgcacgcgccctctccgaaagaataaacaaagccggttttcaaagccttgttcaaaccaagcaacagaacggcggcagttactgggcagtctatgtcccctacggctccgacatgaacgcgatgatcaaaaaactcaaagatgccgggtttgagtcattcccgataacactgaactaa

SEQ ID NO: 48196 - protein, 301 aa, Unknown
  Obtained from environmental sample
  DOMAIN (45)...(78): Tetratricopeptide repeat
  misc_feature (1)..(301): Xaa is any amino acid
MPLCSLCLCESLSLVCRGKPXLALARRLPDWKRLAQAPCHRRNGTTLFLTLARLYQLSGNNEAALKAWENALKINSDNGRSLLERGRLLISQGEYEKAFESLTVIFTGNYAKDLLLEARFLIAHLEAFRSGNLSPLSALANDADFSDYRRLIYYTLWKIEQSPSWKALLAKDFPLSPEAKITAGKALSAQTPLWILFPGREALALITAPSTTAPDTPTQTPVVTPTVQGTTVLQTGLFSREENARALSERINKAGFQSLVQTKQQNGGSYWAVYVPYGSDMNAMIKKLKDAGFESFPITLN

SEQ ID NO: 48197 - DNA, 393 bp, Unknown
  Obtained from environmental sample
  misc_feature (1)..(393): n is a, c, g, or t
atgataaattgggcacggagggcagagaccatgccaacgtgcaaaaaatgtggatcgggacaggccgtcaagaacggcgtggtgggcgggaggcagcggtaccgctgcaaggactgcgggtgcaactacagggtcggcgacggtcggtcggacgcaggcgtggccgcgaagaaggccatgtgcgtcctgctctactccatggcgaaggggtccttcagggcgctggggcggatgttcaacaggagccacacgctgatataccgctggatccgcgggttcggcgagtcgctgcccgagcccgacgtccctggcgggatcagggagatggagttcgacgagatgtggcacttcgtggggtcaaaaaaacaagctttgtctcatcaaggcgcttga

SEQ ID NO: 48198 - protein, 130 aa, Unknown
  Obtained from environmental sample
  misc_feature (1)..(130): Xaa is any amino acid
MINWARRAETMPTCKKCGSGQAVKNGVVGGRQRYRCKDCGCNYRVGDGRSDAGVAAKKAMCVLLYSMAKGSFRALGRMFNRSHTLIYRWIRGFGESLPEPDVPGGIREMEFDEMWHFVGSKKQALSHQGA

SEQ ID NO: 48199 - DNA, 336 bp, Unknown
  Obtained from environmental sample
  misc_feature (1)..(336): n is a, c, g, or t
gtggcctgggtgctcggcaatcgtgatgctgcgaccttcaggaggctctacaaaaaggtgaggcgcctgaagcgctgcacgttccacaccgacgcctggcgcgtgttcgcggaggtgctgcccaaaaagcggcacgtcgtcggcaaggcgcacaccgtagccgttgagcgcgacaactccaacacgcgccaccacctggcgaggttcacgcggcggacgaaggtggtctcgaagaagaaggggatggttgatctgacgctcaggctttggcacatgctcacgtccgagccctggttcacacaataccggacgctggcattatctatctataagtga

SEQ ID NO: 48200 - protein, 111 aa, Unknown
  Obtained from environmental sample
  DOMAIN (1)...(91): IS1 transposase
  misc_feature (1)..(111): Xaa is any amino acid
MAWVLGNRDAATFRRLYKKVRRLKRCTFHTDAWRVFAEVLPKKRHVVGKAHTVAVERDNSNTRHHLARFTRRTKVVSKKKGMVDLTLRLWHMLTSEPWFTQYRTLALSIYK

SEQ ID NO: 48201 - DNA, 420 bp, Unknown
  Obtained from environmental sample
  misc_feature (1)..(420): n is a, c, g, or t
atggacgattacggccaccacccgacggccataaaaacaaccttggagggcttaaggggtttttaccccacaaggcggcttgtggtcagcttcatgtcccatacctataccaggaccgccgcgctgttagatgaatttgccgcctcgcttgccggggccgacgtgctgttcctccataaaatttacgcgtccgcgcgcgagcattttgacgggcatatcaacggcaaatccatcatggaaaagatcgagagcctccctgccaaaaaagccacggtgtattataccgacgagccgttagacgcttttgacaagttaaaagagattcttaaacccggcgatctcttcctcaccctgggcgctggcaataactggcctcttggggtaaaactctttgatcactttaaagaggtatccagatga

SEQ ID NO: 48202 - protein, 139 aa, Unknown
  Obtained from environmental sample
  DOMAIN (1)...(73): Mur ligase family, glutamate ligase domain
  misc_feature (1)..(139): Xaa is any amino acid
MDDYGHHPTAIKTTLEGLRGFYPTRRLVVSFMSHTYTRTAALLDEFAASLAGADVLFLHKIYASAREHFDGHINGKSIMEKIESLPAKKATVYYTDEPLDAFDKLKEILKPGDLFLTLGAGNNWPLGVKLFDHFKEVSR

SEQ ID NO: 48203 - DNA, 867 bp, Unknown
  Obtained from environmental sample
  misc_feature (1)..(867): n is a, c, g, or t
atgacaagcatgaccggctttgcctacaaggaatgggcaaatgaggacatttccatttccgtacagattaaggggtacaataaccgcttccttgaaattttcgtaaatacgccgccctggcttccccagttggagcagagggtgcgtgatattatcaacaacgtgtgcggcaggggaaaagttgaagtcaccatccgcgtaagggaaacaaacacccccatgaccgtttccgtgaatgtgaacgcggcaaacgcctatatgcaggcgatctccggccttgcgtcaagtcttggcatcaatgaaaaaatgagcctgccggcgttaatcagcatggaaggcgtgcttgatattgaaaagaaccgtgatgacgagcgctactgggcattgattgaacctgtcctgatagaggccggcgccgtttttcaggcggaacgaatcagggagggaaagcatacccaagaggacatccttgcttcaataagccgcattgaatctggcctgcaaacggttacggcccagctcccggctctggaatcttccattaaagagaatattaaaacgcgctttaaggaaatcgccggcagcgaaatcgacgagaaccggctcctcgccgagatcgccatactgcttatgaagtacactgtttccgaggaagtttcacggctttcttcccatcttgccgaattcagggcggagacggaaaaaaacgaccgcccagggaaaaaacttgattttctgtgtcaggaaattaaccgtgaaattaacacaatcggctcaaaaagcgctataatagaagtaactaatgaagttgtaaggatgaaagagacgctggaaaacatcagggagcagttgaggaatatcgagtaa

SEQ ID NO: 48204 - protein, 288 aa, Unknown
  Obtained from environmental sample
  DOMAIN (1)...(155): YicC-like family, N-terminal region
  misc_feature (1)..(288): Xaa is any amino acid
MTSMTGFAYKEWANEDISISVQIKGYNNRFLEIFVNTPPWLPQLEQRVRDIINNVCGRGKVEVTIRVRETNTPMTVSVNVNAANAYMQAISGLASSLGINEKMSLPALISMEGVLDIEKNRDDERYWALIEPVLIEAGAVFQAERIREGKHTQEDILASISRIESGLQTVTAQLPALESSIKENIKTRFKEIAGSEIDENRLLAEIAILLMKYTVSEEVSRLSSHLAEFRAETEKNDRPGKKLDFLCQEINREINTIGSKSAIIEVTNEVVRMKETLENIREQLRNIE

SEQ ID NO: 48205 - DNA, 534 bp, Unknown
  Obtained from environmental sample
  misc_feature (1)..(534): n is a, c, g, or t
gtgaatatgaaaaaagacattaaaatagcaatttcaggaaggagcggctgtggaaatacgacagtcagcaaaatggttgcggaaaaattaaatttacagtttatcaattttacattccgtactttggcaaaagaacgaaatgtagagttaaaagatatgcttgaacttgcggcaaaagatgattcacttgataaagaattagacgcgcggcaggtacagcttgcccaagaagccggcggttgcgtattaggttcgcgtcttgcgatttggatgttgaaagaagcggatttaaaagtctaccttgacgcaagtccgcaaacaagggcggcgcggattgtaaacagggaaggcggtactcttgaagaaatagccgcttttacagccagccgcgacaaacaggatcacggcaggtacttgcgcatttacggcattgataccgatgattatagttttgcggatttaattgttgataccgataatatcacgccggagaatattacggaaaagattatacaaataataaataacaaataa

SEQ ID NO: 48206 - protein, 177 aa, Unknown
  Obtained from environmental sample
  DOMAIN (15)...(175): Shikimate kinase
  misc_feature (1)..(177): Xaa is any amino acid
MNMKKDIKIAISGRSGCGNTTVSKMVAEKLNLQFINFTFRTLAKERNVELKDMLELAAKDDSLDKELDARQVQLAQEAGGCVLGSRLAIWMLKEADLKVYLDASPQTRAARIVNREGGTLEEIAAFTASRDKQDHGRYLRIYGIDTDDYSFADLIVDTDNITPENITEKIIQIINNK

SEQ ID NO: 48207 - DNA, 870 bp, Unknown
  Obtained from environmental sample
  misc_feature (1)..(870): n is a, c, g, or t
atggcgccgctcctcttctacacgggtagcgacggcgtccaagcgagggttttctcggtaggcacataccgtataaccgcggtgaaagagggctattttacctacacgaccaccgttaccgtatcgggccgcgctcgcgatacaactagcgtgaccataccaatgctgcgtccggaggctgccgtttccggtcgggtgctggcggcggcggacagctccgccgtaagcgccgctaaggttaaggccgtatcctcgtggggcgacactgtctcggcggttaccgacggccgcggcgactttatgttttattgccgtgcggcggactgggctataaccgtggaaaaaccgggttttcaggtctcttcccccagaagggtaaccttgaagttgggcgccgataccgctttgggcaacgtctatttggtcaagaatccttttgccctgtcgtccatatcgggcgtggtcaggaactcaagcgaccaaccggtcatgggggcgcgtgtgcgggttctgcgcgacggcgtccttgtggacgagctggcgtccacatctcatagcggcgcgtacgttttctatcttaacgccggaacctacacggttacggcggagaaacccggtttcgcgatgttcagcagagggggcgtcgcggtcgccggaacaacggtgcagaacattacgcttagggagggggccgtggtcgtcagcggcgccattatcggtaagagctgggtcgcgggcgtaaataattacagcgtagcccccattacttcggcgcgcattgcctttgcggacgttgccaggccggacactttcaatgttacgagcgacgccgttttcggcaagttctcagtgagcttgcccaagggatag

SEQ ID NO: 48208 - protein, 289 aa, Unknown
  Obtained from environmental sample
  misc_feature (1)..(289): Xaa is any amino acid
MAPLLFYTGSDGVQARVFSVGTYRITAVKEGYFTYTTTVTVSGRARDTTSVTIPMLRPEAAVSGRVLAAADSSAVSAAKVKAVSSWGDTVSAVTDGRGDFMFYCRAADWAITVEKPGFQVSSPRRVTLKLGADTALGNVYLVKNPFALSSISGVVRNSSDQPVMGARVRVLRDGVLVDELASTSHSGAYVFYLNAGTYTVTAEKPGFAMFSRGGVAVAGTTVQNITLREGAVVVSGAIIGKSWVAGVNNYSVAPITSARIAFADVARPDTFNVTSDAVFGKFSVSLPKG

SEQ ID NO: 48209 - DNA, 756 bp, Unknown
  Obtained from environmental sample
  misc_feature (1)..(756): n is a, c, g, or t
ttgaaagaaaagggagttaaacgctttgccctgcacaccatggtcgcttcaaacgaactttccgctccatatcatgttgaaaccgcaaggatgctttttgaacttgccgttgagataaacaaaaaagcggaagtgcgccttgaatttatcaatcttggcgggggagtgggaattccctacaagcccgaacagacggctgtagattataaatccttaaccgccgtcattaaaaaagcgtatgacgaaataataaaacccgccgggcttgaccctataaacatacgcacagagtggggcagggtagtaaccggcccttacggctggcttgtcgcgcgggcaattcataaaaaagaaatttaccgcaaatacataggccttgacgcatgcatggccgatttaatgcgccccgctctctacggcgcgtatcatcacataacgattcccggcaaggaaaccgaggcgctcaccgaagtttacgacgtggtgggcagcctttgcgaaaacaacgacaagttcgctattcagcgaagcctgccgaagatagaggttgccagcgagaacggaataggcgactttgtcgttatccacgacgcgggcgcccacggaagggcgatgggctttaactacaacggcaaactgcgctgcggggaactgctcctgcggcaggacggctctgtcgttcaaatccgccgcccggaaacgacagacgactattttgccacgctggatcttgccggagtaagggatttcagctaa

SEQ ID NO: 48210 - protein, 251 aa, Unknown
  Obtained from environmental sample
  DOMAIN (108)...(220): Pyridoxal-dependent decarboxylase, C-terminal sheet domain
  misc_feature (1)..(251): Xaa is any amino acid
MKEKGVKRFALHTMVASNELSAPYHVETARMLFELAVEINKKAEVRLEFINLGGGVGIPYKPEQTAVDYKSLTAVIKKAYDEIIKPAGLDPINIRTEWGRVVTGPYGWLVARAIHKKEIYRKYIGLDACMADLMRPALYGAYHHITIPGKETEALTEVYDVVGSLCENNDKFAIQRSLPKIEVASENGIGDFVVIHDAGAHGRAMGFNYNGKLRCGELLLRQDGSVVQIRRPETTDDYFATLDLAGVRDFS

SEQ ID NO: 48211 - DNA, 762 bp, Unknown
  Obtained from environmental sample
  misc_feature (1)..(762): n is a, c, g, or t
atgacagaatggccgagtttcttttgcaaagcgttcgcatggtcacgcagcattccgtttatcgccgtcgatcatatgctggcgcatttgtacgcccctcgtttaatttcttccgtagaatgcgaatacccttttttgggactccttgtttccggcggacatacaataatttgcagagccgataattttgacaatattacagtcctcggcacaacaatagacgatgccgtaggcgaagcgtttgataaagtagcgaagttttacaatttcggctatccgggaggagccgtcattgataaaatggcgcagaaaggggacagctccgtttttaattttcccatgccgtccttgcacaaaggcgatcatcgttatgacgtgtcgtactcaggattaaaaaacgccgtaataaatcagcttgacacattcaaaaagaaatccggcgcacacacaaacgaagacatagcagcttcttttcaaaaaaccgcagtccaaatactgttacgggcattgttaaacgccgccgaagataccggtattacaacaatagtcgcaggcggcggcgttgcggcgaacagttaccttcgcgcctgccttgcggagcaaaaaaaccttcgctgtattttccctccgcaggacttatgcggcgacaacgccgccatgatagcgggaattggctatcattaccttgcaagaggagaacattctgcgctgaatattaccgcaagcgcaagagtgacggggtttaagaaaaagtatccgtaa

SEQ ID NO: 48212 - protein, 253 aa, Unknown
  Obtained from environmental sample
  DOMAIN (6)...(223): Glycoprotease family
  misc_feature (1)..(253): Xaa is any amino acid
MTEWPSFFCKAFAWSRSIPFIAVDHMLAHLYAPRLISSVECEYPFLGLLVSGGHTIICRADNFDNITVLGTTIDDAVGEAFDKVAKFYNFGYPGGAVIDKMAQKGDSSVFNFPMPSLHKGDHRYDVSYSGLKNAVINQLDTFKKKSGAHTNEDIAASFQKTAVQILLRALLNAAEDTGITTIVAGGGVAANSYLRACLAEQKNLRCIFPPQDLCGDNAAMIAGIGYHYLARGEHSALNITASARVTGFKKKYP

SEQ ID NO: 48213 - DNA, 750 bp, Unknown
  Obtained from environmental sample
  misc_feature (1)..(750): n is a, c, g, or t
atggtagccaatgtcggctctgtaactcaaacgttgattaagaacgctgataatgtaaactcgctgaaagaagcctcggaagtgggacgcgagggattggaggaagtagcgaaggatattaaggagatcgcccttgaatccgaaggcttaatgaaaatcaactcggtaatgaaaaacatagccagccagaccaatctgctttcgatgaacgctgcgatagaagcggctcacgccggagaagccggcaagggtttcgccgttgtcgccgacgaaatacgcaaactggctgaagattccagcgcacagtcccaaacgatcggttccgtacttaaaaagataaaagaggctatcgacaaaataaccgaatccacaacaaacgtgcttaacaagtttgaagctattgactcaaacgtcaatacggtagcggaacaagaaggtaatatccgcaacgcaatggaagaacaaggcgagggaagcaagcagatacttgacggcgtaagtaatgtaaacgaaatcaccactcaggttaaaggcagcagcgaagaaatgcttgaaggcagtaaagaagtaataaatgaaagccacaaccttgaaattgtaacgcaggaaatagccggtggtatgaacgaaatggcgtcaggcgcagatcagataaatgtagcagtatcccatgtcaacgagatatgcataaagaaccgtgaaaacattgaaagcttattaaacgaggtttcacgatttaaagtagcttga

SEQ ID NO: 48214 - protein, 249 aa, Unknown
  Obtained from environmental sample
  DOMAIN (2)...(214): Methyl-accepting chemotaxis protein (MCP) signaling domain
  misc_feature (1)..(249): Xaa is any amino acid
MVANVGSVTQTLIKNADNVNSLKEASEVGREGLEEVAKDIKEIALESEGLMKINSVMKNIASQTNLLSMNAAIEAAHAGEAGKGFAVVADEIRKLAEDSSAQSQTIGSVLKKIKEAIDKITESTTNVLNKFEAIDSNVNTVAEQEGNIRNAMEEQGEGSKQILDGVSNVNEITTQVKGSSEEMLEGSKEVINESHNLEIVTQEIAGGMNEMASGADQINVAVSHVNEICIKNRENIESLLNEVSRFKVA

SEQ ID NO: 48215 - DNA, 999 bp, Unknown
  Obtained from environmental sample
  misc_feature (1)..(999): n is a, c, g, or t
ttggagaaacccatgaacagacaattctggtgctttatcccagcggtcgcgctgtcgctctcaaccgcttttgcaagcggtgccccgcaggagaagcaggacgaccaagccgccgcaaagatacaggacaagctatccgccaagcctggcaagccaagcgatgcaacgttgcctgccgtgcaaaagccagccgtgcagaagctggttgtcggcaaagaggtcacaccagccgttgttgacgatggcaagaagttcactggaaccttgacgaccgcgaaactggtggcacccgcggccgtgaagcccgcgacgttctccgccggcgggtcccactccttgggcatcaaggcggacggcaccctctgggcttgggggcagaacaacctgggccagctcggcgacggcaccaaaaccgaccgcaaatcccccgtccaagtgggcaaggacaaggactgggcggcggtggctaccggcgacctctactcgatggccatcaagagcgacggcagcctctgggcatgggggagcaacatgtttggccagcacggcggcggcgcgagcggcgaacacaaaccctcccccgtccaggtgggcaaggacaaggactgggcagcggtgtcggtcagcaacgtccatgtggtggcgatcaagaccgacggcagcctctgggcgtggggctacaacggcagcggtcagctcggcaacggcggctcaagcagtaacacccccacacgcgtgggcacggacgccaactgggtgaccgtgtatgctggcggcaaccacaccctcgccatcaggacggacggcagcctctgggcgtggggcagcaatggcagcggtcagctcggcctcggcgacaccaacagcaggaacacacccacacgcgtgggcgcggacgccaactgggcgaccgcgcctcctgtggatgccgccgaatacgcggcacccattggcagcgacggtcatgcttgggcttgggaagcggcagaggagcagtga

SEQ ID NO: 48216 - protein, 332 aa, Unknown
  Obtained from environmental sample
  SIGNAL (1)...(25)
  DOMAIN (219)...(265): Regulator of chromosome condensation (RCC1)
  misc_feature (1)..(332): Xaa is any amino acid
MEKPMNRQFWCFIPAVALSLSTAFASGAPQEKQDDQAAAKIQDKLSAKPGKPSDATLPAVQKPAVQKLVVGKEVTPAVVDDGKKFTGTLTTAKLVAPAAVKPATFSAGGSHSLGIKADGTLWAWGQNNLGQLGDGTKTDRKSPVQVGKDKDWAAVATGDLYSMAIKSDGSLWAWGSNMFGQHGGGASGEHKPSPVQVGKDKDWAAVSVSNVHVVAIKTDGSLWAWGYNGSGQLGNGGSSSNTPTRVGTDANWVTVYAGGNHTLAIRTDGSLWAWGSNGSGQLGLGDTNSRNTPTRVGADANWATAPPVDAAEYAAPIGSDGHAWAWEAAEEQ

SEQ ID NO: 48217 - DNA, 417 bp, Unknown
  Obtained from environmental sample
  misc_feature (1)..(417): n is a, c, g, or t
atgcgaagagacgaactgctgaaatatcttgagatattgggccaagaacttgagacgtccggtttgcgcggcgaaatcatcatcaccggcggtgcggcgatgtgcctcgtgcactcggcccgcgacgcgacgaaagatatcgacgcgctgtatgagccgaagagcgaaatacacgcactggcggagaaaatcgcgattgagcacggcctgccgcanaactggctcaacgacggcgtcaagggatttatgggcggcaacgtggaagtcatggaattcatgcgaaccggcggcctgaaaatatccgccgtaacgcccgagtacctgctttgcatgaaattgatgtcgtcgagggtggaaggtcaggactacggcgacataaatttcttgctacgcaaactcaacatccgcaccttttga

SEQ ID NO: 48218 - protein, 138 aa, Unknown
  Obtained from environmental sample
  misc_feature (1)..(138): Xaa is any amino acid
MRRDELLKYLEILGQELETSGLRGEIIITGGAAMCLVHSARDATKDIDALYEPKSEIHALAEKIAIEHGLPXNWLNDGVKGFMGGNVEVMEFMRTGGLKISAVTPEYLLCMKLMSSRVEGQDYGDINFLLRKLNIRTF

SEQ ID NO: 48219 - DNA, 756 bp, Unknown
  Obtained from environmental sample
  misc_feature (1)..(756): n is a, c, g, or t
atgatcagatcggccgagccgccagaaccccgtgccggaatccccttggagcggaacatccgcaaaacggcgggatcgcccatagagttgtttatgataaacaactccgaggggaagaacgggctggcctccgtctacaacttcggcgcggcgcggtcgcgcggcgagatcttggtcttcatgcacgacgacgctttcttcatgacggagggctgggggccgatattggagtctctcttcgcccaagacccgtacttggggatcgcgggtgtggccggtacgcaatacatattccgcgacaactgttcgtggacggcggcgggcagaccgttcataaaaggccgcatcgtccacgacctgcaaaacggcgacttcttcgccacgctcttctcgccggatagggagagttgcgaagtcgtggcgtgcaacggggtcttcttcgcggtcaggcggacgctcctcacgcagttcgggttcgacgagcagaccttcgactcgttctacttccacgagatggacttctgtatgcaagcgcgtaaaaaatggcgcgtcatggtgacggcggacattctggtaaagcaccgctccatggggacttacgataaaacttggcagaaatacggccagctgttcctaaacaagtgggcggccgacctgccggccagctgcgccaacaccgtccccgaccccgccaacagcatcccggcggcaaaagcgagcttgaagggcaagttggaccaaaggactatagcgtga

SEQ ID NO: 48220 - protein, 251 aa, Unknown
  Obtained from environmental sample
  misc_feature (1)..(251): Xaa is any amino acid
MIRSAEPPEPRAGIPLERNIRKTAGSPIELFMINNSEGKNGLASVYNFGAARSRGEILVFMHDDAFFMTEGWGPILESLFAQDPYLGIAGVAGTQYIFRDNCSWTAAGRPFIKGRIVHDLQNGDFFATLFSPDRESCEVVACNGVFFAVRRTLLTQFGFDEQTFDSFYFHEMDFCMQARKKWRVMVTADILVKHRSMGTYDKTWQKYGQLFLNKWAADLPASCANTVPDPANSIPAAKASLKGKLDQRTIA

SEQ ID NO: 48221 - DNA, 540 bp, Unknown
  Obtained from environmental sample
  misc_feature (1)..(540): n is a, c, g, or t
atggccccccatctcgaaccagaccataatcagcgcaaaggtaaagataattgggacgccaacggataccgcttgcccactgaggccgagtgggaatacgcggcaaggggcggaaaaggctcccccggaaacttcgactgggcaggaagcaataccgcgtcggaagtggcatggtacggaggcacgggcggaaccgtcactgatcgcgtaacgcatccggttggcttgttaaagcccactatcctgcggacttttgacatgagcggaaatctgtgcgagtggtgctgggatgaattcgcttcggggtactatacaacaagcagcccgtccattacggatccaaaaggcccggatagttcactcacggtggttattagtaatccgggtcaggacacgccccgtgtccgtcgtggaggaagctggaaccacggggtaaataacacacgtaccttcatccgcgactccttccagcccactgatactaacatgacgaatttctggactataggcttccgtgttgtccgcggccccttacaataa

SEQ ID NO: 48222 - protein, 179 aa, Unknown
  Obtained from environmental sample
  DOMAIN (1)...(175): Domain of unknown function (DUF323)
  misc_feature (1)..(179): Xaa is any amino acid
MAPHLEPDHNQRKGKDNWDANGYRLPTEAEWEYAARGGKGSPGNFDWAGSNTASEVAWYGGTGGTVTDRVTHPVGLLKPTILRTFDMSGNLCEWCWDEFASGYYTTSSPSITDPKGPDSSLTVVISNPGQDTPRVRRGGSWNHGVNNTRTFIRDSFQPTDTNMTNFWTIGFRVVRGPLQ

SEQ ID NO: 48223 - DNA, 996 bp, Unknown
  Obtained from environmental sample
  misc_feature (1)..(996): n is a, c, g, or t
ttgggcactgccatgaggcagaacggttattccttccagggatggtatacggaagatcaatcacaatggaatttttcaacgggtacggtaacgcaagatatgaccctgcacgccgaatggagcataatctactacaccgtggtattcaacatggggatcataaacccggtttcgagtaatctgaacgtcatctatggcggcgggaacctgaagccggaaccccaaagcatagcctacggcggaaaaattattgaaccgacggacatgggcagaactgatatgacggttacggacggttacggctttgacggctggtggttattggatttaagcgatcctacggaatggaattttgaagacacggtgggatcggcatatacgacgtcgggcacgacaaatatcaatctgtaccccaggtggataaaagatcaaaaataccttgagtataaaacggaaaagggaaaccttgtctgggtaaggaaaggaagtttcacgatgggaaaccagtccgtctcaggctcgcgccccgaacatcaggttatattaacccagggctttttcatgggaatgtaccagattacgcgggaacagtatatagcggtaatgggttatgatcccaattccaataaagataaggattatcttccggcgaacagggtaacatggttagacgcaatcatgttctgcaacaaactgaccgacatggaaaacagcgtaaaaggcaccagcctgcaaaaggtttataccattgacgaaagcagcatagtgctgtccgatggcagcaaatggccccccatctcgaaccagaccataatcagcgcaaaggtaaagataattgggacgccaacggataccgcttgcccactgaggccgagtgggaatacgcggcaaggggcggaaaaggctcccccggaaacttcgactgggcaggaagcaataccgcgtcggaagtggcatggtacggaggcacgggcggaaccgtcactgatcgcgtaa

SEQ ID NO: 48224 - protein, 331 aa, Unknown
  Obtained from environmental sample
  misc_feature (1)..(331): Xaa is any amino acid
MGTAMRQNGYSFQGWYTEDQSQWNFSTGTVTQDMTLHAEWSIIYYTVVFNMGIINPVSSNLNVIYGGGNLKPEPQSIAYGGKIIEPTDMGRTDMTVTDGYGFDGWWLLDLSDPTEWNFEDTVGSAYTTSGTTNINLYPRWIKDQKYLEYKTEKGNLVWVRKGSFTMGNQSVSGSRPEHQVILTQGFFMGMYQITREQYIAVMGYDPNSNKDKDYLPANRVTWLDAIMFCNKLTDMENSVKGTSLQKVYTIDESSIVLSDGSKWPPISNQTIISAKVKIIGTPTDTACPLRPSGNTRQGAEKAPPETSTGQEAIPRRKWHGTEARAEPSLIA

SEQ ID NO: 48225 - DNA, 1326 bp, Unknown
  Obtained from environmental sample
  misc_feature (1)..(1326): n is a, c, g, or t
atggatttgcaggaattggactttacgataccaacattgggccccggccgccggccgtcgcccatcaacctatctaaccaccacggagacatgatcgcaaacttcgtgcgggacgacgagcttatagtctacgatacgagggccacgcccggcgccactattgagtacaagcgcaagcacctgattgagcgggccgggccgcgcgaattgatctttttcaaccccgacaaagtgcacgcggcgatcgtgacctgcggcgggctgtgcccggggctcaacgacgttatccgctcggtagtgctagcgctttggtaccaatacggcgtgcgccgcatatccggcgtgcggttcgggtacaggggtttcctgccggagtacgaacacccgttcatggtgctccagccggagaccgtctcgaacattcaccgcttaggcggcacggtgctcggctcctccaggggaaatggcgagcgcaccgcggacatagtcgaccgtatagagatggagggcataaacctgctgttcacgataggcggcgacgggacgcagcgcggcaccctccgcatagcccaggaggttgagaagcgcgggctcaacgtggcggttgttggcgttccaaagacgattgataacgacctgagctttatagagaagtccttcggcttcgagaccgccgtttccgaggcggttcaggcggtcgccgacgcgcacattgaggcggaaaacgccgtaaacggcatcggcctggttaagttgatgggcagggaggccggtttcatcaccgcgtccacggcgataagctcgcgtgacgccaacttcgtcctcgtccccgaactgcagttcgatcttgagggtgaaaacggttttctggcgcaccttgagaggcgtttggccaaacgcggccacgcgctcatcatagtggcggagggcgccgggcaagagcacctttcgggcacaggggaatccgacgcctccggcaacaaaaggttcggcgacatcggccacttcctcaaggactgtatcactaagtacttcaaggagaagaagatcgagatcaatttgaagtacatagaccccagctatatgatccgctcccgggtgtccaacgcgatagactccatctattgcgcgcgcttgggcaccaacgccgtacacgcggcgatggcgggaaagacgaaaatgctggtgagcaatatcaatgacacattcgtgcacatcccgacggagcttgccgttgcaaggcgcaactgcataaatccggagagcgatctgtggagggacgtgatagaggccacagggcagccgcacctgatgatcaataggtag

SEQ ID NO: 48226 - protein, 441 aa, Unknown
  Obtained from environmental sample
  DOMAIN (81)...(389): Phosphofructokinase
  misc_feature (1)..(441): Xaa is any amino acid
MDLQELDFTIPTLGPGRRPSPINLSNHHGDMIANFVRDDELIVYDTRATPGATIEYKRKHLIERAGPRELIFFNPDKVHAAIVTCGGLCPGLNDVIRSVVLALWYQYGVRRISGVRFGYRGFLPEYEHPFMVLQPETVSNIHRLGGTVLGSSRGNGERTADIVDRIEMEGINLLFTIGGDGTQRGTLRIAQEVEKRGLNVAVVGVPKTIDNDLSFIEKSFGFETAVSEAVQAVADAHIEAENAVNGIGLVKLMGREAGFITASTAISSRDANFVLVPELQFDLEGENGFLAHLERRLAKRGHALIIVAEGAGQEHLSGTGESDASGNKRFGDIGHFLKDCITKYFKEKKIEINLKYIDPSYMIRSRVSNAIDSIYCARLGTNAVHAAMAGKTKMLVSNINDTFVHIPTELAVARRNCINPESDLWRDVIEATGQPHLMINR

SEQ ID NO: 48227 - DNA, 1881 bp, Unknown
  Obtained from environmental sample
  misc_feature (1)..(1881): n is a, c, g, or t
ttgaataatttaaataataaacagccgggagcgcccaaacaaaccggaagaccaagcggtatcgcttttggttttttccttataatggcaggactctttgtcgtatttttcttaaaaggaaattctgttccgatacgcgaaataccgtattctgattttacccgctttttggaacaggatcagattgaatccgttaccattcacgataacaatacaatagatatttttttggtagattcaactaacggcacgccccagcttaagacgcgtattccgtattccgatccgaagcttttatcaagtttgcaggaaaagaatataaatatttccggcgtaaccgcaaaaccaagtctttggaatttgttggtggatatgcttccctggattatcggtttcagcttgataatatttatgttaaggaatatgcagggaatgggaaacaaaactttccagttcggaaagagcagggctaaacgttaccatgacgaaggaaaaaagatcagcttttcagacgttgcggggcagaaagacgcaaagttcgaacttgaagaggtagtagagtttttaaagaacccgcagaagtttacgaaaatgggagcgcgtatcccaaagggcgtacttcttgtaggaatgcccggcacaggcaaaactttgatggcgcgttccgttgcaggcgaagcgggcgtcgctttttttcatatgtccggctccgattttgtagaaatgtttgttggcgttggggcaagccgcgtaagagacctttttgaacagggaaggaaaagcgctccctgcataatatttattgatgagttggacgctgtagggcggacgcgcggcgcaggctacggcggcggacatgacgagcgcgaacaaactttaaaccagcttcttgtggaaatggacggttttgattcaaaagacggcgtaataatccttgccgccacaaaccgccccgatgttttagaccccgcgcttctgcgtcccggtcgcttcgacaggcaggtggtcgtcgcaatgcctgacataaaggaacgtgaggcgattttacagattcacgcggcaaagataccgcttgaaaaagaagtcgatcttacacgcattgcgagggcaacgcccggaatgagcggagcggatatcgccaaccttgtgaacgaagcggctctgtttgccgcccgcaaggacaaacctgaagtacaaatggcggattttgaagaagcaagggacaaggtgctaatgggtgtcgcccgtaaaactcttgtcatatcagataaagaacgcaggatgactgcaattcatgaagccggacatgccctgcttcattatttccctgaaaaacgcggaccctctgcacaaggtaacgattgttcctcacggcagagcgttgggtatggctcttccctgcccgaagaagacagttacagccggtcaaagggttggatagaagatagaatctctatctgttacggcggctggcttgcggaaaaacttttctttgaagaaaccacgacaggaaccaagaacgatattcaacaggctactgaaatggcgcgtaacatggtatgcgaatggggcatggctgaagaactcggtcctgtggcatatggtcaggaagatgagccgattttccttggaaaggaaattgcgagacacaaggattattctgaagacactgcgcagcgtatagataaggcggttaaggacattcttgcccgcgcaagggaaaccgccgccgctattatcagcagccataaaacagaacttgaaaatcttgcgaacgctttgcttgtacgagaaactttaatagacgatgaagttcgggaaattctcgggcttccgcagaaagaaagctctgtgtcattaaacaggggagaggcatcttaa

SEQ ID NO: 48228 - protein, 626 aa, Unknown
  Obtained from environmental sample
  DOMAIN (205)...(339): ATPase family associated with various cellular activities (AAA)
  misc_feature (1)..(626): Xaa is any amino acid
MNNLNNKQPGAPKQTGRPSGIAFGFFLIMAGLFVVFFLKGNSVPIREIPYSDFTRFLEQDQIESVTIHDNNTIDIFLVDSTNGTPQLKTRIPYSDPKLLSSLQEKNINISGVTAKPSLWNLLVDMLPWIIGFSLIIFMLRNMQGMGNKTFQFGKSRAKRYHDEGKKISFSDVAGQKDAKFELEEVVEFLKNPQKFTKMGARIPKGVLLVGMPGTGKTLMARSVAGEAGVAFFHMSGSDFVEMFVGVGASRVRDLFEQGRKSAPCIIFIDELDAVGRTRGAGYGGGHDEREQTLNQLLVEMDGFDSKDGVIILAATNRPDVLDPALLRPGRFDRQVVVAMPDIKEREAILQIHAAKIPLEKEVDLTRIARATPGMSGADIANLVNEAALFAARKDKPEVQMADFEEARDKVLMGVARKTLVISDKERRMTAIHEAGHALLHYFPEKRGPSAQGNDCSSRQSVGYGSSLPEEDSYSRSKGWIEDRISICYGGWLAEKLFFEETTTGTKNDIQQATEMARNMVCEWGMAEELGPVAYGQEDEPIFLGKEIARHKDYSEDTAQRIDKAVKDILARARETAAAIISSHKTELENLANALLVRETLIDDEVREILGLPQKESSVSLNRGEAS

SEQ ID NO: 48229 - DNA, 921 bp, Unknown
  Obtained from environmental sample
  misc_feature (1)..(921): n is a, c, g, or t
ttgatggccgagggccatttcaaggaaatcgttaccctaaaaaccataactgccaaagaagcggaggctgtccttgaagaattccgctctcttttatcgtctccctacggctactcaggctcgtcttccgggggaatagaacaggcgcgccgtctgctttacgcggcatttggtcatgaaaaaggcgaggccatgcttgtaaaagcagtccccgacgcaacggaaaacccttttgactttctttccgaattttccggcgatcagctttccgtgcttttcagggacgaaagccccgcagtctgcgcgatggtgttttcccgcctgccgtccaaactgtccgcagaggttctggcaaacgccagcgcggagcgaaaactggaaatcgtcaaacgcatagcaaagcttaaagagacatcgcctgaagtgatcgaaagggccgccgcggccataagggagaaggcgcgtcatcttgggcaaagcgccccggcagcgggcgaggcaatagacggtaaggggctgcttacagccatactaaagcactccgacattgcctttagcggccggcttttggaagggcttgaagcaagtgacccttctctcggcagggaaatgaaagatcgcctctattccctggaagatgtggcgaatgcagcagaccgacccattcaggaaaaactaagaaccatggacgaccgggatatagccttgctcctaaaaggacgttcggaagcgtttatccaaaaaataacgtggaacctttcttcgggcagggcagacaggatcagggaagaatcggagataatgggggctgtgccaaaaatcgaggtagaagccgtggcaagggaatttctttcctggttccgccaaagcatagacgaaggccgtattttaatgctcaccgancaggacgtattggtatga

SEQ ID NO: 48230 - protein, 306 aa, Unknown
  Obtained from environmental sample
  DOMAIN (190)...(299): FliG C-terminal domain
  misc_feature (1)..(306): Xaa is any amino acid
MMAEGHFKEIVTLKTITAKEAEAVLEEFRSLLSSPYGYSGSSSGGIEQARRLLYAAFGHEKGEAMLVKAVPDATENPFDFLSEFSGDQLSVLFRDESPAVCAMVFSRLPSKLSAEVLANASAERKLEIVKRIAKLKETSPEVIERAAAAIREKARHLGQSAPAAGEAIDGKGLLTAILKHSDIAFSGRLLEGLEASDPSLGREMKDRLYSLEDVANAADRPIQEKLRTMDDRDIALLLKGRSEAFIQKITWNLSSGRADRIREESEIMGAVPKIEVEAVAREFLSWFRQSIDEGRILMLTXQDVLV

SEQ ID NO: 48231 - DNA, 1398 bp, Unknown
  Obtained from environmental sample
  misc_feature (1)..(1398): n is a, c, g, or t
atgtctgtttacggcgacgcggtttttcggcccctgctttccgaatggacttttatgcaggaagggcaccacctgtattactctccggacaggaagctcggtataagcggagttgtctataacgagatgaagggagcctattcgtcgctggattcctatgccggcttttggtcggttaagtccgtactgcccggcactccttacgaatttgattcaggcggcgatcccgaatgtattcccgatctcacctggcaggatctgaaaaactttcaccgcgcctggtactcgccggcaaactgccggatttttctcgcaggaaatattcccacagaaaagcagcttgagtttttgaatgaaaaattcttttcttctattccggcagggaaaaaaaacgcgcccatcccaaaaacaaaacgctggcaaagccccagatcctataaagtaccctgcccgncgggatccgagcaaaagcccaccgtactgctttcatggctctgcggtgatgtaaatgacacggtagaaaccctgcccctttccgcgctgtcggagatccttntggggcacgacgattcccnccttacaagggcgataattgactccgctctcggcgaagacctctcgccggtttccggctttgaaaaggaactcagggaaacatcattttgcgccggagttcgcggacttaacttggatgatccgagccttcccgtagaggaagccgcaaaaaaagtcgaagccttcatcacaggagagctggaacgccttgaaaaagaaggcatcccaaaagaagaaattgaagctgcgcttttggggatggaattttcaatcagggaaatacgccgctcaggagggccattctccctggtttggatgaaccgctcccttagggcatggctccacggcggaaacccctgggacagcctgctttttgcttcccctctctcagaactaaaacagcgcattaaaaaagacgaccgctattttgagaaaatgatccgccgctatttattggaaaacgcgcaccgggcgtttgttatcattgagcctgaagaaaattttttggaagaaaaagaagccgccctgtctgcccgccttgaagaaacaaaaaagtctatggggagcaagggaaaaaaagccattcgatcgaaaatggctgaattaaaaaaagcacaggaaaaagaggacgagcatggggcgctggcggctatcccccacctttcacgaagcgacctttcaccggaaattgagtctgtaaaaagaggtatacgcagatctttcaggcgcgcctgctctattccacccgatttttaccaacggaatcagctatgcggatctggctttccccctcgacctattccatcccgaagatatcttggtctcggccgatctgatccttga

SEQ ID NO: 48232 - protein, 465 aa, Unknown
  Obtained from environmental sample
  DOMAIN (81)...(272): Peptidase M16 inactive domain
  misc_feature (1)..(465): Xaa is any amino acid
MSVYGDAVFRPLLSEWTFMQEGHHLYYSPDRKLGISGVVYNEMKGAYSSLDSYAGFWSVKSVLPGTPYEFDSGGDPECIPDLTWQDLKNFHRAWYSPANCRIFLAGNIPTEKQLEFLNEKFFSSIPAGKKNAPIPKTKRWQSPRSYKVPCPXGSEQKPTVLLSWLCGDVNDTVETLPLSALSEILXGHDDSXLTRAIIDSALGEDLSPVSGFEKELRETSFCAGVRGLNLDDPSLPVEEAAKKVEAFITGELERLEKEGIPKEEIEAALLGMEFSIREIRRSGGPFSLVWMNRSLRAWLHGGNPWDSLLFASPLSELKQRIKKDDRYFEKMIRRYLLENAHRAFVIIEPEENFLEEKEAALSARLEETKKSMGSKGKKAIRSKMAELKKAQEKEDEHGALAAIPHLSRSDLSPEIESVKRGIRRSFRRACSIPPDFYQRNQLCGSGFPPRPIPSRRYLGLGRSDP

SEQ ID NO: 48233 - DNA, 531 bp, Unknown
  Obtained from environmental sample
  misc_feature (1)..(531): n is a, c, g, or t
atgatgcatggcgatatccgcattgagtcggaattgggaaagggagccacatttatagttacaataaaagcggagacgaaaaagcaggtcgcggtattggctcaatcaaattcagatacggaatccgcggtttcaacagagggcttaaaaggtaaacagatactgctggtcgaagatgtggaaattaaccgggagattgtcattgccctgcttgaagattttgagatggaaattacggaagcgggagacggacagcaggcgtttgatatattcgccgcagccccggaaaaatttgacttgatttttatggatatccatatgcccggcatggacggctatgaatcgacaaaattgattcgcgcccttgataatcccagggcaaaaaccgttccgataatcgccatgacagcaaatgtgttcaaggaggatgttgaacactgcctggcagcgggaatgaacgaccaccttgggaaaccgctggatttaaacgatatgattaatattctaaacaagtacctggggaaaagctga

SEQ ID NO: 48234 - protein, 176 aa, Unknown
  Obtained from environmental sample
  DOMAIN (52)...(170): Response regulator receiver domain
  misc_feature (1)..(176): Xaa is any amino acid
MMHGDIRIESELGKGATFIVTIKAETKKQVAVLAQSNSDTESAVSTEGLKGKQILLVEDVEINREIVIALLEDFEMEITEAGDGQQAFDIFAAAPEKFDLIFMDIHMPGMDGYESTKLIRALDNPRAKTVPIIAMTANVFKEDVEHCLAAGMNDHLGKPLDLNDMINILNKYLGKS

SEQ ID NO: 48235 - DNA, 348 bp, Unknown
  Obtained from environmental sample
  misc_feature (1)..(348): n is a, c, g, or t
atgggcgcaaaaacctttccgttatcaaaagcacagctcgaaaaattggcactgcagtacaacactccgttctacctttacgacgaggaagncatacgcanaaacgcccgccggataaggcggcgttttcggttttgcccggctacaaggaacattttgccgttaaagcgctgcccaatccgtatatcctcaagatactcgccgccgaaggttttggagccgactgttccagccgcgcggaactgttgctggcacagatggcgggtatcgtcggcgaagacatcatgttctcttccaatgagaccccggcgagcgaatacgagttggcccggcagcttggcgcggtga

SEQ ID NO: 48236 - protein, 115 aa, Unknown
  Obtained from environmental sample
  misc_feature (1)..(115): Xaa is any amino acid
MGAKTFPLSKAQLEKLALQYNTPFYLYDEEXIRXNARRIRRRFRFCPATRNILPLKRCPIRISSRYSPPKVLEPTVPAARNCCWHRWRVSSAKTSCSLPMRPRRANTSWPGSLAR

SEQ ID NO: 48237 - DNA, 1161 bp, Unknown
  Obtained from environmental sample
  misc_feature (1)..(1161): n is a, c, g, or t
ttgcccggctacaaggaacattttgccgttaaagcgctgcccaatccgtatatcctcaagatactcgccgccgaaggttttggagccgactgttccagccgcgcggaactgttgctggcacagatggcgggtatcgtcggcgaagacatcatgttctcttccaatgagaccccggcgagcgaatacgagttggcccggcagcttggcgcggtgatcaacctggacgacattacccacattgaatttctggaaagaaccgccgtcttctttggaaggcgaggactgccggaactggtatcgctgcggtataaccccggccccatcaaggaaggcaacgccatcatcggcaagccggaggaggcgaagtacggtcttacctgcgaacagattatccggggttttgcaatgctgaaagaaaaaggcgtgaaacgctttgccctgcatactatggtagcgtctaacgaactttctgttccctaccacgctgaaaccgcccgtatgctgtttgaacttgccgttgatgtgtatgccaaaaccggtgtaaagtttgaatttataaacctcggcggcggcgtggggattccctatcggtcggatcaggaggcggtgactattcaggttttggcagaggggatacggcaggcgcatgacgaaatcatgaaaccggcgggcctcggcgaaacgggtatccgcaccgaatggggaaggacggtaaccggcccccacggctggctggtggcacgggcgattcacaagaaggaaatataccggaattatatcggactggatgcctgcatggccgatctgatgcgtcccgcgctgtacggcgcttaccaccacatcactgtcctgggtaaagagaacgccccccacgacaaaacttacgacatcgtgggcagcctttgcgaaaacaacgacaaatttgccttccagcgaaaaatgcccgaaatcgccgtagctgctgaaggtgtcggagactttgtgataatccacgatgccggcgcacacgggcgggcgatgggtttcaactacaacggtaagctccgctgcggggaacttttgctgcggcctgacggttcaatcaagcagattcgcagggccgaaaccgtggaagattattttgctacactggacttaattgcattaagggaatttagctag

SEQ ID NO: 48238 - protein, 386 aa, Unknown
  Obtained from environmental sample
  DOMAIN (1)...(241): Pyridoxal-dependent decarboxylase, pyridoxal binding domain
  misc_feature (1)..(386): Xaa is any amino acid
MPGYKEHFAVKALPNPYILKILAAEGFGADCSSRAELLLAQMAGIVGEDIMFSSNETPASEYELARQLGAVINLDDITHIEFLERTAVFFGRRGLPELVSLRYNPGPIKEGNAIIGKPEEAKYGLTCEQIIRGFAMLKEKGVKRFALHTMVASNELSVPYHAETARMLFELAVDVYAKTGVKFEFINLGGGVGIPYRSDQEAVTIQVLAEGIRQAHDEIMKPAGLGETGIRTEWGRTVTGPHGWLVARAIHKKEIYRNYIGLDACMADLMRPALYGAYHHITVLGKENAPHDKTYDIVGSLCENNDKFAFQRKMPEIAVAAEGVGDFVIIHDAGAHGRAMGFNYNGKLRCGELLLRPDGSIKQIRRAETVEDYFATLDLIALREFS

SEQ ID NO: 48239 - DNA, 534 bp, Unknown
  Obtained from environmental sample
  misc_feature (1)..(534): n is a, c, g, or t
atggccgagagagcccgaccttgtggtttccggcataaacgacggcgacacaccgggcttgccgcgttctactccggcacggtctccgccgcgcgtgagggcgcgttttacgggataccgagtttcgcgttttccatgttcaacaggaacagcccgttcatgccgctttacgcggagatggcgcccatgctgatagacgagatcctgaacgcgccgcacccgccgctcgatatgcgtttgttttataatataaactttccggcgtgcgatccggcgcactcgaaggggttcaaggttacgtggcagagcatggccaattacgaggatgagtatcgaaggatagaggacaaggcccacccctctcacggcggctacaatgtatacggggataggatggcgatagaggagtccgacgcctttgattcccgagcggtaatgaacggatatatcgcggtaacaccgcttaactacgactccacggcccattggatggtgccgtttttgcggcagaggatagaggagggtaaggaataa

SEQ ID NO: 48240 - protein, 177 aa, Unknown
  Obtained from environmental sample
  SIGNAL (1)...(30)
  DOMAIN (2)...(109): Survival protein SurE
  misc_feature (1)..(177): Xaa is any amino acid
MAERARPCGFRHKRRRHTGLAAFYSGTVSAAREGAFYGIPSFAFSMFNRNSPFMPLYAEMAPMLIDEILNAPHPPLDMRLFYNINFPACDPAHSKGFKVTWQSMANYEDEYRRIEDKAHPSHGGYNVYGDRMAIEESDAFDSRAVMNGYIAVTPLNYDSTAHWMVPFLRQRIEEGKE

SEQ ID NO: 48241 - DNA, 1356 bp, Unknown
  Obtained from environmental sample
  misc_feature (1)..(1356): n is a, c, g, or t
atgagcgagattacaacaccgggtaccccgtcggagaaaattttgccggtctttattgaagacgagatgcagaagtcgtatctcgactactccatgagcatgataacctcgcgcgccctgccggacgtgcgggacggtctgaagcctgtgcaccgccgcgtcatgttcggcatggaggaactcagtttacagcacaacaaaccgcccaagaagtgcgcgcgcgtcgtgggcgacgtcataggtaagtaccacccgcacggcgacagctcggtctacttcgcgttagtgcgcatggcgcaggatttctctatgcgctacccgatggtcaacgggcagggaaacttcngttccgtagacggcgacccgccggctgccatgaggtatacggagtgccgcatgaccgcttttgcggaggagatgctcgccgatctcgacaaagacaccgtggacttcgcccccaattacgacgacagtttgaaagagccgactgtgctcccgtcgaaactgccgttcctcttgctgaacgggacatccggtatcgcggtgggtatggcgaccaatatggctccgcataacctacgagaaatcgctaccggtttgattatgatgattgataatccggacgttactgtcgatgaattgataagcgttatccccggccccgacttccctacgggcggggtggtgttcgggcgcagcggcatctacgcggcctacaggagcggcaaaggcaagatgattgtgcgcggccgcgccgaggtgattaaaaaggcgaatgaccgtgaggagattatcattactgaaattccctatcagataaataagagcgtcctctaccagaggatatgcgatttggcgcgtaacaagattatagagggcatctcctttacacgggacgagtcggacaggcggggaatgcgtatcgtcataggcataaagaaagacgatttcggcgaagcggtgctcaacaaactctacaagttcaccgatttgcagacgacgttcggtataataaatctcgctcttgtcaacaaacgtccgcagatactcagccttaaggagttgatgggccacttcttagatcaccgccataatgtcgtggtgcgcagaacacagtttgacctgaaaaaggcgcaagaccgcgcccacatcctcgcggggttacgcattgcgctcgaccacatcgacgagatcgtggcgttgatccgcgcctcgtcaacaacggaagaagccaatgaaaaattgatgcagcgcttcgggttaagcgagatacaggcaaaggccatcaccgacatgaggttgaagcagctcacgggattggagcgtgagaagatcgagcaggagtatcaagaatag

SEQ ID NO: 48242 - protein, 451 aa, Unknown
  Obtained from environmental sample
  DOMAIN (38)...(451): DNA gyrase/topoisomerase IV, subunit A
  misc_feature (1)..(451): Xaa is any amino acid
MSEITTPGTPSEKILPVFIEDEMQKSYLDYSMSMITSRALPDVRDGLKPVHRRVMFGMEELSLQHNKPPKKCARVVGDVIGKYHPHGDSSVYFALVRMAQDFSMRYPMVNGQGNFXSVDGDPPAAMRYTECRMTAFAEEMLADLDKDTVDFAPNYDDSLKEPTVLPSKLPFLLLNGTSGIAVGMATNMAPHNLREIATGLIMMIDNPDVTVDELISVIPGPDFPTGGVVFGRSGIYAAYRSGKGKMIVRGRAEVIKKANDREEIIITEIPYQINKSVLYQRICDLARNKIIEGISFTRDESDRRGMRIVIGIKKDDFGEAVLNKLYKFTDLQTTFGIINLALVNKRPQILSLKELMGHFLDHRHNVVVRRTQFDLKKAQDRAHILAGLRIALDHIDEIVALIRASSTTEEANEKLMQRFGLSEIQAKAITDMRLKQLTGLEREKIEQEYQE

SEQ ID NO: 48243 - DNA, 498 bp, Unknown
  Obtained from environmental sample
  misc_feature (1)..(498): n is a, c, g, or t
gtggcccatcaactccttaaggctgagtatctgcggacgtttgttgacaagagcgagatttattataccgaacgtcgtctgcaaatcggtgaacttgtagagtttgttgagcaccgcttcgccgaaatcgtctttctttatgcctatgacgatacgcattccccgcctgtccgactcgtcccgtgtaaaggagatgccctctataatcttgttacgcgccaaatcgcatatcctctggtagaggacgctcttatttatctgatagggaatttcagtaatgataatctcctcacggtcattcgcctttttaatcacctcggcgcggccgcgcacaatcatcttgcctttgccgctcctgtaggccgcgtagatgccgctgcgcccgaacaccaccccgcccgtagggaagtcggggccggggataacgcttatcaattcatcgacagtaacgtccggattatcaatcatcataatcaaaccggtagcgatttctcgtag

SEQ ID NO: 48244 - protein, 165 aa, Unknown
  Obtained from environmental sample
  misc_feature (1)..(165): Xaa is any amino acid
MAHQLLKAEYLRTFVDKSEIYYTERRLQIGELVEFVEHRFAEIVFLYAYDDTHSPPVRLVPCKGDALYNLVTRQIAYPLVEDALIYLIGNFSNDNLLTVIRLFNHLGAAAHNHLAFAAPVGRVDAAAPEHHPARREVGAGDNAYQFIDSNVRIINHHNQTGSDFS

SEQ ID NO: 48245 - DNA, 888 bp, Unknown
  Obtained from environmental sample
  misc_feature (1)..(888): n is a, c, g, or t
atggcccatcaactctttaaggctgaggatctgcggacgcatattgacaagcgcgagatttattatacagaacgaagtctgcaaatcggtgaatttatagagtttattgagcaccgcctcgccgaagtcgtccttctttatgcctatgacgatgcgcattccccgcctatccgactcgtcgcgcgtaaaagagataccctctatgatcttgttgcgcgccaaatcgcatatcctctgatagaggacgctcttgtttacctgatagggaatttccgtgatgataatctcttcgcggtcattcgcctttttgatcacctcggcgcggccgcgcactatcatcctgcccttgccgctcctataggccgcgtagatgccgctgcgcccgaacaccaccccgccggtgggaaaatcggggccggggataacgcttatcagctcgtcgacggtaacgtcgggattgtcaatcatcataatcaatccggtggcgatctcccgcaaattgtgcggggccatgttggtcgccatacccaccgcaataccggacgttccgttcaacaagaggaagggcagtttcgacggaagcaccgtcggctctttcaaactgtcgtcgtagttgggggcgaagtccacggtgtccttgtcgaggtcggcgagcatctcctccgcgaaagcggtcatacggcactccgtatacctcatagccgccggcgggtcgccgtccacggagccgaagttaccttgcccgttgaccatcgggtagcgcatagagaaatcctgcgccatgcgcaccaacgcgaagtaaaccgagctgtcgccgtgcggatggtacttaccgatcacgtcgccgactacgcgggcgcactttttgggcggcttgttatgctgtaa

SEQ ID NO: 48246 - protein, 295 aa, Unknown
  Obtained from environmental sample
  misc_feature (1)..(295): Xaa is any amino acid
MAHQLFKAEDLRTHIDKREIYYTERSLQIGEFIEFIEHRLAEVVLLYAYDDAHSPPIRLVARKRDTLYDLVARQIAYPLIEDALVYLIGNFRDDNLFAVIRLFDHLGAAAHYHPALAAPIGRVDAAAPEHHPAGGKIGAGDNAYQLVDGNVGIVNHHNQSGGDLPQIVRGHVGRHTHRNTGRSVQQEEGQFRRKHRRLFQTVVVVGGEVHGVLVEVGEHLLRESGHTALRIPHSRRRVAVHGAEVTLPVDHRVAHREILRHAHQREVNRAVAVRMVLTDHVADYAGALFGRLVML

SEQ ID NO: 48247 - DNA, 312 bp, Unknown
  Obtained from environmental sample
  misc_feature (1)..(312): n is a, c, g, or t
atgacagatcggccgagagagcgaagacctgatacctgccagattttccagctttacaaactttttacgcaagcggacgaacaggatgcccttgcaaaacgctatcgcgcaggcggcatgggctggggagaggctaaggaagagctgttccgcgttgttaaccgcgagcttaccccgataagggagcgttatgacgcaatcatggcggacattcccgctcttgataaaatacttgagcagggcgcggaaaaagcgcgtcccattgcagccgccactgtaaaacgcttccgcaaagccgcgggaatcgactga

SEQ ID NO: 48248 - protein, 103 aa, Unknown
  Obtained from environmental sample
  misc_feature (1)..(103): Xaa is any amino acid
MTDRPRERRPDTCQIFQLYKLFTQADEQDALAKRYRAGGMGWGEAKEELFRVVNRELTPIRERYDAIMADIPALDKILEQGAEKARPIAAATVKRFRKAAGID

SEQ ID NO: 48249 - DNA, 807 bp, Unknown
  Obtained from environmental sample
  misc_feature (1)..(807): n is a, c, g, or t
atgagtatgattgtttgtattggcagcggcaatatgggagccgccttaatgaaaggcgccggttctgacggcggcaatattttttttaccgatgttgatattgaaaaagcccgcgctcttgcggctgacctgaaagcaaatgtaattgaatcaaatatagaagctgttaaaaaaggggattttatttttcttgcggtaaagccgcaggttctgccgcaggtgttagccgaaatcgccgtcgccgtcaaagaaagactgaactcaggcgatcttccggtatttgtttcaatggcggcgggctggtccatcgccaagataaaggcggcaatcagtgtaaaactgcccgtagtgcgcataatgccgaatacgcccgctcttatcggaaagggaatgatcgcccttgccgcgtcgcctgaagtccatgcggaaaaaatttcggaacttgaaaaaatgctgggcggagccggcattgttgacattctggatgaaaattacatgaacgccgctaccggtctttcagggtctggtcccgcctttgtatatatgtttattgaagcgcttgcggacggaggagtacgcgccgggcttcccagagacaaagctctccgctatgccgcccaaactgtttttggctccgcggcaatggttcaggaaaccggaaaacaccccggcgaattgaaggatatggtaacgtctcctggcggaacgacaatcgccggtcttgccgcccttgaagacggcgctttccgcggttctgtgataaaagcggtagaagccgcatggaaacgcgccggggaattgagttag

SEQ ID NO: 48250 - protein, 268 aa, Unknown
  Obtained from environmental sample
  DOMAIN (3)...(252): NADP oxidoreductase coenzyme F420-dependent
  misc_feature (1)..(268): Xaa is any amino acid
MSMIVCIGSGNMGAALMKGAGSDGGNIFFTDVDIEKARALAADLKANVIESNIEAVKKGDFIFLAVKPQVLPQVLAEIAVAVKERLNSGDLPVFVSMAAGWSIAKIKAAISVKLPVVRIMPNTPALIGKGMIALAASPEVHAEKISELEKMLGGAGIVDILDENYMNAATGLSGSGPAFVYMFIEALADGGVRAGLPRDKALRYAAQTVFGSAAMVQETGKHPGELKDMVTSPGGTTIAGLAALEDGAFRGSVIKAVEAAWKRAGELS

SEQ ID NO: 48251 - DNA, 408 bp, Unknown
  Obtained from environmental sample
  misc_feature (1)..(408): n is a, c, g, or t
ttggtactggagcccgggacggttcccttgaagggcaacagggggaattttaataaccggaagttggttttgatttcccaaaaaaaaccattaccgcacttaacccgctgggtatatcttgacaccggcaattttaacggagttatagaaacattaagtgaatcaattaaatatcccattgttacaggcaatgaggataaagacgcagaggaagaagaagtgatcctcgcggggcctacttgcgacagtcaggatattctgtacgaaaaccacaaatatctgcttccggtagatttaaaaatcggcgacaaactctatttcttgtccgctggggcgtatacagcaagttacgcttccgtatgttttaacggcttcccgccgattaaaacctatatcatggacttataa

SEQ ID NO: 48252 - protein, 135 aa, Unknown
  Obtained from environmental sample
  DOMAIN (23)...(133): Pyridoxal-dependent decarboxylase, C-terminal sheet domain
  misc_feature (1)..(135): Xaa is any amino acid
MVLEPGTVPLKGNRGNFNNRKLVLISQKKPLPHLTRWVYLDTGNFNGVIETLSESIKYPIVTGNEDKDAEEEEVILAGPTCDSQDILYENHKYLLPVDLKIGDKLYFLSAGAYTASYASVCFNGFPPIKTYIMDL

SEQ ID NO: 48253 - DNA, 1029 bp, Unknown
  Obtained from environmental sample
  misc_feature (1)..(1029): n is a, c, g, or t
atgaaaatgcttgtcaacgaattaaagggaaccgataaaatcgcgatttgcgtatacgcgggagcggcgggaacagtgctgcaaccgacaagctgtgataataaggaaaaaataatcgcggcgttgaacagattgaaagccgacggttccaccgcgggcggagcgggaatcacgcttgcttataatctggcgcagcaaaattataaccctcaggcgataaaccgcgttattctgtgtaccgacggcgattttaatgtgggaatcaccaaccgcggcgagcttaccgatttaatttcagaaaaggcaaaaaccggagtttacctgacggttctcgggttcggcatggacaacttcaacgacgggatgctgaaacagctttcaaccaaaggcaacggcaattacggctacatcgacaacattgaggaagcgaaaaaaatacttgttgaacagttaagcggaacattggttacgattgcgaacgacgtaaaaattcaggttgattttaatcccgccgcggtcggcgcgtacaggcttatcggatatgaaaaccgcgtcatgcgcaacgaagaattcaacgatgacaaagcggatgccggcgacataggcgcgggacacaccgtcaccgccttttacgaacttattccgccgggcgccgaagttgactctctgcctgcgaaggatgcttcaaaatacggaccgcctccatccgactggaagccttccggcagcgaactgttgaccgtaaaagtcagatacaaactgccgcacgaaaccgaaagcaaactgcttgagttccccgttgccgcaagttccgtaaagcccgccggcaaagagacgcttgatttccgttttgccgcctcggtcgccgcttttggaatgttactgcgcgacagtccctataagggaaacgccacattttcaagcgttattgaaatggcgcaaaattcaattgggcaggataaatacaaatatcgggcgaattttgtagaaatggcaagtaaagctaaaaccataagcaaaaaagattaa

SEQ ID NO: 48254 - protein, 342 aa, Unknown
  Obtained from environmental sample
  misc_feature (1)..(342): Xaa is any amino acid
MKMLVNELKGTDKIAICVYAGAAGTVLQPTSCDNKEKIIAALNRLKADGSTAGGAGITLAYNLAQQNYNPQAINRVILCTDGDFNVGITNRGELTDLISEKAKTGVYLTVLGFGMDNFNDGMLKQLSTKGNGNYGYIDNIEEAKKILVEQLSGTLVTIANDVKIQVDFNPAAVGAYRLIGYENRVMRNEEFNDDKADAGDIGAGHTVTAFYELIPPGAEVDSLPAKDASKYGPPPSDWKPSGSELLTVKVRYKLPHETESKLLEFPVAASSVKPAGKETLDFRFAASVAAFGMLLRDSPYKGNATFSSVIEMAQNSIGQDKYKYRANFVEMASKAKTISKKD

SEQ ID NO: 48255 - DNA, 828 bp, Unknown
  Obtained from environmental sample
  misc_feature (1)..(828): n is a, c, g, or t
atgcagtacagaatagacaaaaaatcgggcaataagttgtcggtattgggtttcgggtgcatgaggttcccgaagaacatcaccggttttgatatgcgaaaaaccgaagagatgctgatgcgttccattgagggtggcgtgaattattttgacaccgcgtggatatatccgggaagcgaggaagccgtcgggactatctttgaaaaaaaccatgtgcgggaaaaaatatttatagcaagcaaactgcccctggtttttgtgaaaggccccgccgattttgataaataccttgaccaatcgttaaaccggctaaaaacaagctatatcgactattaccttatgcacatggttaccgattcaggcttgtgggcaaaactcaagggatggggaatagaagactggatcctcagaaaaaaaaaggaagggaagatacggcagatcggctattcctaccacggcagcaggaatgagttcctgaaggtgcttgatgattacgattgggagatgtgcctgatccaatacaattactccgacgaaaatttccaggccggtgttacgggcttaaagaaagccgctgaaaaaataccggtgatgattatggagccgctgctggggggcaaactcgcgaccggattgcccaaagacgctgtggaaattttcaaaaaagcaaaccccgatctgtcgcccgcggcatgggggctgaactgggtgtggaatcaggaagaagtgacgctgctgctttccgggatgagcgacatggcccagcttgaggaaaacctccgccttgcggacaaggtaaaggtcgggatgcttggaaagcggaattga

SEQ ID NO: 48256 - protein, 275 aa, Unknown
  Obtained from environmental sample
  DOMAIN (7)...(272): Aldo/keto reductase family
  misc_feature (1)..(275): Xaa is any amino acid
MQYRIDKKSGNKLSVLGFGCMRFPKNITGFDMRKTEEMLMRSIEGGVNYFDTAWIYPGSEEAVGTIFEKNHVREKIFIASKLPLVFVKGPADFDKYLDQSLNRLKTSYIDYYLMHMVTDSGLWAKLKGWGIEDWILRKKKEGKIRQIGYSYHGSRNEFLKVLDDYDWEMCLIQYNYSDENFQAGVTGLKKAAEKIPVMIMEPLLGGKLATGLPKDAVEIFKKANPDLSPAAWGLNWVWNQEEVTLLLSGMSDMAQLEENLRLADKVKVGMLGKRN

SEQ ID NO: 48257 - DNA, 753 bp, Unknown
  Obtained from environmental sample
  misc_feature (1)..(753): n is a, c, g, or t
atgcctttggatttatttgaagatgagcagaagatatttgacgatgccacaaaacgtattgaggcagtgaaaagcggcgcttctttcggctttgaggaattcgagttccttgtaaaagaatacggaatactgttgaaacagctccgcaagagcatacatttcgccgacaggacttcaaatggtttattcagaatcaacctgaatttggaggaaaaagttcattttgacgccctgaccggtatttataaccggcgttttatggaggacaactttaggcggattgtgcaagctttatcccgctgcaacggggttttaactgtcatgatgctggacatcgatttttttaaaaaatacaacgatacctatggccataagatgggtgatatatgccttagggctatcgctgaagcgctttccaagaccgcgagggtggacgactatgttatacgatacggcggcgaggaattcttgattatagcgccgaacacagatgagtccggcgcgggaatgatagcgaaaaggcttttaaaaagcgtagtttcccttggtatacctcatgcaagcagcgatatcgcgaaatgcgtaaccatttcgattggagcgacgacagtcaaagtggggtacagccatcaatacatggattacattgaacgcgccgatgaagcgctgtacttgtcaaaaaataacgggcgcaacaagtacacccatctaaaatacgatgatcaggaaggagacaatagtaatgcggtttaa

SEQ ID NO: 48258 - protein, 250 aa, Unknown
  Obtained from environmental sample
  DOMAIN (69)...(233): GGDEF domain
  misc_feature (1)..(250): Xaa is any amino acid
MPLDLFEDEQKIFDDATKRIEAVKSGASFGFEEFEFLVKEYGILLKQLRKSIHFADRTSNGLFRINLNLEEKVHFDALTGIYNRRFMEDNFRRIVQALSRCNGVLTVMMLDIDFFKKYNDTYGHKMGDICLRAIAEALSKTARVDDYVIRYGGEEFLIIAPNTDESGAGMIAKRLLKSVVSLGIPHASSDIAKCVTISIGATTVKVGYSHQYMDYIERADEALYLSKNNGRNKYTHLKYDDQEGDNSNAV

SEQ ID NO: 48259 - DNA, 561 bp, Unknown
  Obtained from environmental sample
  misc_feature (1)..(561): n is a, c, g, or t
atgatcaggaaggagacaatagtaatgcggtttaatattctggagtacaacanactactctcggagcataatatcagcattatttacagcggtcctttgtgggcggaggggattgacggcatggccgagtttttgcaaaaaaggcttgatatggatgatacgccgctaagtgcgtctcagtccgtcttttcggtgtttgtggagcagatgaacaatatgcttatgtattcagccgaaaaagagaagaccgcagaaatgcccaccggaatttttgttctgggcaactacgataaatcgtattatgtacagacaggaaatgtaataaaaaacagcagcgtcgggcttctaaaagacaggatagactttcttaacacactggacaagaaagagttgcggcagttctacaaggagcaaatcaaaaccaaaaatgacaatccggaaagcaggggcgcagggctggggcttacggaaatagcgagacgggctacttcaaaaatagaatacgaattcaccccctacagcgaaggcttgtcgtattttacaatgttcgtaacagtgtaa

SEQ ID NO: 48260 - protein, 186 aa, Unknown
  Obtained from environmental sample
  misc_feature (1)..(186): Xaa is any amino acid
MIRKETIVMRFNILEYNXLLSEHNISIIYSGPLWAEGIDGMAEFLQKRLDMDDTPLSASQSVFSVFVEQMNNMLMYSAEKEKTAEMPTGIFVLGNYDKSYYVQTGNVIKNSSVGLLKDRIDFLNTLDKKELRQFYKEQIKTKNDNPESRGAGLGLTEIARRATSKIEYEFTPYSEGLSYFTMFVTV

SEQ ID NO: 48261 - DNA, 381 bp, Unknown
  Obtained from environmental sample
  misc_feature (1)..(381): n is a, c, g, or t
atggcatatcgcttggaaaagggaaaaacaacttctactccctacatattaatcgatgaagaaaaaagttacatgagattcgagggccggagttttcacgaaaatgtcgcggaattctacagggacgtaaacgactggctggacacttatttagtcaaagatttcgtctcatttaccttcgattttgagatgaactacttcaacagttcaacctcaaaacttatgcacaatatgctgaccaaaatgaacaagtgcgcctccgataaaaaaaaggtgattgtaaactggataaccactgaggacaacgatattattattgagtgcggcgaagactttcaggaggacttcagcagcctgaaatttaatatgattatcaaataa

SEQ ID NO: 48262 - protein, 126 aa, Unknown
  Obtained from environmental sample
  misc_feature (1)..(126): Xaa is any amino acid
MAYRLEKGKTTSTPYILIDEEKSYMRFEGRSFHENVAEFYRDVNDWLDTYLVKDFVSFTFDFEMNYFNSSTSKLMHNMLTKMNKCASDKKKVIVNWITTEDNDIIIECGEDFQEDFSSLKFNMIIK

SEQ ID NO: 48263 - DNA, 468 bp, Unknown
  Obtained from environmental sample
  misc_feature (1)..(468): n is a, c, g, or t
gtgcttattaaaccaataaacctgtcagcaattcagaaaatgcttgaaaaatggctatccgcagaaaaaaagccttcgcaagagctgccggaacacagcatgatttccatttcgggaccggcggtttttaaccccaaaaatatgtttgatgcctttacaaatgatgaagaaacagttattccgcttttagcccgtttcattgagcgcgccaatggccaactggaaaatttcaagactttaataacatcgggtaactgggctgacgcccgccgggacgcgcacacaataaaaggaacggccagcagcatgggcggtcaagagctgggcaaagcggccggcgttctggaactggcctgcattaatgcctccgctgaagaagccaaaaccgcctactcccgtgtacttgaagcttttgcgaaattcaagaaagaagcagaagaatttattcacaacagaaaagctaaataa

SEQ ID NO: 48264 - protein, 155 aa, Unknown
  Obtained from environmental sample
  DOMAIN (61)...(137): Hpt domain
  misc_feature (1)..(155): Xaa is any amino acid
MLIKPINLSAIQKMLEKWLSAEKKPSQELPEHSMISISGPAVFNPKNMFDAFTNDEETVIPLLARFIERANGQLENFKTLITSGNWADARRDAHTIKGTASSMGGQELGKAAGVLELACINASAEEAKTAYSRVLEAFAKFKKEAEEFIHNRKAK

SEQ ID NO: 48265 - DNA, 315 bp, Unknown
  Obtained from environmental sample
  misc_feature (1)..(315): n is a, c, g, or t
atgagtcttgcctgtattcacacgcacactatattttgtgacggcaaagacgatatagagaccttttgccgcgtcgcgtatgaaaaagggctggactctcttggtttcagcgcccacgccccgatattcagaaaaaccggccttcacactgactggcatcttaaaaatgaacgggttgaggaatatctggacagtgtccgctcagcccaaaaaacgctgggaggggaagctccctgtctaccttgggatggaagcggattttttttcgggcataacggggccggcagacaaggattaccgggaaatgggccttga

SEQ ID NO: 48266 - protein, 104 aa, Unknown
  Obtained from environmental sample
  misc_feature (1)..(104): Xaa is any amino acid
MSLACIHTHTIFCDGKDDIETFCRVAYEKGLDSLGFSAHAPIFRKTGLHTDWHLKNERVEEYLDSVRSAQKTLGGEAPCLPWDGSGFFFGHNGAGRQGLPGNGP

SEQ ID NO: 48267 - DNA, 798 bp, Unknown
  Obtained from environmental sample
  misc_feature (1)..(798): n is a, c, g, or t
atgaaaaagggctggactctcttggtttcagcgcccacgccccgatattcagaaaaaccggccttcacactgactggcatcttaaaaatgaacgggttgaggaatatctggacagtgtccgctcagcccaaaaaacgctgggaggggaagctccctgtctaccttgggatggaagcggattttttttcgggcataacggggccggcagacaaggattaccgggaaatgggccttgattacattatcgcttctgtccattatgtcctccctccaaagggggagctttttactgtggatggcccgctggaagaggttgagcagggtataaaagagggattcggcggagacccgattggaatggtggaaacttactttgattctgaagaagccatgatccgcgccggcggttttgatgtgcttggacaccccgatttggttaagcttcacaacaaagacaataaactttttgaccctcaaagcagcttttacttaaaaagaatcgccgctttggctgccctgctggctaaagtcaatattacttccgagcttaacacgggcggccttaacaggggcaaaataagcgaatgttacccatccctggatttcctaaagtatttccgcaaacagaatgtccccatagttatcaacgccgacgcccacagggcggtaaatcttgacggccattacgaagatgcccgcaaatccatgctggaggcggggtatactgaaacggcgctgtttgaagggcggacaaatagtaaggctatgtggaaaaaccttaatttatcgtcccattaa

SEQ ID NO: 48268 - protein, 265 aa, Unknown
  Obtained from environmental sample
  misc_feature (1)..(265): Xaa is any amino acid
MKKGWTLLVSAPTPRYSEKPAFTLTGILKMNGLRNIWTVSAQPKKRWEGKLPVYLGMEADFFSGITGPADKDYREMGLDYIIASVHYVLPPKGELFTVDGPLEEVEQGIKEGFGGDPIGMVETYFDSEEAMIRAGGFDVLGHPDLVKLHNKDNKLFDPQSSFYLKRIAALAALLAKVNITSELNTGGLNRGKISECYPSLDFLKYFRKQNVPIVINADAHRAVNLDGHYEDARKSMLEAGYTETALFEGRTNSKAMWKNLNLSSH

SEQ ID NO: 48269 - DNA, 648 bp, Unknown
  Obtained from environmental sample
  misc_feature (1)..(648): n is a, c, g, or t
atggcggggctcaggctggacgcttacgtgttgtccaaggtaatcgtcatagcgatggttgccgtcgtccagtcgctggtcatagccgccatctttgcggtgggcataaatatgaggggcaagggcctgttcttttcccccctcatagacgtattcatcaccacgttcctcactacgtctggcgccgccgctatgggcatctttatatcgtccctgttcaacgagccggccaaggccatggcagtggccccgctggtgatgataccccagctccttttttccggcggcaccgtccccgtcaaggccaccgtgctaaagtgggcctcttgcgccactgtttgccgctggtccatgtccagctatggcgcgacggagaactttgacaatatcattgacattcaggcaagaaatagtgctcctggtgtggcaaaaaataggggcatgacgggtactccaagcgagatagccaggttggaagaagaaatcaaagtaactaccaaaaaagaggcggtggataaaaggggggttgactttaaatcaaccaagaaaaaccttggcaccaattggctgatacttgtcgcattcatcgtcttcttttcgatattgcccatactcacgcttcgcaacatcaattcagaaaagaggtga

SEQ ID NO: 48270 - protein, 215 aa, Unknown
  Obtained from environmental sample
  misc_feature (1)..(215): Xaa is any amino acid
MAGLRLDAYVLSKVIVIAMVAVVQSLVIAAIFAVGINMRGKGLFFSPLIDVFITTFLTTSGAAAMGIFISSLFNEPAKAMAVAPLVMIPQLLFSGGTVPVKATVLKWASCATVCRWSMSSYGATENFDNIIDIQARNSAPGVAKNRGMTGTPSEIARLEEEIKVTTKKEAVDKRGVDFKSTKKNLGTNWLILVAFIVFFSILPILTLRNINSEKR

SEQ ID NO: 48271 - DNA, 432 bp, Unknown
  Obtained from environmental sample
  misc_feature (1)..(432): n is a, c, g, or t
atggataacaataaaatccggtcgtttgaaaataaaaaagtccgttccatttgggatgcagaaaaagaagaatggttcttttcggttgtagatgtagtagccgttttaacggatagcccacgaccaaggaaatattggaatgctttaaaaacaaagctaaaagacgaaggtagcgagttgtcccaagaactgggacaactgaaaatgcagtcagatgatggcaaatattacctaaccgacgttgcaacagccaaacaattgcttcgtttaatccaatccattccttcacccaaagccgaaccttttaaattatggttggcacaaattggaagtgaaaggctggattcctcccaagacccagaacttaccatagaattggcgatgaagcaatataagcagttaggttatagcgatgaatggataaattgctag

SEQ ID NO: 48272 - protein, 143 aa, Unknown
  Obtained from environmental sample
  misc_feature (1)..(143): Xaa is any amino acid
MDNNKIRSFENKKVRSIWDAEKEEWFFSVVDVVAVLTDSPRPRKYWNALKTKLKDEGSELSQELGQLKMQSDDGKYYLTDVATAKQLLRLIQSIPSPKAEPFKLWLAQIGSERLDSSQDPELTIELAMKQYKQLGYSDEWINC

SEQ ID NO: 48273 - DNA, 528 bp, Unknown
  Obtained from environmental sample
  misc_feature (1)..(528): n is a, c, g, or t
atgtatcagattggccgagcagatatagaaaaaataaacgaaggcgtagatgcaatatctaaaaacgttaagcagcagacaaaggcaagcgacgagattgcaaggaacgtttcacaggcaaattcaggtgccaagcgcgttgccggtgcaataagcgaggtagccagtggtagcaaagacatagccaagaatgctggtcaagcgagcgtcaatgccaagcgcgtttcagattccatagttgaggtagccaaaggcagcaaggacatagcgcgcaacgcaggtgaggcagctaagggcgtagatagagtttccagatccgtaaacgaggtagccaaaggcagcaaagacatagcacgcaacgcgggcgaagccgcaagaggagcgcaaaatgtaagctcaaatgttaccggcatgaatcgtgcggcaaaagagagttcgcaagaagtttcgcgagtgaaacaaagcgcagataacctatccaaaatggcgggacagttgcgtacggctatggataagtttaaggtgtaa

SEQ ID NO: 48274 - protein, 175 aa, Unknown
  Obtained from environmental sample
  DOMAIN (3)...(174): Methyl-accepting chemotaxis protein (MCP) signaling domain
  misc_feature (1)..(175): Xaa is any amino acid
MYQIGRADIEKINEGVDAISKNVKQQTKASDEIARNVSQANSGAKRVAGAISEVASGSKDIAKNAGQASVNAKRVSDSIVEVAKGSKDIARNAGEAAKGVDRVSRSVNEVAKGSKDIARNAGEAARGAQNVSSNVTGMNRAAKESSQEVSRVKQSADNLSKMAGQLRTAMDKFKV

SEQ ID NO: 48275 - DNA, 783 bp, Unknown
  Obtained from environmental sample
  misc_feature (1)..(783): n is a, c, g, or t
atgaatttagcaccaattattggcattgtaggcgctttgggcatggtggtatttggaattctcggtagcggtaactccattatgaccttcgttgacatctcatcggtaattatcgttgtggtgggttcgtattttaccctgtttaccttaacaagcatttctgacactctcggcattttcggtattataggtttgattttcaaaactccgaattttaacgaacagggactcataaccaaactgatggcaatgtcggaaaaagcccgacgcgaggggctccttgccctggaagaagagctggaagaccttgacgatgaatttatgaaaaagggaatgaggctggttgttgacggtacggacgcgggaattattcgcggccttatggaaaacgagctaagccagatgcaggatcgccatgccgataaaatcggaatggttatcggctgggccggtcttgccccagggctgggtatgctgggtacggttatcggacttataggtatgttgaaaaacctggaagacaaaagcgccctgggcccgaatatggcggtcgcgcttatcaccactctttacggctccatggtagcgaacctgcttttaatccctatcttcgggaaactaaaaagcatcgatgcgatggagtcaaaggtaaaggaaatggagatagaaggagtcctttcgatacaagccggggacaatcccagaatcctggctaccaagcttctttcctaccttgaccccattgggcgcaaggcggttgaagctgaagtgctcaaagactga

SEQ ID NO: 48276 - protein, 260 aa, Unknown
  Obtained from environmental sample
  DOMAIN (90)...(223): MotA/TolQ/ExbB proton channel family
  misc_feature (1)..(260): Xaa is any amino acid
MNLAPIIGIVGALGMVVFGILGSGNSIMTFVDISSVIIVVVGSYFTLFTLTSISDTLGIFGIIGLIFKTPNFNEQGLITKLMAMSEKARREGLLALEEELEDLDDEFMKKGMRLVVDGTDAGIIRGLMENELSQMQDRHADKIGMVIGWAGLAPGLGMLGTVIGLIGMLKNLEDKSALGPNMAVALITTLYGSMVANLLLIPIFGKLKSIDAMESKVKEMEIEGVLSIQAGDNPRILATKLLSYLDPIGRKAVEAEVLKD

SEQ ID NO: 48277 - DNA, 543 bp, Unknown
  Obtained from environmental sample
  misc_feature (1)..(543): n is a, c, g, or t
atgcangggcaggttctgatgaacgttgcttacgacgtacaaagcgctacacccggcgacgacggcgcaatgattcgccagaacttcaggcttaacctgggcactgtcggcggccttgtgaattcaatgacccagtacgcagaaagaagttcttccaagattgttcagcaagacggctacagcatgggctacatggaaagcttcaagatcgataacagcggtattatcacgggagtttttaccaacggtactaaccgtacgctgggacaggtagcgatggccagtttccccaaccagggaggccttgaaaaagccggggacaataatttcaagaagaccagcaactccgggaacgccaatataagcccgtccggcattgccggaaaaggcactatcaaatccggcgttctggaaatgtcaaatgtggacctggcggatcagtttaccgacatgatcgttacacagcgcggtttccaggccagttcaagaacaatacaaacggcggatcagttgttacaagagatattaaccctgaaaaggtaa

SEQ ID NO: 48278 - protein, 180 aa, Unknown
  Obtained from environmental sample
  DOMAIN (140)...(178): Domain of unknown function (DUF1078)
  misc_feature (1)..(180): Xaa is any amino acid
MXGQVLMNVAYDVQSATPGDDGAMIRQNFRLNLGTVGGLVNSMTQYAERSSSKIVQQDGYSMGYMESFKIDNSGIITGVFTNGTNRTLGQVAMASFPNQGGLEKAGDNNFKKTSNSGNANISPSGIAGKGTIKSGVLEMSNVDLADQFTDMIVTQRGFQASSRTIQTADQLLQEILTLKR

SEQ ID NO: 48279 - DNA, 915 bp, Unknown
  Obtained from environmental sample
  misc_feature (1)..(915): n is a, c, g, or t
ttggcggaaaagattttatcgtcggcgtcgctgganaagccaaaagcggcggcgccgtanacggcgacgccagggcgaccggcagggatgccgctaaagaagcatgaaaaacgccggggaaagcgacgcgccggcttacttctacatggccgcctctccgggagaagaggagttctacctcaaaggcataagcgaggtgatcggcagggttccgtatttgggggaagcgctgcggataacaccatagcgggcgaatggaaactnttcgccggtaatcaggtatttgcggacggcgttacagtcgccttcttctatactgacaaaccggcgaccaacctttataccggcgcttacagcgagaccggcgatgtgggaatcatcaccaaagtaaaaaacaaccggacgctggtggaaattgacggtgttccggcgcttaagaaatacgcgcaatgggccggggtcgatcctgattcccttaagggcgcaaatctactggtctataccatcacatcgcctctgggcataaaggacaggcttggcgatcttaccgcaatccggcatcccatgaacggcaacgacgattactccatgaacattggcgcaaacctggctgaaaaaaccgccgtaatccgaatgaaggggtcggtggacgagctgatctcgtcggcttcaaagaccgtggatgagttgaaagccaaaatgaaggcaacacccgcagcgctccatctggttcactgcggcggacgcagggctggaatcggagaccggattgaggaagtagtccagggagtgaagaaagcggcgggcggcgttccctttatcatggaattcacctttggcgaatatggttacgaggatgacggcaacaataccacgggcggtcttatgctgtcgtacacgggctttgcccaataa

SEQ ID NO: 48280 - protein, 304 aa, Unknown
  Obtained from environmental sample
  DOMAIN (1)...(206): Domain of unknown function (DUF1745)
  misc_feature (1)..(304): Xaa is any amino acid
MAEKILSSASLXKPKAAAPXTATPGRPAGMPLKKHEKRRGKRRAGLLLHGRLSGRRGVLPQRHKRGDRQGSVFGGSAADNTIAGEWKLFAGNQVFADGVTVAFFYTDKPATNLYTGAYSETGDVGIITKVKNNRTLVEIDGVPALKKYAQWAGVDPDSLKGANLLVYTITSPLGIKDRLGDLTAIRHPMNGNDDYSMNIGANLAEKTAVIRMKGSVDELISSASKTVDELKAKMKATPAALHLVHCGGRRAGIGDRIEEVVQGVKKAAGGVPFIMEFTFGEYGYEDDGNNTTGGLMLSYTGFAQ

SEQ ID NO: 48281 - DNA, 900 bp, Unknown
  Obtained from environmental sample
  misc_feature (1)..(900): n is a, c, g, or t
gtgcttggctttctcggccctaacggggccggaaaaaccaccatcatgaagatactcaccgggttccatttcccctctagtggcagcgccctggtggacggcatcaggattgacgaagacccggtggaggtaaaaaaacgcatagggtatttgccggaaagtataccgctttatgaagaccttactgttgacgagtatctggcctttatcgccgaggcgaggttgattcccgcgcctgaaagaaaaaaggccgtggacgactgccttgaagcctgcggcttacaagcgtaccgcagccggaaaatcgacaccctttccaagggataccgccagcgcactggccttgcccaggcaatacttcatgatccgccaatccttatccttgacgagccgaccaacgggcttgaccccaaccagatcattgagattcgctcccttataatggaattggggaaaagaaagaccgtcctgctttcgtcccatatactgcaggagatcgaggctatctgccagcaggtgctgatcatcaacgaaggaaggattgcggcccagggaacaaccgaggaaatcgccggaaccatgaagggcggcgatacctgggaactgatactcagggcgcaaaatatgactgccgaaaccgtaaagaacaggctgtacagacttgagggaatttcttcggttacagccgagcaaatggacaaccaactggtgaaacttggcttttttgtgcctacgaatagcgccgccgacacaagttcttttatcccgacaggcgagatggtctttgactgggctgtttcgggcgggctgaaaataatcggcatgaaccgaaagaagatcagcctggaggatattttcgtaagcctcacttcggaagaatcaaacaaggaggctgaatga

SEQ ID NO: 48282 - protein, 299 aa, Unknown
  Obtained from environmental sample
  DOMAIN (1)...(179): ABC transporter
  misc_feature (1)..(299): Xaa is any amino acid
MLGFLGPNGAGKTTIMKILTGFHFPSSGSALVDGIRIDEDPVEVKKRIGYLPESIPLYEDLTVDEYLAFIAEARLIPAPERKKAVDDCLEACGLQAYRSRKIDTLSKGYRQRTGLAQAILHDPPILILDEPTNGLDPNQIIEIRSLIMELGKRKTVLLSSHILQEIEAICQQVLIINEGRIAAQGTTEEIAGTMKGGDTWELILRAQNMTAETVKNRLYRLEGISSVTAEQMDNQLVKLGFFVPTNSAADTSSFIPTGEMVFDWAVSGGLKIIGMNRKKISLEDIFVSLTSEESNKEAE

SEQ ID NO: 48283 - DNA, 771 bp, Unknown
  Obtained from environmental sample
  misc_feature (1)..(771): n is a, c, g, or t
atgatgaatcaggaaaacctgcccgctcagacccgcctgctccagggaaaatcgcggatcatagctcttgcccgcaaggagctttactcttacctttacgcgcccgcattttacggggcggccgttttctttctggctttcagttccgtttggctgtttttcatacagcgttactttacaatgaatgtcgccaccctgcggccttattttggggcttttcccgttgtttttattcttgttatccctgtgcttacaatgaaaagctgggccgaggaacgaaagaccggaagcatcgagcttctgcttaccatgcctttctccgaatgggaactggtactcggcaaattcttttcggctttctgcctgctggtgatgatgctggctctgactattcccctgcccctttgcctgacctctctgggtgaatttgactggggcgttattgcctgcgaatacatcggcgttgttttaatgggcgcttccgccgtcgctttgggcctgcttttatcatcgctgtccaaaaatcaggcgggaagttttcttggaagcgccgtcgccatgatggcggttatgctgataaacaacctgaccttctccatgaacctccctttctggctgacagaatttataaattttatttcactttcatttcattttgaaagtttttccaaagggctgctcgattccagggatataatttattttctggcaagtgcggttttgtttttgttcatcaccacgcgggtaatactgttcaggaggtggaactaa

SEQ ID NO: 48284 - protein, 256 aa, Unknown
  Obtained from environmental sample
  misc_feature (1)..(256): Xaa is any amino acid
MMNQENLPAQTRLLQGKSRIIALARKELYSYLYAPAFYGAAVFFLAFSSVWLFFIQRYFTMNVATLRPYFGAFPVVFILVIPVLTMKSWAEERKTGSIELLLTMPFSEWELVLGKFFSAFCLLVMMLALTIPLPLCLTSLGEFDWGVIACEYIGVVLMGASAVALGLLLSSLSKNQAGSFLGSAVAMMAVMLINNLTFSMNLPFWLTEFINFISLSFHFESFSKGLLDSRDIIYFLASAVLFLFITTRVILFRRWN

SEQ ID NO: 48285 - DNA, 897 bp, Unknown
  Obtained from environmental sample
  misc_feature (1)..(897): n is a, c, g, or t
ttggaccagggacaaaaaccaaaggctgtccttcatattgttcatggaatggcggaacacgcgctccgctaccgccgtcttgcggagaaactgacacaatcgggaatagaagtatgggctgcggatcagagggggcacggtaaaaccgccaatcctgaggtaaacgagcttggcaagggagggcttttagggcattgcggtgacggtaacggcactgcctccgtaactgccgatgttcgcgcaattaataatgaaatccgtaaaataacgccaaatgttcccatcttccttttaggacattcatggggatcatttatagtacagaattatatagaatattcagacgatttaataattaacggatgtattttatccggaacaaaaggacccgacggttttataataatggcgggagtgccgttaatgatgatgatagccacattaaccggtcagcgcaaagtatcacgctttgcaaaatcaatcgcagacggggcgtataacaaaccgtttaagccaaaccgcaccgcgtttgactggattagccgtgatgaagaagaagtagataaatatgtaaatgatcctctttgcggatttctgtgttcttcagggttctacagggatcttttaaaattactgtataacattcaccgtactgacgcgttggcaaggataaaacgttctttaccggtgtatgttttttcgggaagcgtcgatccggtgggtgaaatgagtaaaagccccaccgctttagtaaacgcgtaccgtanattgggaataaatgactgcgagtttgtgctgtatccgggcgccaggcatgagacatttaatgaaacccatcgtgaggaagtaatggacaaccttctttcatggataaacaacattgtgaatgagatatag

SEQ ID NO: 48286 - protein, 298 aa, Unknown
  Obtained from environmental sample
  misc_feature (1)..(298): Xaa is any amino acid
MDQGQKPKAVLHIVHGMAEHALRYRRLAEKLTQSGIEVWAADQRGHGKTANPEVNELGKGGLLGHCGDGNGTASVTADVRAINNEIRKITPNVPIFLLGHSWGSFIVQNYIEYSDDLIINGCILSGTKGPDGFIIMAGVPLMMMIATLTGQRKVSRFAKSIADGAYNKPFKPNRTAFDWISRDEEEVDKYVNDPLCGFLCSSGFYRDLLKLLYNIHRTDALARIKRSLPVYVFSGSVDPVGEMSKSPTALVNAYRXLGINDCEFVLYPGARHETFNETHREEVMDNLLSWINNIVNEI

SEQ ID NO: 48287 - DNA, 1131 bp, Unknown
  Obtained from environmental sample
  misc_feature (1)..(1131): n is a, c, g, or t
atgagatatagatactccgccacagaaaacggtaagttggtaaaaaaagcgattatttacacccgcgacgagcatggtataaactttgccgatgttgacagtgaagccatcagcattattaaaagattaagaggcgcgggttttgattcctacattgtaggcggggcggtaagagatttaattcttggaaaaaaaccaaaagactttgacattgtaagcgccgcaagtcccgggcgcataaaaaaaatttttcgcaactcaagaattatcggcaggcgtttccgtcttgttcacgtatattttggcgagcgaatatttgaagtcgctaccttccgctccttaaaagacggacacaccagcaataccttcggcacaatagacgacgatgttctacgccgcgattttacaatgaacgcccttttttacgatcccgaacaacaaattgtggttgactatgtaaacggcatgaaggatataaaaaacaaacaggtaaaaaacattataaatctttctgttattttcacggatgatcccgtaaggatgatccgcgccgtaaaatacgccgctattacaggtttttccattccattaaatttaaaaatgaaaattgtaaatcagtcaaatctacttacgtcaatctccccttcgcgccttacggaagaaatttttaaaattataaactcggataaagcgggtgccattgtagatttgctggacaagatggggctttattcctatctgcaaccgcaggcggctgaacttatgcgtaagaacgctaattttagaaaaagttatctgcaaacaatggcggatttaaaaggcgtggaaaatcaacgcggacaggctctttcatctctttttaacgattatcttgaaagtacgcaagactggaaacccggccatattgaaaattttaaagagatttgcaaaactgtccgcacctttgtcatgcccatgaatccgccgcgctttgaacttgaatacgccgttaaaaaatttctttccgccaaaggaatcacaattaaaagaacgccgccaaaacccgcggcggaagaaggcaagcccgccaccaaacggaaacgccgccgaagaaaacccaagtcagggacggcggctcctgtgaataattag

SEQ ID NO: 48288 - protein, 376 aa, Unknown
  Obtained from environmental sample
  DOMAIN (108)...(257): Poly A polymerase family
  misc_feature (1)..(376): Xaa is any amino acid
MRYRYSATENGKLVKKAIIYTRDEHGINFADVDSEAISIIKRLRGAGFDSYIVGGAVRDLILGKKPKDFDIVSAASPGRIKKIFRNSRIIGRRFRLVHVYFGERIFEVATFRSLKDGHTSNTFGTIDDDVLRRDFTMNALFYDPEQQIVVDYVNGMKDIKNKQVKNIINLSVIFTDDPVRMIRAVKYAAITGFSIPLNLKMKIVNQSNLLTSISPSRLTEEIFKIINSDKAGAIVDLLDKMGLYSYLQPQAAELMRKNANFRKSYLQTMADLKGVENQRGQALSSLFNDYLESTQDWKPGHIENFKEICKTVRTFVMPMNPPRFELEYAVKKFLSAKGITIKRTPPKPAAEEGKPATKRKRRRRKPKSGTAAPVNN

SEQ ID NO: 48289 - DNA, 843 bp, Unknown
  Obtained from environmental sample
  misc_feature (1)..(843): n is a, c, g, or t
ttggagaatgaacgcagggaagcgaaagaacagggaaagacggagggcaaggaagacggatatgccgaaggaaaagctgaagttgaccgcctaattgagagaacgcagaccgtgcttgaacgcgcgcaggacaagagggcggatattttaagtgatactgagaaagaaattatctatttggtgcttcttattacgcgaaaagttataaaggttatctctgaaaaccagcgtgatataataatttccaatgtggttgaagccctgcgtaaagttagagcgaagggaaatatcacaattaaagttaaccttgccgaccttaaacttgccacggagcacaagcaggattttatcgccctaatggaaggcgtaaaaacaattaacattgttgaagacactaccgttgataagggcggatgtataatagaaactgattttggcgagattgacgcgcgtatttcaagccagcttgcggaattggaaacaaagatactcgaagtgtcgccgataaaatcttcaaaaccgccgataaaccgcactcccaatcttgaaaacgagttggcagcttccacaagcctgattgataaaataaaaaagaatgatgaaacatcaaagaatgaagacgaagtaagaaataaatacgaagacataaagcaaaaagaagaaaaaaaagagaaagagaaaaaagaaaaagaagaaaaggaaaaagataaagaaaaagaagatgaaccggatatatccccggccgtaaacgcggctcttacggcgtccgccgcgcttgccgctcttgcgactatgggaaccaaaggcagaagggagaccgacaaaaaacttcagataacgtag

SEQ ID NO: 48290 - protein, 280 aa, Unknown
  Obtained from environmental sample
  misc_feature (1)..(280): Xaa is any amino acid
MENERREAKEQGKTEGKEDGYAEGKAEVDRLIERTQTVLERAQDKRADILSDTEKEIIYLVLLITRKVIKVISENQRDIIISNVVEALRKVRAKGNITIKVNLADLKLATEHKQDFIALMEGVKTINIVEDTTVDKGGCIIETDFGEIDARISSQLAELETKILEVSPIKSSKPPINRTPNLENELAASTSLIDKIKKNDETSKNEDEVRNKYEDIKQKEEKKEKEKKEKEEKEKDKEKEDEPDISPAVNAALTASAALAALATMGTKGRRETDKKLQIT

SEQ ID NO: 48291 - DNA, 573 bp, Unknown
  Obtained from environmental sample
  misc_feature (1)..(573): n is a, c, g, or t
atgagcgcattgccgaaagaaaaagaacaacgacactttacctacgcggattacaaggaatgggaacttgacgagggggagcgctacgaactgatagacggtgaagcctttgcaatgtccgcgccgagcatcaggcaccaagccgtttccggagcactttttaatcaattttataattatttacagggaaagccttgccgggtattttacgcgccttgtgatgtcaggctgttttatgaggaagacgaaagcgacgacacggtggttcagccggatattattgttatttgcgacaaagataaaataggagaggagagctgccatggagcccccgatctggtgatagaaatattatcaccctcaaacaccgctacagaaatggaaaagaagtttttactgtaccatgaagccggcgtgcgggaatactggatagttgattctaaaaacaacaccctgaaagtccatcgtttccgggactctgataccttgacaaacacatataaaagcgcggacacggttccggtcgccattttacccggttttagcataacgctggaacaggttttcgcctaa

SEQ ID NO: 48292 - protein, 190 aa, Unknown
  Obtained from environmental sample
  DOMAIN (46)...(156): Protein of unknown function (DUF820)
  misc_feature (1)..(190): Xaa is any amino acid
MSALPKEKEQRHFTYADYKEWELDEGERYELIDGEAFAMSAPSIRHQAVSGALFNQFYNYLQGKPCRVFYAPCDVRLFYEEDESDDTVVQPDIIVICDKDKIGEESCHGAPDLVIEILSPSNTATEMEKKFLLYHEAGVREYWIVDSKNNTLKVHRFRDSDTLTNTYKSADTVPVAILPGFSITLEQVFA

SEQ ID NO: 48293 - DNA, 450 bp, Unknown
  Obtained from environmental sample
  misc_feature (1)..(450): n is a, c, g, or t
gtgcttgccaaactgaagcgccagcaggaaacgcccgggttgaagaaatataccgacgaggagttcgggcatatcgtaacacagcataaagcgtttttcaatgtaaggaaaaccgggataacaattaccgataacagcgggctggatgtgtgctgcagcacaatagaatttgataacgaccttggcgcgttcaaagatgctatgaagacgaaaggctacatgatcattttgactaatgacctcgacaggcaaagtgaggaaatgctgtccctataccgcgacaaagaagcggtggagaacgcgttcgatgatatcaagaaccagcttgacatggatcggtttaatgtccaatcaaacgaatcgttgcagggcaaactctttnctggtctcctgtcgnctgnnatagtttctgtcatgcggaacgccctaaggaaaaagcggtctcagtaa

SEQ ID NO: 48294 - protein, 149 aa, Unknown
  Obtained from environmental sample
  misc_feature (1)..(149): Xaa is any amino acid
MLAKLKRQQETPGLKKYTDEEFGHIVTQHKAFFNVRKTGITITDNSGLDVCCSTIEFDNDLGAFKDAMKTKGYMIILTNDLDRQSEEMLSLYRDKEAVENAFDDIKNQLDMDRFNVQSNESLQGKLFXGLLSXXIVSVMRNALRKKRSQ

SEQ ID NO: 48295 - DNA, 969 bp, Unknown
  Obtained from environmental sample
  misc_feature (1)..(969): n is a, c, g, or t
gtgaatgctgccaagaagtgtatccaaacttttctcacaaacctcaaaggtaaagctcttcccttggaagaggatcttgcccggcaggtgaaaaaacttgtcggaaatatcataatcaactggatatatcaagttacggagcattacaattgttacccaataactgaggaagataaggagtacaccgatctcaaaggcgagacagtacattttaaaggacttaaaaattttcatgtggacaaaacctaccgcgatctttacctgcaggaagccgtcgagggcagttccgataagggcggtctgcttgccgaagacgatctccccgttacgcgccatgcctacggcgcgaccctcatagccgccgtcgtcacggaggattactggtttggcatacaaatcggcgacggaaagctcacagccttctaccctgacggaacttatgaccaacctgttccatgggatgacaaatgctacctcaatgtaacaacgtccatttgcgacgatgacgctgcggatcgggcaagagtgtatgttaaaaagcgcggcggagcggcagcctccatagacgcgataggggtgataaaaaaactggaagacagccgtcccttgccctctgcgattttcctgaacagcgacggagttgatgacagcttccccatcgaagacaacatggaacacgtggcaaagaagttctactaccccgtactgcgtatgtttatagagaacgacgacgatcccgcaaaaggctgggaaacggcggtaaaagaacttgccgattatcttcccgatctcagtaaacgaggctccggggacgacatctcggtagccggtatcattgacatggatgcgataaaagacgcgcctttccgttcgatgctcaaaaaagcaaaagtggaagccgaagaacgcacggcaatggagaaggaagaagggaaaaagccatanaagcggctgaagaagccagagtaa

SEQ ID NO: 48296 - protein, 322 aa, Unknown
  Obtained from environmental sample
  misc_feature (1)..(322): Xaa is any amino acid
MNAAKKCIQTFLTNLKGKALPLEEDLARQVKKLVGNIIINWIYQVTEHYNCYPITEEDKEYTDLKGETVHFKGLKNFHVDKTYRDLYLQEAVEGSSDKGGLLAEDDLPVTRHAYGATLIAAVVTEDYWFGIQIGDGKLTAFYPDGTYDQPVPWDDKCYLNVTTSICDDDAADRARVYVKKRGGAAASIDAIGVIKKLEDSRPLPSAIFLNSDGVDDSFPIEDNMEHVAKKFYYPVLRMFIENDDDPAKGWETAVKELADYLPDLSKRGSGDDISVAGIIDMDAIKDAPFRSMLKKAKVEAEERTAMEKEEGKKPXKRLKKPE

SEQ ID NO: 48297 - DNA, 429 bp, Unknown
  Obtained from environmental sample
  misc_feature (1)..(429): n is a, c, g, or t
atgcgttttttggggttttctttgccgcttgtctcttccgttacaagngtagtctcacgaaaaagagaacaagggcgttttgcccttgcccccgtaactttgggacttggagcgcttttggccatcagtatttttcctccccccgccgccgccgcggcaatttacgcccttgccttcggagacagcatctcgacgattaccggtaagtccctgggaaggttccgtccggcttttttgtccggtaaaagcgtcgagggctcacttgcctgttttgcggcgtccgccctggcctgctacctcgttttctccgacttaaaaaccgcgtttgcggttggcttcgcttcggtattggttgacgcgcttcctctccgggagtttgacaacattttgatgcctctggccgccggctttgcggcgctggttttttga

SEQ ID NO: 48298 - protein, 142 aa, Unknown
  Obtained from environmental sample
  misc_feature (1)..(142): Xaa is any amino acid
MRFLGFSLPLVSSVTXVVSRKREQGRFALAPVTLGLGALLAISIFPPPAAAAAIYALAFGDSISTITGKSLGRFRPAFLSGKSVEGSLACFAASALACYLVFSDLKTAFAVGFASVLVDALPLREFDNILMPLAAGFAALVF

SEQ ID NO: 48299 - DNA, 813 bp, Unknown
  Obtained from environmental sample
  misc_feature (1)..(813): n is a, c, g, or t
atgataattggtatagacatagccagtacaaccacaaaggccagtttcgctggaagaaaggcaggtagtaaaaaaaataagtaccagggccgaggacgcaattacctcggcttccggcgcttttggcaaaatcatcctgaaaacgggatcaggatgggcgacataaagcggattctgatcaccggggctggggcaaccaaaattgagggagagctgttcggcatccctacggaaaaggtaaacgagataaccgccataggcattggcggtatgtacctttccggacaggacaatatcatcattgccaacatagggacgggaaccgcaatcatcgaggcccaaagggacaggatcattcacctgggcggttcgggcgtgggcggcggtaccatcctcggtctggcaaaaaaactcctttcgctttcggattttaaggacgtcatgaagctggccggaaacgggaacctcgatcctgtcgatcttctactcgaagacattatggtagccgattttagctttctcggcaaaaaatctactgcctccaatttcgggaaaatgctggacacggcccggagcgaagacattgccctggggataataaatatggtctttcaggtaatcggcatgatttcggtttttgccgccaggagccggaatatcgacagggtaattgtcacaggctcgggcagccataacccgttgggacagaatgtacttgccggtattacgcgcatgcattcaatcacctttgaataccccgatgacgccgaatacactactgctgtgggcgcggggctatacggcagcaagtaa

SEQ ID NO: 48300 - protein, 270 aa, Unknown
  Obtained from environmental sample
  DOMAIN (1)...(269): Fumble
  misc_feature (1)..(270): Xaa is any amino acid
MIIGIDIASTTTKASFAGRKAGSKKNKYQGRGRNYLGFRRFWQNHPENGIRMGDIKRILITGAGATKIEGELFGIPTEKVNEITAIGIGGMYLSGQDNIIIANIGTGTAIIEAQRDRIIHLGGSGVGGGTILGLAKKLLSLSDFKDVMKLAGNGNLDPVDLLLEDIMVADFSFLGKKSTASNFGKMLDTARSEDIALGIINMVFQVIGMISVFAARSRNIDRVIVTGSGSHNPLGQNVLAGITRMHSITFEYPDDAEYTTAVGAGLYGSK

SEQ ID NO: 48301 - DNA, 831 bp, Unknown
  Obtained from environmental sample
  misc_feature (1)..(831): n is a, c, g, or t
ttgggtaacatctttgaattcgttatgggcgggggaaccaggcgctcaggcgatcacagaggagccagacaagggaaaaatatacgtcaggatattgagatatcttttaaggatgcggttttcggcacaaaggtcgaaatctcgtacagcagaaacgaatcctgccctgtttgtaagggctcaggcgcagccagcgggacaagcaaaaaaatttgtcccacctgcaagggaacgggccaggtacgcgagagcggcggtctttggtcagtgcctttgccttgtccgtcgtgcagaggccagggcgagattaatgaaaagccctgctctgaatgcgggggagccggtatacataagaaacgccataaaataatggttgacattccgccgggggtagaaaacggcgcacataagatagctcgcgggcagggcgatgcaggagcggccggcggccctgccggtgatctctatgtttttatccgcgtaaaaccccatgaattttttgagcgcaatggcgaagacctttactgcgccattccgatttctattacccaggcaagccttggcgcggagattcaagtggtaaacctcgaaggcaaatccatcaaggtaaaggttccaccgggaacacagacaggcaagctgctcgctcctatccgcaatgaaggcgtacccgtctcgggccgccgggggaacctgtatataaaggtgatggttcaggtaccgactaaactttcaaggcgtggacgggaactaatggaagagctttcgcgcgttgaaggggaaaaacatgtaccanaacagataccgctttcggagctctcgggacggtag

SEQ ID NO: 48302 - protein, 276 aa, Unknown
  Obtained from environmental sample
  DOMAIN (42)...(122): DnaJ central domain (4 repeats)
  misc_feature (1)..(276): Xaa is any amino acid
MGNIFEFVMGGGTRRSGDHRGARQGKNIRQDIEISFKDAVFGTKVEISYSRNESCPVCKGSGAASGTSKKICPTCKGTGQVRESGGLWSVPLPCPSCRGQGEINEKPCSECGGAGIHKKRHKIMVDIPPGVENGAHKIARGQGDAGAAGGPAGDLYVFIRVKPHEFFERNGEDLYCAIPISITQASLGAEIQVVNLEGKSIKVKVPPGTQTGKLLAPIRNEGVPVSGRRGNLYIKVMVQVPTKLSRRGRELMEELSRVEGEKHVPXQIPLSELSGR

SEQ ID NO: 48303 - DNA, 2091 bp, Unknown
  Obtained from environmental sample
  misc_feature (1)..(2091): n is a, c, g, or t
ttgatggccgagggtcgcggtttgcgcggcatgggcgtagaccttgaggacctaagctcgaacatagagaagaccataacctccgtgggcgggatgatgatggtggggcagatgctgccgttcacgccgcgggcgaagaaagtcttagagatcgcggcgaacgaggcgcggtcgatgtcgcacaagtacatcggcacggagcacctgcttcttgcgctgatgaaggacaccgagtcggcggcggccagcgcgcttgccgcggcggggcttgagtacgaccgcgtgaaggaggagatcggccacgttctgaagggcggagaggtgagcggcgcgccggccacgtctaaagagaagagcaagacgcccatgctcgaccacttcggccgcgacctcacggccatggcgcgggaggggaagcttgaccccgtcatcgggcgcgagaaggagatcgagagggtggtccagatcctcagccgccgcaaaaagaacaatccagtgttgatcggagagcccgggataggaaagacggcgatagtcgagggattggcgcagaaaatcatcgagaagagcataccgcaggtgcttgaaaacaagcgcgtcgtaaacctcgacatggcctctatggtcgcgggaactaagtaccgcgggcaatttgaggagcggcttaaggcgctcatgctggaactccagaaaaacgagaacgtcgtcatattcatagacgaactgcacacgatagtcggcgccggcggttcggagggcagtttagacgcttcgaacatcttcaagcccgccctctcccgcggcgagatacaatgcgtgggcgccacaacgctcgacgagttccgcaagtacatagagaaagacggcgctttggcgagacgcttccaaacgataatggttgacccgcccagcgtaaacgagacggtacagatactcgccggcctgcgccacaactacgaggagcaccacaaggtcacctactcggagaaagccatcgcaatggcggtcaaactttccgaccgatacatatcggatcgtttcctgcccgacaaggcgatagacgtgattgacgaggccggcgctcggaagcggctgtcgagtatggagatacccacggagatacgcgaaatcgaaaaacagatcgccgaggtgctccgcgagaaggagacggcggtagagaaccaagactttgagtcggcggcgaggttgcgcgatatgcaggagaagctaaacggcgccctcttggaggccaaggctctgtggcgcagggccaaagccgaggagcggctcttggtcgacgagtcgacgattacggaggtcatagccactatgaccgggcatccctctggcgcggctcgcgagggaagaggcgaagaaggttctgcatttggaggacgaattgcgtcagagggtcataggccaagacgaggcgttgagcgccgtggcgaggagcatcaggcgttcgcgcgcgggtctgcacaacacccgtcggcccatcgcttcttttatatttttggggccgaccggcgtggggaagacggagctcgccaaggctgtcgccaaggcgctgttcgacacggaggacgctttggtgcgcatcgatatgtccgagtacatggagaagttcgcggtatcgcgcctcgtcggcgcgccgccgggatacgtcggctacgaggagggcgggcagctcaccgagaagatccgcaaaaagccctactccgtcatactgctcgacgagatcgagaaggcccatcccgacgtcttcaaccttctgttgcagatactcgacgacgggctcctgaccgattcttacggccgccacgtaaacttcaagaatacgatcatcatcatgacctccaacgccggttcgcgcgacgtcaagaagatggggacggtgggtttcggcaggaacagcgccgacaccgactacgaggcgatgcgcggcaaggttatggacgagatgaagcgcatattcaatccggagttcataaaccgcatagacgagacgatagtcttcgcgcctctcggcaaggacgagatcgccaaaatagtcgatattcagttgaacgaggtgcaggagcgccttgttga

SEQ ID NO: 48304 - protein, 696 aa, Unknown
  Obtained from environmental sample
  DOMAIN (378)...(413): UvrB/uvrC motif
  misc_feature (1)..(696): Xaa is any amino acid
MMAEGRGLRGMGVDLEDLSSNIEKTITSVGGMMMVGQMLPFTPRAKKVLEIAANEARSMSHKYIGTEHLLLALMKDTESAAASALAAAGLEYDRVKEEIGHVLKGGEVSGAPATSKEKSKTPMLDHFGRDLTAMAREGKLDPVIGREKEIERVVQILSRRKKNNPVLIGEPGIGKTAIVEGLAQKIIEKSIPQVLENKRVVNLDMASMVAGTKYRGQFEERLKALMLELQKNENVVIFIDELHTIVGAGGSEGSLDASNIFKPALSRGEIQCVGATTLDEFRKYIEKDGALARRFQTIMVDPPSVNETVQILAGLRHNYEEHHKVTYSEKAIAMAVKLSDRYISDRFLPDKAIDVIDEAGARKRLSSMEIPTEIREIEKQIAEVLREKETAVENQDFESAARLRDMQEKLNGALLEAKALWRRAKAEERLLVDESTITEVIATMTGHPSGAAREGRGEEGSAFGGRIASEGHRPRRGVERRGEEHQAFARGSAQHPSAHRFFYIFGADRRGEDGARQGCRQGAVRHGGRFGAHRYVRVHGEVRGIAPRRRAAGIRRLRGGRAAHREDPQKALLRHTARRDREGPSRRLQPSVADTRRRAPDRFLRPPRKLQEYDHHHDLQRRFARRQEDGDGGFRQEQRRHRLRGDARQGYGRDEAHIQSGVHKPHRRDDSLRASRQGRDRQNSRYSVERGAGAPC

SEQ ID NO: 48305 - DNA, 585 bp, Unknown
  Obtained from environmental sample
  misc_feature (1)..(585): n is a, c, g, or t
gtgcagttcgtctatgaatatgacgacgttctcgtttttctggagttccagcatgagcgccttaagccgctcctcaaattgcccgcggtacttagttcccgcgaccatagaggccatgtcgaggtttacgacgcgcttgttttcaagcacctgcggtatgctcttctcgatgattttctgcgccaatccctcgactatcgccgtctttcctatcccgggctctccgatcaacactggattgttctttttgcggcggctgaggatctggaccaccctctcgatctccttctcgcgcccgatgacggggtcaagcttcccctcccgcgccatggccgtgaggtcgcggccgaagtggtcgagcatgggcgtcttgctcttctctttagacgtggccggcgcgccgctcacctctccgcccttcagaacgtggccgatctcctccttcacgcggtcgtactcaagccccgccgcggcaagcgcgctggccgccgccgactcggtgtccttcatcagcgcaagaagcaggtgctccgtgccgatgtacttgtgcgacatcgaccgcgcctcgttcgccgcgatctctaa

SEQ ID NO: 48306 - protein, 194 aa, Unknown
  Obtained from environmental sample
  misc_feature (1)..(194): Xaa is any amino acid
MQFVYEYDDVLVFLEFQHERLKPLLKLPAVLSSRDHRGHVEVYDALVFKHLRYALLDDFLRQSLDYRRLSYPGLSDQHWIVLFAAAEDLDHPLDLLLAPDDGVKLPLPRHGREVAAEVVEHGRLALLFRRGRRAAHLSALQNVADLLLHAVVLKPRRGKRAGRRRLGVLHQRKKQVLRADVLVRHRPRLVRRDL

SEQ ID NO: 48307 - DNA, 423 bp, Unknown
  Obtained from environmental sample
  misc_feature (1)..(423): n is a, c, g, or t
ttggttctctaccgccgtctccttctcgcggagcacctcggcgatctgtttttcgatttcgcgtatctccgtgggtatctccatactcgacagccgcttccgagcgccggcctcgtcaatcacgtctatcgccttgtcgggcaggaaacgatccgatatgtatcggtcggaaagtttgaccgccattgcgatggctttctccgagtaggtgaccttgtggtgctcctcgtagttgtggcgcaggccggcgagtatctgtaccgtctcgtttacgctgggcgggtcaaccattatcgtttggaagcgtctcgccaaagcgccgtctttctctatgtacttgcggaactcgtcgagcgttgtggcgcccacgcattgtatctcgccgcgggagagggcgggcttgaagatgttcgaagcgtctaa

SEQ ID NO: 48308 - protein, 140 aa, Unknown
  Obtained from environmental sample
  misc_feature (1)..(140): Xaa is any amino acid
MVLYRRLLLAEHLGDLFFDFAYLRGYLHTRQPLPSAGLVNHVYRLVGQETIRYVSVGKFDRHCDGFLRVGDLVVLLVVVAQAGEYLYRLVYAGRVNHYRLEASRQSAVFLYVLAELVERCGAHALYLAAGEGGLEDVRSV

SEQ ID NO: 48309 - DNA, 894 bp, Unknown
  Obtained from environmental sample
  misc_feature (1)..(894): n is a, c, g, or t
ttgacagattggccgagtcgaggaacgctggatggaacggcgcagcggccgcgcgcccaatatcgggtcgtaacccttgtcgacgagcagcttcttcatctcaggcgtaaagatcagtttgatgttccgatcaacaaggcgctcctgcacctcgttcaactgaatatcgactattttggcgatctcgtccttgccgagaggcgcgaagactatcgtctcgtctatgcggtttatgaactccggattgaatatgcgcttcatctcgtccataaccttgccgcgcatcgcctcgtagtcggtgtcggcgctgttcctgccgaaacccaccgtccccatcttcttgacgtcgcgcgaaccggcgttggaggtcatgatgatgatcgtattcttgaagtttacgtggcggccgtaagaatcggtcaggagcccgtcgtcgagtatctgcaacagaaggttgaagacgtcgggatgggccttctcgatctcgtcgagcagtatgacggagtagggctttttgcggatcttctcggtgagctgcccgccctcctcgtagccgacgtatcccggcggcgcgccgacgaggcgcgataccgcgaacttctccatgtactcggacatatcgatgcgcaccaaagcgtcctccgtgtcgaacagcgccttggcgacagccttggcgagctccgtcttccccacgccggtcggccccaaaaatataaaagaagcgatgggccgacgggtgttgtgcagacccgcgcgcgaacgcctgatgctcctcgccacggcgctcaacgcctcgtcttggcctatgaccctctgacgcaattcgtcctccaaatgcagaaccttcttcgcctcttccctcgcgagccgcgccagagggatgcccggtcatag

SEQ ID NO: 48310 - protein, 297 aa, Unknown
  Obtained from environmental sample
  misc_feature (1)..(297): Xaa is any amino acid
MTDWPSRGTLDGTAQRPRAQYRVVTLVDEQLLHLRRKDQFDVPINKALLHLVQLNIDYFGDLVLAERREDYRLVYAVYELRIEYALHLVHNLAAHRLVVGVGAVPAETHRPHLLDVARTGVGGHDDDRILEVYVAAVRIGQEPVVEYLQQKVEDVGMGLLDLVEQYDGVGLFADLLGELPALLVADVSRRRADEARYRELLHVLGHIDAHQSVLRVEQRLGDSLGELRLPHAGRPQKYKRSDGPTGVVQTRARTPDAPRHGAQRLVLAYDPLTQFVLQMQNLLRLFPREPRQRDARS

SEQ ID NO: 48311 - DNA, 831 bp, Unknown
  Obtained from environmental sample
  misc_feature (1)..(831): n is a, c, g, or t
gtgtcaaaggacatcctcaagcgtcatctgacacggcgctttgcccgtccgcctcttgccaggttgcgctatatcgccgttgacgaaatcagcgtgaagaaagggcacaagtatctgaccttggttatggatttgcaaagcggcgcggtggtattcgtgggggacggcaaaggcgctgaggcgcttgcgcctttttggcgggagttacgcagaacacgtgtgaaacttttggctgtggcaacggacatgagtgcggcatatattggagctgttttggaaaatcttcccggagtgcctttggttttcgaccattttcatgtggtcaagctgatgaatgaggcactgacagaggttcgccggagcttgtaccatgagttgcgcgacgtgatgcgccgaagggtgctcaagggaagccgctggattttgctgaagaatccggaaaacctttgcctggaacgggatgaagccaaacatttgcaggaagccttgcgcctgaacgagccgttggcgagcgcgtactacatgaaagaggatttacgtcagatatggaaccaagagaataagcacgaagcccaagtgatgcttgatagctggatagcccgtgcttttgcagcgggcatcgggccgctcatgcgcgtaggtaaaacccttgcggcttacaaattcggcatcctgaactggtacgaccatccgatttcctccggccctatggaaggcacgaacaacaagatcaaagtaatgaaacggatggcgtacggatacagagacatagaattcttcaaactcagaatcctcgccgtacacgaggcaaagtacgctctaaccggatga

SEQ ID NO: 48312 - protein, 276 aa, Unknown
  Obtained from environmental sample
  DOMAIN (24)...(122): Transposase
  misc_feature (1)..(276): Xaa is any amino acid
MSKDILKRHLTRRFARPPLARLRYIAVDEISVKKGHKYLTLVMDLQSGAVVFVGDGKGAEALAPFWRELRRTRVKLLAVATDMSAAYIGAVLENLPGVPLVFDHFHVVKLMNEALTEVRRSLYHELRDVMRRRVLKGSRWILLKNPENLCLERDEAKHLQEALRLNEPLASAYYMKEDLRQIWNQENKHEAQVMLDSWIARAFAAGIGPLMRVGKTLAAYKFGILNWYDHPISSGPMEGTNNKIKVMKRMAYGYRDIEFFKLRILAVHEAKYALTG

SEQ ID NO: 48313 - DNA, 330 bp, Unknown
  Obtained from environmental sample
  misc_feature (1)..(330): n is a, c, g, or t
atgtccacaagtttcatctaccatgctttcggcctgcaaggctatgcatacgtccaccagcaatttgtaggagggagcatcctttttcgtgtcaggcccaaggcaaagatggttcgctgttcccggtgcaggtcgtaccgggtcattcgccggggaatgagtgagcgcaggctgcgcacactgcccatagggttcaagcctgtgtggttgctggtggaaataccaagggttcaatgcctcgcctgtggatgcctacgccgtattcattcaggcattgccgcgtccagacggtggtatacgcgggccttcgagcgtttgtccctgcgctga

SEQ ID NO: 48314 - protein, 109 aa, Unknown
  Obtained from environmental sample
  misc_feature (1)..(109): Xaa is any amino acid
MSTSFIYHAFGLQGYAYVHQQFVGGSILFRVRPKAKMVRCSRCRSYRVIRRGMSERRLRTLPIGFKPVWLLVEIPRVQCLACGCLRRIHSGIAASRRWYTRAFERLSLR

SEQ ID NO: 48315 - DNA, 786 bp, Unknown
  Obtained from environmental sample
  misc_feature (1)..(786): n is a, c, g, or t
ttgcggacgcacagaatacgcaggttttggattttatggaagcgggggctcccacttctcttattcccaagttacgcgacatgctgggcgcgtttttgttccgcggggacgacgtttacaaatccgtctcggtgttgtccgggggtgagaaaagccgccttgccctgctgtacatgctgtaaaaccgctgaacctgctgatttggacgagcctacaaatcaccttgatctccactcaaaagacatactgctggagactctcaataaatttaaggggacgattgtttttgtttcacacgatagggcttttatggaggcgctgtccacgaaaacgcttgctttgtcagccgatggcggcggggcatcacgggcgcggctttactatgggaattacgcttattatctggagaagatagggactagggactggggactggggactagtgaagattcttgttcgcaatctaagcgtgttaataacacgactggattgcataccaaaatccccgatccccgatccctgatccctgatccccgatctgcgatagaacaaagggcgctttccaagcagaggcaggcggagttgcgaaggctccagcggcgggaggcggaattgcttaacgccattgaggggcttgaaaacgaaaaatcccggctggaggcggaattgtccctgccggaggtgtattcaaacggggaaaaggcgagggctgtaaaactgaggctggatgaatgtgtcgcggagattgaggccaagacgggggagtgggaggcaattaacaattaa

SEQ ID NO: 48316 - protein, 261 aa, Unknown
  Obtained from environmental sample
  misc_feature (1)..(261): Xaa is any amino acid
MRTHRIRRFWILWKRGLPLLLFPSYATCWARFCSAGTTFTNPSRCCPGVRKAALPCCTCCKTAEPADLDEPTNHLDLHSKDILLETLNKFKGTIVFVSHDRAFMEALSTKTLALSADGGGASRARLYYGNYAYYLEKIGTRDWGLGTSEDSCSQSKRVNNTTGLHTKIPDPRSLIPDPRSAIEQRALSKQRQAELRRLQRREAELLNAIEGLENEKSRLEAELSLPEVYSNGEKARAVKLRLDECVAEIEAKTGEWEAINN

SEQ ID NO: 48317 - DNA, 1029 bp, Unknown
  Obtained from environmental sample
  misc_feature (1)..(1029): n is a, c, g, or t
ttgcaggaacagattgaaaattcaggctattacagaagagaagcggcgatttctttggtnttagccggtcttggtttttccgtttccgacataaaccgcgaaacaggtgaattttccggcggctggcaaatgcgaatcgccctcgctaaagttcttctggaacaacccgacattctgcttttggacgagccgacaaattaccttgatatcgaggcaaggacatggcttgaaaaatggctggaaagttttcccggaggttatcttttagtttcgcatgacaggtattttcttgatgtctgcgttaacgaggtatacgaactgtttcagggaaatctgaaacgttatgccggaaattacacctcttacgaaaaagtccgcaaaacagaactcgcgtcccttgttaaacgctatgatgaacagcaggaagaaattataaaaaccgaggctcttatccgccgtttccgctacaaggcaagcaaagcggctttcgctcaggagttgatcaagcgccttgagaaaatggagcgaattgaaattcccgaatcgttaaaaaagataaacatcactttcccgccgccgccccattcagggaatatcgcacttacgctggaatgtatagataaaagttacggggaacacaaagtactttccggcgtcgaactgtgccttgaagcgggagaaaggcttgtcgtcgcgggtcccaacggagccggcaaaagcacgctcttgcgtattatagcgggccaagacaaagattttaaaggtaatgtaaaatacggttccggtatacgcgccggatatttttcccagactgaggccgaagagcctacagcgctctcttctaaccttgcggacgcacagaatacgcaggttttggattttatggaagcgggggctcccacttctcttattcccaagttacgcgacatgctgggcgcgtttttgttccgcggggacgacgtttacaaatccgtctcggtgttgtccgggggtgagaaaagccgccttgccctgctgtacatgctgtaa

SEQ ID NO: 48318 - protein, 342 aa, Unknown
  Obtained from environmental sample
  DOMAIN (2)...(110): ABC transporter
  misc_feature (1)..(342): Xaa is any amino acid
MQEQIENSGYYRREAAISLVLAGLGFSVSDINRETGEFSGGWQMRIALAKVLLEQPDILLLDEPTNYLDIEARTWLEKWLESFPGGYLLVSHDRYFLDVCVNEVYELFQGNLKRYAGNYTSYEKVRKTELASLVKRYDEQQEEIIKTEALIRRFRYKASKAAFAQELIKRLEKMERIEIPESLKKINITFPPPPHSGNIALTLECIDKSYGEHKVLSGVELCLEAGERLVVAGPNGAGKSTLLRIIAGQDKDFKGNVKYGSGIRAGYFSQTEAEEPTALSSNLADAQNTQVLDFMEAGAPTSLIPKLRDMLGAFLFRGDDVYKSVSVLSGGEKSRLALLYML

SEQ ID NO: 48319 - DNA, 1359 bp, Unknown
  Obtained from environmental sample
  misc_feature (1)..(1359): n is a, c, g, or t
atggaaaatgaaaatccttttagtactccaattaaaataaaagagccgcagaataagctccccgattttttaatggaaaatttgccagaacatttgcaggctacccttagagagcttggttggaacgagctaatgcctgtgcaaaagaaaaccattccctatatgatgcaaggcagggatatgctgattcagtctaaaaccggctctggaaaaacaggtgcttttttgctgcctctttttcaggttatagttgaagagcatatatttccgcaggctcttattttggttcccacccgcgagctcgcattgcaggttcacggcgaggcagaaaagctctcaaaaggcacgggcattcgctcttgcgcaatttttggcggcgttggctttgacaaccaaattcacgcgctgagaaccggagtgcatataatagttgccacccctggcaggcttttagaccacgcccaaagaggcaacatagattttggaagcattcgcgatttgattatggacgaggcagacgaaatgctcggtatgggtttttatccagatatgcaacgcgtgcgccgctttttgccaaaagaaatttcttgcactatgttcagtgccacaattcctcaaaccgtaaaaagtttagctagggaatttcagcgcccaaatgcggattttctctccctctcttacgaccaagttatagcaaaaaatttggaacaccgctactatgcctccgatgcaatgggcaaggattctctcttgataaaaattttagaatgggaaaatccagagagttgcatggttttttgcaatatgaaaaaagacgttgcatatttggaacaagttttgaacgattacggttttgccgccaaagcactttccggtgatatttctcaaaaagagagagagcaagttttgggagaattcagagagaacaaactgaaacttttgatatgcacagatgttgccgcacgtggcatagatgtaacccacgtaactcacgttattgtttacgaccatccgagcgcccacgaggtttatgtacacagaagtggcagaactgcaagggctggcagaagcggtctttctatctcgctcataaccccggtgnaagaaattgagattcaaaaaaccgctgcggattttggcataaacttcataaaaatgccacccataagcgaagaagaactagcaagccgtgtgcgccaaagagcagaggcaaaacttgaccgcgagcgcagatttttggggcaaaagcaaaacgaaagaatgcgccgttatattccaatggtagaagaactttcgcaaaacacagaaggcaaagaactgctagcctatttgcttgactcgttttactggaaaccttag

SEQ ID NO: 48320 - protein, 452 aa, Unknown
  Obtained from environmental sample
  DOMAIN (279)...(355): Helicase conserved C-terminal domain
  misc_feature (1)..(452): Xaa is any amino acid
MENENPFSTPIKIKEPQNKLPDFLMENLPEHLQATLRELGWNELMPVQKKTIPYMMQGRDMLIQSKTGSGKTGAFLLPLFQVIVEEHIFPQALILVPTRELALQVHGEAEKLSKGTGIRSCAIFGGVGFDNQIHALRTGVHIIVATPGRLLDHAQRGNIDFGSIRDLIMDEADEMLGMGFYPDMQRVRRFLPKEISCTMFSATIPQTVKSLAREFQRPNADFLSLSYDQVIAKNLEHRYYASDAMGKDSLLIKILEWENPESCMVFCNMKKDVAYLEQVLNDYGFAAKALSGDISQKEREQVLGEFRENKLKLLICTDVAARGIDVTHVTHVIVYDHPSAHEVYVHRSGRTARAGRSGLSISLITPVXEIEIQKTAADFGINFIKMPPISEEELASRVRQRAEAKLDRERRFLGQKQNERMRRYIPMVEELSQNTEGKELLAYLLDSFYWKP

SEQ ID NO: 48321 - DNA, 417 bp, Unknown
  Obtained from environmental sample
  misc_feature (1)..(417): n is a, c, g, or t
ttgcgcataataggcggtgaatttggagccacaacaggcaggcctcgccgctgcggttggttcgatgcccccgttgttcgcaaggcagccgccgtgaatggcttaactcatcttgcaataaccaaactagacgtgctagatacttttaaagagataaaaatctgcacaaactataaaatggaaggcaaggaattgcagacttttccaaacggattaacgcaagttggcctttgcgaacctgtttacgaaactttgccgggctgggagtgctcaaccgccaaatgccgctcttgggatgaattgcccccaaatgcgcaaaagtatttaaccagaatttccgaactcgcaggcgttaaaataggaatgatttccattggagcaaagcgtgatgaatctattgtattggatattaattga

SEQ ID NO: 48322 - protein, 138 aa, Unknown
  Obtained from environmental sample
  DOMAIN (1)...(134): Adenylosuccinate synthetase
  misc_feature (1)..(138): Xaa is any amino acid
MRIIGGEFGATTGRPRRCGWFDAPVVRKAAAVNGLTHLAITKLDVLDTFKEIKICTNYKMEGKELQTFPNGLTQVGLCEPVYETLPGWECSTAKCRSWDELPPNAQKYLTRISELAGVKIGMISIGAKRDESIVLDIN

SEQ ID NO: 48323 - DNA, 462 bp, Unknown
  Obtained from environmental sample
  misc_feature (1)..(462): n is a, c, g, or t
atgggactttttacatcaatcaacatagcgtcttcgggaatgtcggcgcagagaacaagaagcgacgtcatagcggataacataaccaacgcgtccaccacccgcactgcggaaggaggccccttccgccgttcgcggacgataatgcggccaagggtttcaagcccctattggcgatccccgtttctgcctgagggcatggacaacggcgtgggagccggtgtcaggatagcggagattcagaaggattacaaaacggaaaacaggcttgtgtatgatccgacccatcctgacgcgatcaagagcggcccaagggaagggtatgttgagatgcccaatgtggacatagtaagcgaaatggtggatttaatagccgcttcaagagcgtacgaagccaacgcttcggtggttgagggggccaagtccatgttccaaaaggctttggaaataggaagtagataa

SEQ ID NO: 48324 - protein, 153 aa, Unknown
  Obtained from environmental sample
  DOMAIN (7)...(37): Flagella basal body rod protein
  misc_feature (1)..(153): Xaa is any amino acid
MGLFTSINIASSGMSAQRTRSDVIADNITNASTTRTAEGGPFRRSRTIMRPRVSSPYWRSPFLPEGMDNGVGAGVRIAEIQKDYKTENRLVYDPTHPDAIKSGPREGYVEMPNVDIVSEMVDLIAASRAYEANASVVEGAKSMFQKALEIGSR

SEQ ID NO: 48325 - DNA, 402 bp, Unknown
  Obtained from environmental sample
  misc_feature (1)..(402): n is a, c, g, or t
atggtcatagacaataccttcagcaaaaccgtcgatttgcttcaccggggattgagtgtcgcttcgctgcgagaatccgtaattggcaataacctggcgaatgcggatgttcccaactttaagcgcacggatgtgaactttgaaagcgagcttaaacgggctttggataccgaaaagcaaaagccggttttggcgcttaacctgacccacccgaatcatatttccaactggaatcccaggaactaccagcaggtggaaccccggcgtgtgttggattatttaagccagtcggacaacaacggcaataatgtggacgcggaggaagaattcaacctgctcctcaaaaatcagttgaggtatatgctgatggcccaatccattactttgagttcagccaggtaa

SEQ ID NO: 48326 - protein, 133 aa, Unknown
  Obtained from environmental sample
  DOMAIN (11)...(41): Flagella basal body rod protein
  misc_feature (1)..(133): Xaa is any amino acid
MVIDNTFSKTVDLLHRGLSVASLRESVIGNNLANADVPNFKRTDVNFESELKRALDTEKQKPVLALNLTHPNHISNWNPRNYQQVEPRRVLDYLSQSDNNGNNVDAEEEFNLLLKNQLRYMLMAQSITLSSAR

SEQ ID NO: 48327 - DNA, 465 bp, Unknown
  Obtained from environmental sample
  misc_feature (1)..(465): n is a, c, g, or t
gtgaacaccaagtggggcgctgtaaatacagagcacatcctttttattgccgccggggcctttaacatcgccaagccttcggatttgatcccagagctgcaagggcgttttccccttagggtagagcttgactcgctcggaaaggacgatttccttcgaatcctgaccgaaccaaaaaacgcccttaccaagcagtatacggagcttatggccaccgagaacgtggaaatagaattcactcccgaagccattgaacgccttgccgccctggccgccgaggttaactcaaagcttgaaaacataggcgcgcgcaggctccatacgataatggaggcccttctggaggaactttcctttgaagcgccggacatagggcctgccaaggtgcctattaccgtggattatgtgaacgaaaagctcgtcaatctggtaaacgatcaagacttgggacggtacattctgtga

SEQ ID NO: 48328 - protein, 154 aa, Unknown
  Obtained from environmental sample
  misc_feature (1)..(154): Xaa is any amino acid
MNTKWGAVNTEHILFIAAGAFNIAKPSDLIPELQGRFPLRVELDSLGKDDFLRILTEPKNALTKQYTELMATENVEIEFTPEAIERLAALAAEVNSKLENIGARRLHTIMEALLEELSFEAPDIGPAKVPITVDYVNEKLVNLVNDQDLGRYIL

SEQ ID NO: 48329 - DNA, 555 bp, Unknown
  Obtained from environmental sample
  misc_feature (1)..(555): n is a, c, g, or t
gtgatggcggataaaacacgaatacgggcgacaacggtactggctgtcaggcgttacgggaaagtcgcgatggccggggacggtcaggttaccttcggcgagacggttttgaaaaaaaacgccaaaaaggtgcgccgccttatggacggcaaagtcctctgcggttttgccggggcgaccgccgatgttttcgccctccacgatcgctttgagacaaaactcaaagagtactcaggcgatcttgtcagggcggcggtggagcttgcgagggaatggagaacggacagggccctccgccgtttggaagccatgctccttgttgccgacatcggcaagaccctgctcatttccggaaccggcgacgtaatagaaccggcggaggatgccctcgccatcggctcaggctcaaactacgcctacgcggcggcgttggcgtacctggacgcctcggaactttcggccagggaaatcgccgagcgctcgctaaaaatagcggggaatatctgtgtatatacaaacgaaaacttaacaatagaggaacttgcgaatgaatga

SEQ ID NO: 48330 - protein, 184 aa, Unknown
  Obtained from environmental sample
  DOMAIN (8)...(181): Proteasome A-type and B-type
  misc_feature (1)..(184): Xaa is any amino acid
MMADKTRIRATTVLAVRRYGKVAMAGDGQVTFGETVLKKNAKKVRRLMDGKVLCGFAGATADVFALHDRFETKLKEYSGDLVRAAVELAREWRTDRALRRLEAMLLVADIGKTLLISGTGDVIEPAEDALAIGSGSNYAYAAALAYLDASELSAREIAERSLKIAGNICVYTNENLTIEELANE

SEQ ID NO: 48331 - DNA, 312 bp, Unknown
  Obtained from environmental sample
  misc_feature (1)..(312): n is a, c, g, or t
atggcgagggcatcctccgccggttctattacgtcgccggttccggaaatgagcagggtcttgccgatgtcggcaacaaggagcatggcttccaaacggcggagggccctgtccgttctccattccctcgcaagctccaccgccgccctgacaagatcgcctgagtactctttgagttttgtctcaaagcgatcgtggagggcgaaaacatcggcggtcgccccggcaaaaccgcagaggactttgccgtccataaggcggcgcacctttttggcgttttttttcaaaaccgtctcgccgaaggtaacctga

SEQ ID NO: 48332 - protein, 103 aa, Unknown
  Obtained from environmental sample
  misc_feature (1)..(103): Xaa is any amino acid
MARASSAGSITSPVPEMSRVLPMSATRSMASKRRRALSVLHSLASSTAALTRSPEYSLSFVSKRSWRAKTSAVAPAKPQRTLPSIRRRTFLAFFFKTVSPKVT

SEQ ID NO: 48333 - DNA, 705 bp, Unknown
  Obtained from environmental sample
  misc_feature (1)..(705): n is a, c, g, or t
ttgatgattggccctaccggagtcggcaaaaccgaaatcgcaaggcggcttgcgaaactggcaggttcaccctttttaaaggtagaggcaaccaagtataccgaggtaggctatgtgggccgcgatgtggaatcaatgatccgcgatcttatggctgccggggttcagatggtaaaacaggaaatgcagcaaagctttaccgccgaggcggaaaagcatgttgaagaggcgctgcttgaccttttactacctggctccggaaaaaaacaaaaagaaaaaagccaacccggcccgattgtaaagcccatggggactttttccataccgaccaacggggatcacaattcatctcttatgggaacagccatccaaataggaatcccgcgtgaaactgccgagagcgcggaagaaccggaagaagaagcacaggatgaacaaaccgaagcggaaaaaaccccgaacccgaccagggaaaaattcagggccatgctcagggaaggaaagtttgaggacaaaaccgttgagataattatgagccaaagcccgcagtttcccagcattgagatgatgggtggcagcatggaagatttggagtccagtctttctggaattgccggttttttcggtgggggtaaaaagaagaagcgcgttacagtcagccgtgcaagggagattctgtttagcgaggaatcggaaaagctttag

SEQ ID NO: 48334 - protein, 234 aa, Unknown
  Obtained from environmental sample
  misc_feature (1)..(234): Xaa is any amino acid
MMIGPTGVGKTEIARRLAKLAGSPFLKVEATKYTEVGYVGRDVESMIRDLMAAGVQMVKQEMQQSFTAEAEKHVEEALLDLLLPGSGKKQKEKSQPGPIVKPMGTFSIPTNGDHNSSLMGTAIQIGIPRETAESAEEPEEEAQDEQTEAEKTPNPTREKFRAMLREGKFEDKTVEIIMSQSPQFPSIEMMGGSMEDLESSLSGIAGFFGGGKKKKRVTVSRAREILFSEESEKL

SEQ ID NO: 48335 - DNA, 984 bp, Unknown
  Obtained from environmental sample
  misc_feature (1)..(984): n is a, c, g, or t
ttgagtttttcaataatgttgatctggttcttttcaaaaagcatatccaccccgcttaaaacccttgccgcggcggcgcggaaaattgaaggcggcacattcgaggtggaactacagccgaaaggccaggacgaaatcggcgtattaaccgccagtttccgaaggatgagtttcgccctgaatatattcggcagatttaccaacaaggaaatcgccataaaagccatgcgcggccatatcaaacccggaggactgccgaaacacggcactattttcttttccgacatccgaggctttacggaaaaatcggaaatctttaccaaagtattcggcgatgacgcctccaataaaatagtccactggcttaaccattatttttccaggatggtcgagtgcgtggaaaaaaccaacggtatcattgacaagtttataggcgacgcggtaatggcccattggggaacagcctatacgtcgggaaaaccggcgctggacgcgttaaactgcgtaatggcagctcttatgatgcgtaaagcgttatacgaaatgaacagggaacgcagaaagggcgatcccgctaatcccccaatccgtatcggctgcggcataaataccggtattattaccgccgggcagctcggaagcgaaaaacgcatggaatacaccgttataggcgatccggtaaaccttgcttcccgcattgaagccctgaacaagccgctggggacagatatacttatcagcgaagacacttataatcttgttaaaaaatgtatcattaccgaagaaatgccgtcagtcaccgtaaaaggcaaagaaaagccggtgcgtatatttgctttaataaatattgtcggaattaccaaaggcccaaaaaccctggccgaggtacgcagccttcttggcatagaagcgccggacatcgctagtgtcgatgttaatgccgatgagaaaaaatacaagataggcggaggcgatcaggaataa

SEQ ID NO: 48336 - protein, 327 aa, Unknown
  Obtained from environmental sample
  SIGNAL (1)...(23)
  DOMAIN (1)...(62): HAMP domain
  misc_feature (1)..(327): Xaa is any amino acid
MSFSIMLIWFFSKSISTPLKTLAAAARKIEGGTFEVELQPKGQDEIGVLTASFRRMSFALNIFGRFTNKEIAIKAMRGHIKPGGLPKHGTIFFSDIRGFTEKSEIFTKVFGDDASNKIVHWLNHYFSRMVECVEKTNGIIDKFIGDAVMAHWGTAYTSGKPALDALNCVMAALMMRKALYEMNRERRKGDPANPPIRIGCGINTGIITAGQLGSEKRMEYTVIGDPVNLASRIEALNKPLGTDILISEDTYNLVKKCIITEEMPSVTVKGKEKPVRIFALINIVGITKGPKTLAEVRSLLGIEAPDIASVDVNADEKKYKIGGGDQE

SEQ ID NO: 48337 - DNA, 354 bp, Unknown
  Obtained from environmental sample
  misc_feature (1)..(354): n is a, c, g, or t
gtggccgaacttgtcgtactgggcgcgcttctgcggatccttcagaatctcgtaggcctccgtggcctcgcgaaacttctccaccgcggtcttgtctccgggatttttgtcgggatggtacttcacggcgagcttgcggtacgccttctttatatcgtcgtcggaagcgcccttgggaacacccagtatgtcgtaatagtccgcttttgccatattcaacccccattgccgctggaaacgaccacacgggcgtgctttatcactttgtcgttcaaacgatacccgtgctcaaagacctccgcgacgcagtcggcaggtatctgtgcgttgggcgccttcatcagcgcctcgtga

SEQ ID NO: 48338 - protein, 117 aa, Unknown
  Obtained from environmental sample
  misc_feature (1)..(117): Xaa is any amino acid
MAELVVLGALLRILQNLVGLRGLAKLLHRGLVSGIFVGMVLHGELAVRLLYIVVGSALGNTQYVVIVRFCHIQPPLPLETTTRACFITLSFKRYPCSKTSATQSAGICALGAFISAS

SEQ ID NO: 48339 - DNA, 882 bp, Unknown
  Obtained from environmental sample
  misc_feature (1)..(882): n is a, c, g, or t
atggtgttttgggggccgccgggctgcggaaaaacaagccttgcaaatgttatcaagaacctcggtaaaaaacgatttgtagctatatccgccgtcacaagcggagttaaagacgtaaaaacaattttggacgaagcaaaaacttataaggaaaacaacacaaaaacaatactgttcatagacgaaatacaccgctttaacaaagcgcagcaagattcccttttgggtgcggtggaaaacggaaccataactttgattggagccacaacggaaaaccccggttttgaggtgaactccgctttgctctcccgttgccaactgatattatttggccctctgcaagaacaggatatgcaaaacctcatggaaagcgcattgcacacccatccaagaggccttaagagaaaagatttgagcatatcaccagaggcagctcaaaaattaattgggcaagccgatggcgatgcgcgctttttgctgaaccagttggaatggattgccgcaaccgttcagggagaaacggagataacgctggaactgatggaagaaattcagtataaaaaaccgctccgctacgacaagcacggcgaagagcattacaaccttataagcgttttgcataaagccgtcaggggcagtgatacgcaagctgcagtttattggctccacagaatgttggacggcggcgaagaccctcgctatattttgcgccgccttatgcgaatggcaatggaagatattgggcttgcagaccccaacgctcttttgctagcaaccgcagctcgcgaagcctttgattttatgggcgtgccagaaggcttaattgcccttgatgaattgaccgtttatctgagccttgctccaaagagcaatagcccttga

SEQ ID NO: 48340 - protein, 293 aa, Unknown
  Obtained from environmental sample
  DOMAIN (1)...(113): ATPase family associated with various cellular activities (AAA)
  misc_feature (1)..(293): Xaa is any amino acid
MVFWGPPGCGKTSLANVIKNLGKKRFVAISAVTSGVKDVKTILDEAKTYKENNTKTILFIDEIHRFNKAQQDSLLGAVENGTITLIGATTENPGFEVNSALLSRCQLILFGPLQEQDMQNLMESALHTHPRGLKRKDLSISPEAAQKLIGQADGDARFLLNQLEWIAATVQGETEITLELMEEIQYKKPLRYDKHGEEHYNLISVLHKAVRGSDTQAAVYWLHRMLDGGEDPRYILRRLMRMAMEDIGLADPNALLLATAAREAFDFMGVPEGLIALDELTVYLSLAPKSNSP

SEQ ID NO: 48341 - DNA, 300 bp, Unknown
  Obtained from environmental sample
  misc_feature (1)..(300): n is a, c, g, or t
ttgctccaaagagcaatagcccttgaggttatgggcgcaaaagtgaacaaatgcatcaggcaaactggaacattgcccgtgccaagggcattcagaaatcccgtcacaaaagtaggcaaagatttaggctatggcaaaggctatgaatacgaccacgacgtgcaaggcgcttacgctgggcaagagcatctgccagaaaaattaaaaggcacaaaattctacgaacccactgcgtatgggagggaaaagacgttgggagaaagaatggcggagttggaaaaattgtccaaaaaatcctga

SEQ ID NO: 48342 - protein, 99 aa, Unknown
  Obtained from environmental sample
  misc_feature (1)..(99): Xaa is any amino acid
MLQRAIALEVMGAKVNKCIRQTGTLPVPRAFRNPVTKVGKDLGYGKGYEYDHDVQGAYAGQEHLPEKLKGTKFYEPTAYGREKTLGERMAELEKLSKKS

SEQ ID NO: 48343 - DNA, 984 bp, Unknown
  Obtained from environmental sample
  misc_feature (1)..(984): n is a, c, g, or t
ttgaaagtaattctctctcctatgcacggcgttacggatttgccgtttcgccgtttgataagggagctttccggtgcccacgctccgttttttgtgtcggaatttctctccacgggcagttccgtctttttaactccatctaatttgagagccatcaggttctgtaaagaagaggagcctttttgcgcacagatttttgggcataatgccgagaggctggcaagtgcggctttgcaggcgcaggaacggggagcggcttttgttgagctaaacgctggctgcccagctcctaaggttgcaaacaaaggttcgggttcgggtttgctcagagacctgcccaatttgcaaaaaattttacattcaattaaaagtgttttaaaagttccgctattcttaaaatgccgccttggctgggacgaaagttccatagtgataaacgagattttggaaattgcggaaggctgtggtgtggaacaattaaccgtgcacggaaggacaaaggtgcagggttataaaggctctgcgaattgggatgccataggcgaggttgctgcaaaggcaaaaattcccgttattgggaacggcgatataaacaacgcggaaatagctatggaaaggataaaaaattacggcgtgaaaggaatttccgttgggcgtgcggctctgcataacccgtggatttttttgcagatagcggatgctatggagggcagggaacccgcggaaataacgggctcgcaggtttgcaacgccatttttcgctacgaagaattgttaagggaagataacctaagagctgggcaaatattaggcaggctaaaacagatttccgcaaggctttgcttgggttttaatgcggcaatgccggaatttcgcttaaaagttttgcgcagcgaaaactgtcaggattttttggacaatttttccaactccgccattctttctcccaacgtcttttccctcccatacgcagtgggttcgtag

SEQ ID NO: 48344 - protein, 327 aa, Unknown
  Obtained from environmental sample
  DOMAIN (4)...(309): Dihydrouridine synthase (Dus)
  misc_feature (1)..(327): Xaa is any amino acid
MKVILSPMHGVTDLPFRRLIRELSGAHAPFFVSEFLSTGSSVFLTPSNLRAIRFCKEEEPFCAQIFGHNAERLASAALQAQERGAAFVELNAGCPAPKVANKGSGSGLLRDLPNLQKILHSIKSVLKVPLFLKCRLGWDESSIVINEILEIAEGCGVEQLTVHGRTKVQGYKGSANWDAIGEVAAKAKIPVIGNGDINNAEIAMERIKNYGVKGISVGRAALHNPWIFLQIADAMEGREPAEITGSQVCNAIFRYEELLREDNLRAGQILGRLKQISARLCLGFNAAMPEFRLKVLRSENCQDFLDNFSNSAILSPNVFSLPYAVGS

SEQ ID NO: 48345 - DNA, 759 bp, Unknown
  Obtained from environmental sample
  misc_feature (1)..(759): n is a, c, g, or t
gtggccgctcaatacgaatcgtggggctggcgtgtttataacgtggatggtcacaatatagacgaactcagaacggctcttgcagcagcttatgcagaaacagaaaaaccagttctcataataggcacttccattatgggaaaagggattaaagatgcacagaacaatgcttttgaaagcaaagtttcaactcacgggcaacctatagatgcggctggagcttccaccgctcaaaccatacagagccttggcggagacccgcaaaatccctttgttatttggcccgaagttaaagaattctttgagcatcgcttgggagaactgcaaaaagaagccgattcttggcaacacagatttgaaacttggaagggaacctatccaaacttggcggcagatttagagaactggcaaaaaaacagagcacccgttttggatttatcggttgttccgcaaaaacaaggcgttgcaacaagggtgaactccggtgctattttatcttggcttgcagataaccaaaaaaatatgatctgctcttcggcagacctttccaacagcgataacacacaagcatttttggataaaacaggcatattcaaaccagacgatttcagtggagcgtttttgcaagcaggagttgccgagttaactatgggttctgtggcctgcggcattgttttgcacggagaatttaccgcagcttgcgcaactttttttgtggtcagcgattacatgaagcccgttttaggcttgcatcgctaa

SEQ ID NO: 48346 - protein, 252 aa, Unknown
  Obtained from environmental sample
  misc_feature (1)..(252): Xaa is any amino acid
MAAQYESWGWRVYNVDGHNIDELRTALAAAYAETEKPVLIIGTSIMGKGIKDAQNNAFESKVSTHGQPIDAAGASTAQTIQSLGGDPQNPFVIWPEVKEFFEHRLGELQKEADSWQHRFETWKGTYPNLAADLENWQKNRAPVLDLSVVPQKQGVATRVNSGAILSWLADNQKNMICSSADLSNSDNTQAFLDKTGIFKPDDFSGAFLQAGVAELTMGSVACGIVLHGEFTAACATFFVVSDYMKPVLGLHR

SEQ ID NO: 48347 - DNA, 756 bp, Unknown
  Obtained from environmental sample
  misc_feature (1)..(756): n is a, c, g, or t
ttgcgcaactttttttgtggtcagcgattacatgaagcccgttttaggcttgcatcgctaatggctttgcctgttaaatttttattcacccacgatagtttcagggttggcgaagatggtcccacccacgagcctgtggagcaagaagcacaaatacgcctattggaaaatatgaacctgccaaacggcaagccttccatgctggttctaagacccgcagatgctaacgaaacaacgcttgcttgggaaatggcaatggcaaacggggatagccccacagcccttatattgtctaggcaaacgatgccaccgctggagaatccacattcaaaagcctgtgcttcaggttatattgtgcaaaacgcagaaaatccaaacttgacatttgccgccaacggctctgatgtttatctgtgctgccaagcggcggagctgctccgcaaagaaaaaatttccgttagggttgtgagcattatgagcccaaagctattcttggatttgccgcaaaaagagcgcgaggcgttgataccccgctggggagctgcttatgccgtttccagtggcttgccttctgtatttgctccggttgttggtcccttgggttattcgtggggtttgtctgaatttggaaaatctgcaccctttgctgttttggaaaaagaatttggctacacgcctcaggcaatagcagataaggcaaaggcatatttggaagagtataaggaaatgcgaaaagagttgaaagcgaggaattga

SEQ ID NO: 48348 - protein, 251 aa, Unknown
  Obtained from environmental sample
  DOMAIN (1)...(104): Transketolase, pyridine binding domain
  misc_feature (1)..(251): Xaa is any amino acid
MRNFFCGQRLHEARFRLASLMALPVKFLFTHDSFRVGEDGPTHEPVEQEAQIRLLENMNLPNGKPSMLVLRPADANETTLAWEMAMANGDSPTALILSRQTMPPLENPHSKACASGYIVQNAENPNLTFAANGSDVYLCCQAAELLRKEKISVRVVSIMSPKLFLDLPQKEREALIPRWGAAYAVSSGLPSVFAPVVGPLGYSWGLSEFGKSAPFAVLEKEFGYTPQAIADKAKAYLEEYKEMRKELKARN

SEQ ID NO: 48349 - DNA, 411 bp, Unknown
  Obtained from environmental sample
  misc_feature (1)..(411): n is a, c, g, or t
atgaaaaatgtcaagataggtgccaaactcataatgtctttcttatttttagctgctttaacggcatttatgggaatatatgcaataaaaagtttgagagaagttagcgatgcaacaaacgttatgtacgacaaaggagcagttccacttggaatctttgtggctacagcaaatcaagtacaagagctgcgtattcaggctctttactggcgtcttgccaaatcacaagcaaagcgcgatgagattttgaagaagatggacaacctaaacaatgatataaatcatacagtcggagagcagattaaaactgtgataactgaagctgggatagctaatttgaaaaaagtgatggatttgaccgacaaatacattgctgaagtgcgcagtttgcaaaaaccacaaaatctttga

SEQ ID NO: 48350 - protein, 136 aa, Unknown
  Obtained from environmental sample
  SIGNAL (1)...(24)
  misc_feature (1)..(136): Xaa is any amino acid
MKNVKIGAKLIMSFLFLAALTAFMGIYAIKSLREVSDATNVMYDKGAVPLGIFVATANQVQELRIQALYWRLAKSQAKRDEILKKMDNLNNDINHTVGEQIKTVITEAGIANLKKVMDLTDKYIAEVRSLQKPQNL

SEQ ID NO: 48351 - DNA, 930 bp, Unknown
  Obtained from environmental sample
  misc_feature (1)..(930): n is a, c, g, or t
atggaagaaaaccagttatttcaggaagtgaatactccggcggatgagaacacttcaacagaagagaacattctggcaggagtgaacactcaggaaaaaacggaaaatcctgaaacaactgcagccggaatatacacagatgaagatcaacttgcgcttttcgattctgaaaaacggaaaatccccgaaatacaagaacctgaaattcatacgcttggagtatccagcctgcgaaaaagattcggccgaaaagaagttgtccgcggcgtaaatttttcaatgcaaaacggaatagtagcggggcttcttggtcccaacggtgcgggaaaaaccactatcttctacatgattgttggtttctaccagccctctcatggaattgttacaatggacgatgttgacattaccgacaaaccaatgtttcgccgcgcaagacttggtattgcctaccttccgcaggaagcgtcaatttttcgtaaacttacggttgaacaaaacatttgggctattctggaaagtcggcaggacattgacgattacgaaaaagaagaaaaactggaaagccttttaactgagttcggtatcgcccgcattcgcactcagttaggttacactctttccggcggtgagagacggcgcacggaaattgcccgcgctcttgctacagagccaaagtttctgctattggacgaacccttcgccggaatagatcctatcgcggtttacgaaataaaacaaataatccgccaacttgccaaaaaaggcattggcattcttattaccgaccacaatgtccgcgatactttggaaattacaaacgaagcgtttatcatagcggacggaaacatattcgcaagaggggataaagatgttattctgaataatgagatggttagaaaagtttatttgggcagtgaatttaggatgtag

SEQ ID NO: 48352 - protein, 309 aa, Unknown
  Obtained from environmental sample
  DOMAIN (97)...(281): ABC transporter
  misc_feature (1)..(309): Xaa is any amino acid
MEENQLFQEVNTPADENTSTEENILAGVNTQEKTENPETTAAGIYTDEDQLALFDSEKRKIPEIQEPEIHTLGVSSLRKRFGRKEVVRGVNFSMQNGIVAGLLGPNGAGKTTIFYMIVGFYQPSHGIVTMDDVDITDKPMFRRARLGIAYLPQEASIFRKLTVEQNIWAILESRQDIDDYEKEEKLESLLTEFGIARIRTQLGYTLSGGERRRTEIARALATEPKFLLLDEPFAGIDPIAVYEIKQIIRQLAKKGIGILITDHNVRDTLEITNEAFIIADGNIFARGDKDVILNNEMVRKVYLGSEFRM

SEQ ID NO: 48353 - DNA, 882 bp, Unknown
  Obtained from environmental sample
  misc_feature (1)..(882): n is a, c, g, or t
atgaatgtttttattatttgtttaaaaaaagagaaagaaaaagccttacagtttttgtctttccttgaaaaaacagatattccctcggaaacacttcttattaagagcaaggatgatgggcttagagcaattgaaaattttacccatgttgcggttctttcggcgcttggaccggggtggatagattttcttgcggggtttttctgcggttcgcatcttcctattcttgtattgggaaaagaagctattgaaagcattccggacgtatttgccttttgtttcaaattttttgatactgaagaaaaattacgcagctgtcttaccgaagaattagaaaatttcaaaaagaatgaggccgcctgggaaacaaatcatataaagcaagccctgcttgacaagggcattcccacgacaattgaggctcttgcccagtgtgttgcagaaaataaagttgacgacgtttctctttttatagccgcgggatttatacccgactcaaaagacaaaaaaggaattcccctgctttgtattgccgcaagatacgggcatttaaacaccgctgagtttctgctccgttcaggggctcaagtggatatcctttccgaagacagaggttctacccctcttattgacagcgctatgggaagacataaagaagtgataaaaatccttattgatgccggagcggatgtgaatataaagaacaaagacgggcagaccgcgctgattatagttgtaggcgccggggatgtagaaattgttgaaatgttggtaaaggccggggctgaccctgacattgaagacgcttttggcgtcagcgcaagaatgtacgctaacatctttaagaacgataaaataaaagccatttttgattctaaatga

SEQ ID NO: 48354 - protein, 293 aa, Unknown
  Obtained from environmental sample
  DOMAIN (170)...(202): Ankyrin repeat
  misc_feature (1)..(293): Xaa is any amino acid
MNVFIICLKKEKEKALQFLSFLEKTDIPSETLLIKSKDDGLRAIENFTHVAVLSALGPGWIDFLAGFFCGSHLPILVLGKEAIESIPDVFAFCFKFFDTEEKLRSCLTEELENFKKNEAAWETNHIKQALLDKGIPTTIEALAQCVAENKVDDVSLFIAAGFIPDSKDKKGIPLLCIAARYGHLNTAEFLLRSGAQVDILSEDRGSTPLIDSAMGRHKEVIKILIDAGADVNIKNKDGQTALIIVVGAGDVEIVEMLVKAGADPDIEDAFGVSARMYANIFKNDKIKAIFDSK

SEQ ID NO: 48355 - DNA, 1401 bp, Unknown
  Obtained from environmental sample
  misc_feature (1)..(1401): n is a, c, g, or t
ttgttatattttatatcaaaaaagcggtataaaatgataggaaaattaccccaaacgcaacagcgcaatctgttccgcccgatgcttgcggatttcatagaccccagccacgagctagtcttgctgtccaagaagatagactggcagtatttcgaggatgagttcgcgcccctctattgccccggcaacgggacgcccggcgtccccatccgcctcatggtagcctgcctcatgctcaagcagttgtataatctgggcgatgagaccctgccctcccattgggtcagggatgtttactttcagtatttcagcgggatgactttctttgagcatgagtttccattcaatccgagcgatttttcgcatttccgcaagcgcataggcccagccggttttgagaagatatttgcctacagcgtaaagcttcatggtggcgaagcctccaagcaagcgaaattttctctttccgacactaccgttcaggaaaacaacaccgcgtttcccaccgatgccaagctatgcaagaaagtgatagacaaatgcaaccgcatggcggaggctgaaggcatccgccagcgtcagacgtttggcaaggaaagcaggcagctagtccgcgctgcctacaatggcaatcacccgaagcgtttcgggaaagcgaggaaggcaaaaaagcgtttgaggaccatagccaatcatcaaattcgcgaacttgagcgaaaaatggatgccagccaaaggctagcgcactgcaatgatttggagcttttcaagcgcgttgcgaatcagcagaaaaacgacaaggacaaggtttacagcctgcacaagccattcaccaaatgcatagccaaagggaaaccgcacaagccttatgagttcggaaacaaggtagggattatctccggcggcgtgaaaggcaggaaaataatactctccgtcaagggcttcatagacaatatttttgacgggcatacaattgagcctctgctttcccaaatgcaggccaatggcataccgcttcccgatgagcttgcctacgaccgcggaggcagaggcagaagcgagataatgggtgtaaaaattctgataccatctcctccgaagaaaacggataccgcttggcagaagctatccaagcggctgaagcaccgccgcagagcagccatagaaccgataatcggacacttgaagagcgatttccgcatggcgaggaactatcttggcggggtggagggcgttgaaataaatgcgttcatgtctgcctgtgcttggaatctgaaaaaaatgatggaagtgctcaagaagaaattcttgctctttatttttcaaacgcttttcccgaaaatttactccctatcgccgctaaatgtggggggtgataaagaacgactatttagcgattaa

SEQ ID NO: 48356 - protein, 466 aa, Unknown
  Obtained from environmental sample
  misc_feature (1)..(466): Xaa is any amino acid
MLYFISKKRYKMIGKLPQTQQRNLFRPMLADFIDPSHELVLLSKKIDWQYFEDEFAPLYCPGNGTPGVPIRLMVACLMLKQLYNLGDETLPSHWVRDVYFQYFSGMTFFEHEFPFNPSDFSHFRKRIGPAGFEKIFAYSVKLHGGEASKQAKFSLSDTTVQENNTAFPTDAKLCKKVIDKCNRMAEAEGIRQRQTFGKESRQLVRAAYNGNHPKRFGKARKAKKRLRTIANHQIRELERKMDASQRLAHCNDLELFKRVANQQKNDKDKVYSLHKPFTKCIAKGKPHKPYEFGNKVGIISGGVKGRKIILSVKGFIDNIFDGHTIEPLLSQMQANGIPLPDELAYDRGGRGRSEIMGVKILIPSPPKKTDTAWQKLSKRLKHRRRAAIEPIIGHLKSDFRMARNYLGGVEGVEINAFMSACAWNLKKMMEVLKKKFLLFIFQTLFPKIYSLSPLNVGGDKERLFSD

SEQ ID NO: 48357 - DNA, 1254 bp, Unknown
  Obtained from environmental sample
  misc_feature (1)..(1254): n is a, c, g, or t
gtggaagagcgggcgtccctcatctataagtacattcccgatttggcgggctttcttgtcaaggcggattcagaaggcgaacccggccccttccagtacaaccgcacccacgccgacggcgcgaatatgctggcaaaagcggtaaagccgcacggcggtgagatcatctggcgttgttttgtgtacaactgccagcaggactggcgcgatcaaagctttgaccgcgcccgcgcggcttatgatcactttatgcccctggacggggcgtttgacgataacgtgattctccagataaaattcggcccctacgatttccaggtacgggagccggtaacgccgctcttcggcgctctgaaaaaaacccgccatgttatggaacaccaaattacccaggagtataccggccatcagatagatttgtgctacctgccctggctctgggaagacatcatgcgctttgacaccgccggagaaccgcagggacgcgttaaagacctaatcggtccttactccgccggacattcgcgcatagaaggcttcgcggctgtggttaatacgggaagggatcgcaactggacaggccacacgctggcgcaggcgaacctttacggttacgggcgaattatctggaacccttcccttaccgcccgggaaatcgcccgcgagtggagcgtcctttcttttggctcaggtcccgccgcggaaactgtaacggaactgctgcttaaatcctatcccgcatatgaaaagtacaacgccccgtttggcgtgtgtttcatggtaacgcccggcctgcactacggcccgaacatagaaggttacgagttcagccgctggggaacgtatcaccgcgccgacacccgcgcgatcggcattgatcgcacgcccgccggaaccggctacaccatccagtaccatgcgaaaaacgcggctatatttgccgatcccgcgacctgcccggaaaaccttatcctgttttttcaccgcctggcttacgatttcaagatgaaaaacggcgagactcttttgcagaatatctatgacactcattttgagggctatgaggaagcggcggccatgcttgaaaagtggaaaagcctgaaaggttcgcttgaagaggaagtgtaccagtcggtgctttcccgttttgagcgccagcttgtcaatgcgcacgagtggcgggatcagatcaacacctacttttggcgtaagaccggcatagcggacaaacggggacgaaagatttacgaataa

SEQ ID NO: 48358 - protein, 417 aa, Unknown
  Obtained from environmental sample
  DOMAIN (1)...(192): Glycosyl hydrolase family 67 middle domain
  misc_feature (1)..(417): Xaa is any amino acid
MEERASLIYKYIPDLAGFLVKADSEGEPGPFQYNRTHADGANMLAKAVKPHGGEIIWRCFVYNCQQDWRDQSFDRARAAYDHFMPLDGAFDDNVILQIKFGPYDFQVREPVTPLFGALKKTRHVMEHQITQEYTGHQIDLCYLPWLWEDIMRFDTAGEPQGRVKDLIGPYSAGHSRIEGFAAVVNTGRDRNWTGHTLAQANLYGYGRIIWNPSLTAREIAREWSVLSFGSGPAAETVTELLLKSYPAYEKYNAPFGVCFMVTPGLHYGPNIEGYEFSRWGTYHRADTRAIGIDRTPAGTGYTIQYHAKNAAIFADPATCPENLILFFHRLAYDFKMKNGETLLQNIYDTHFEGYEEAAAMLEKWKSLKGSLEEEVYQSVLSRFERQLVNAHEWRDQINTYFWRKTGIADKRGRKIYE

SEQ ID NO: 48359 - DNA, 972 bp, Unknown
  Obtained from environmental sample
  misc_feature (1)..(972): n is a, c, g, or t
atgaaagcgcttgccgaatatatccactcaaaaggcttgaaatttggaatatattcctgcgtgggaacgcatacttgcgccggttttcccggcagtttcgagcatgagtttgttgacgcggttactttcgcggaatggggcgttgattatcttaaatacgattattgctataagccacgcaatgaagcaggcgaagatctgtataaacgtatggcgttagccttgcgcaactgcggacgcaatatagttctttccgcgtgtaattggggcaatgacggcgttcaaaaatggataagggagtcaggctgtcatttgtaccgctcaacgggagatattcaaaacaactggaaatcaatcgaaggaatcatgctgtcccagctcaataattcctgcttcagcggaatcgattgttggaacgatatggatatgctcgttgtaggcatgggcagtaccggcgaaaacgcgtatgttttaagcacgggctgtaacgaaaccgaatataaaacacatttttccgtgtgggcaatgatgaattcccctttgatgataggctgtgatgtacgcaatatgtcagagcaaaccgcggcaattcttacaaataaagacgtaatagcgttaaatcaggatattgaagggcgcgccccttattgcatccgccaatggaataatttggacagtgttttctcccttattaaaccgctttcggccgtctccaaaggagccgtcttcaaaggagacgacgcttcccacacaggcggcgattacgccgtggcaatggtaaacatcagcgatgtcaaagcggaaatgtccctgcaattctacgatataggcctgccttacgcttcgggtcttggtcttgaattttacgattgctggaagcatgaggttgccggcttctttacggaacgcgcttcaattgacattgaacctcatgaatgccgcgtgttcagatgcaaggttaaaaaagcgtga

SEQ ID NO: 48360 - protein, 323 aa, Unknown
  Obtained from environmental sample
  misc_feature (1)..(323): Xaa is any amino acid
MKALAEYIHSKGLKFGIYSCVGTHTCAGFPGSFEHEFVDAVTFAEWGVDYLKYDYCYKPRNEAGEDLYKRMALALRNCGRNIVLSACNWGNDGVQKWIRESGCHLYRSTGDIQNNWKSIEGIMLSQLNNSCFSGIDCWNDMDMLVVGMGSTGENAYVLSTGCNETEYKTHFSVWAMMNSPLMIGCDVRNMSEQTAAILTNKDVIALNQDIEGRAPYCIRQWNNLDSVFSLIKPLSAVSKGAVFKGDDASHTGGDYAVAMVNISDVKAEMSLQFYDIGLPYASGLGLEFYDCWKHEVAGFFTERASIDIEPHECRVFRCKVKKA

SEQ ID NO: 48361 - DNA, 636 bp, Unknown
  Obtained from environmental sample
  misc_feature (1)..(636): n is a, c, g, or t
gtggcggcaatggaagatgttttggccgtttacgcgcgtccgtatgacaaaaaccggcctgtcgtatgcatggacgagaaaccgtatcaactcgtaagcctgagccgcaatcccatacccatgaaacccggttcgccgcaacgggaagactatgaatatatacggctcggcacttgcagcattttcatatttactgaaccgctttcaggctggcgtcacgcgcaagcgtccttgcaacggacgaaaaaagattgggcgctccaaatccaatggctgcttaatgaacaataccccgaagcggaaaaaatcatattggtgatggacaacttaaatacccatgccatttcatcgctgtatgaaaccttcccgccggaagaagcgttccgcctggcgcagcggcttgaaatccataatacacccgtgcatggaagttggcttaacatagctgagattgaattatccgcaatggccgcgcagtgcctaggccagaggcgtatccccggcctgaaaaccctgaatgaggaattggccgtctggcatacgcaacgtaatcaatcgcagaagggtgttgattggcagtttaccgcccctgatgcacggataaaacttaaaagattgtatcctccntatatgtaa

SEQ ID NO: 48362 - protein, 211 aa, Unknown
  Obtained from environmental sample
  misc_feature (1)..(211): Xaa is any amino acid
MAAMEDVLAVYARPYDKNRPVVCMDEKPYQLVSLSRNPIPMKPGSPQREDYEYIRLGTCSIFIFTEPLSGWRHAQASLQRTKKDWALQIQWLLNEQYPEAEKIILVMDNLNTHAISSLYETFPPEEAFRLAQRLEIHNTPVHGSWLNIAEIELSAMAAQCLGQRRIPGLKTLNEELAVWHTQRNQSQKGVDWQFTAPDARIKLKRLYPPYM

SEQ ID NO: 48363 - DNA, 1302 bp, Unknown
  Obtained from environmental sample
  misc_feature (1)..(1302): n is a, c, g, or t
gtgggcggtcaggaacagtccaatttaacgcctcttccagaagcgccgcctctggaaattctggacaccaccctgagggacggcgcccagggcgagggaataactttttccgtgcaggacaaactggcggtcgtccgcgcgttagacgatctgggaatctcatggatcgaggcggggaaccccggaagcaaccccaaggatatggaatttttccgccttgccgaaaacctgaaacttgaacacgcgaaactctgcgccttcggctccaccagaaaaaaaggagtcaaggcaggcgaggaccccggcgtcctcagcctgcttgacgcgcggactcaggccgtcgtgatcttcggcaagagctgggatttccatgtgacggaggtgttacgcgtaagccacgaggaaaaccttgccatgattgcggagacaataacttttcttaaagaaaaagggcggaaagttttttacgacgctgaacatttttttgacggctggaaggcaaaccccgaatacgcccttaccaccttaaagaccgcgatggaagcgggggcggaacgcataatactgtgcgacacaaacggcggcacgtttcccgacactatagagaaagccgttaaagaagccttagaaattatcgattgtaagggtaatggtgacggtaataatatatgtctcctcggcattcacgcgcacaacgacgctgacatggcaagcgcaaatactattaccgccgtccttgccggatgccgccatgttcagggaacccttgtcggcttcggcgaacgctgcggcaacacaagccttgccgcagttatgcccagccttcagcttaaactgggtttccgttgccttgttgaaggaaagatggaactgctttcagaaataacccaaaatgtcgcggagacagccaatgtagcggttcccggtaacatgccttatgtgggaagccacgcttttacccacaaggcgggaatgcacgcggacgggattctaaaagacagaaaatcttttgaacatgtcgatccttcccttgtggggaacgaccggcattttttaatgagcgaagtcggcggacgttcggcgatagcggagagggcgaagaagatcgagccttccattacaagagatcaccctgtaacagccgccctcgcgcaaaagttaaaaaaacttgaggcggagggctggcagttcgaaggcgcggacggaagtttcgatattttagtccgccgcgagcttggccgctacaagccgctgtttaacattgaggcttaccgcgtggtaagccgaacaccccaccggtga

SEQ ID NO: 48364 - protein, 433 aa, Unknown
  Obtained from environmental sample
  DOMAIN (26)...(305): HMGL-like
  misc_feature (1)..(433): Xaa is any amino acid
MGGQEQSNLTPLPEAPPLEILDTTLRDGAQGEGITFSVQDKLAVVRALDDLGISWIEAGNPGSNPKDMEFFRLAENLKLEHAKLCAFGSTRKKGVKAGEDPGVLSLLDARTQAVVIFGKSWDFHVTEVLRVSHEENLAMIAETITFLKEKGRKVFYDAEHFFDGWKANPEYALTTLKTAMEAGAERIILCDTNGGTFPDTIEKAVKEALEIIDCKGNGDGNNICLLGIHAHNDADMASANTITAVLAGCRHVQGTLVGFGERCGNTSLAAVMPSLQLKLGFRCLVEGKMELLSEITQNVAETANVAVPGNMPYVGSHAFTHKAGMHADGILKDRKSFEHVDPSLVGNDRHFLMSEVGGRSAIAERAKKIEPSITRDHPVTAALAQKLKKLEAEGWQFEGADGSFDILVRRELGRYKPLFNIEAYRVVSRTPHR

SEQ ID NO: 48365 - DNA, 639 bp, Unknown
  Obtained from environmental sample
  misc_feature (1)..(639): n is a, c, g, or t
atgcgtattccgggaagacatcaggctttgaatactgcggcagggttggcgcttgcttcttcgcttgcaaaaaatgacggcggggcaaacggaacggcattaaataaagaacaactggagtccataaaaaacgcattgttaaattttaagagcaccaaacgccgaagcgagatagtcggcgaaacgggcggaataatttttatggacgattacggacatcatcccacggcgattaaaacaacacttgcgggcattaaaagtttttatccaaaccgtagactgattgtaagttttatgtctcatacatatacccgtacctccgctttactcgatgaattttcaaattgttttaatgacgccgatatcctttacctgcataaaatttattcgtccgcaagagaaaattataaaggcggagttaacgggcttacgctctatgatagaacatccgcagtccgcagcgccgctggtaaggggcaaaccttctatacggaagaaatagacgacgcattccaaccattaagtgaaatattaaaaagcggcgatatatttatcactcttggggcgggaaacaactggcctctcggcgttaaacttttaaaatatttcagacaaaagaacggagaaaatcatgattag

SEQ ID NO: 48366 - protein, 212 aa, Unknown
  Obtained from environmental sample
  SIGNAL (1)...(23)
  DOMAIN (52)...(140): Mur ligase family, glutamate ligase domain
  misc_feature (1)..(212): Xaa is any amino acid
MRIPGRHQALNTAAGLALASSLAKNDGGANGTALNKEQLESIKNALLNFKSTKRRSEIVGETGGIIFMDDYGHHPTAIKTTLAGIKSFYPNRRLIVSFMSHTYTRTSALLDEFSNCFNDADILYLHKIYSSARENYKGGVNGLTLYDRTSAVRSAAGKGQTFYTEEIDDAFQPLSEILKSGDIFITLGAGNNWPLGVKLLKYFRQKNGENHD

SEQ ID NO: 48367 - DNA, 438 bp, Unknown
  Obtained from environmental sample
  misc_feature (1)..(438): n is a, c, g, or t
atgctcatatcatatttcgactcctcgtttttgctcgcaattttgttcaacgaatcccacgccgaagaagcgttggaggtttgggagaacagcccgataaaggtcagttccatcctgcttaagtttgaaaccaacatctccatcagaagaaaacaccgcttgcgcaaagataaacacggcgacgcttggcttgacactaaattaacaggcctcaataaatacattgaaaaagtgtttttcacggagattgacgaaaatcttgaaaattcggtatccgagtattacgaagacctgtctaaatgcaaaagtttagatgcgatacatctcgcggcagcccttaaaatcagtaaaaggcacgatagaaaagatatccgcatctgctctttcgacgaaaatatgtgcggttcggctcaacacttcggcttcggaatcatttga

SEQ ID NO: 48368 - protein, 145 aa, Unknown
  Obtained from environmental sample
  SIGNAL (1)...(21)
  misc_feature (1)..(145): Xaa is any amino acid
MLISYFDSSFLLAILFNESHAEEALEVWENSPIKVSSILLKFETNISIRRKHRLRKDKHGDAWLDTKLTGLNKYIEKVFFTEIDENLENSVSEYYEDLSKCKSLDAIHLAAALKISKRHDRKDIRICSFDENMCGSAQHFGFGII

SEQ ID NO: 48369 - DNA, 1209 bp, Unknown
  Obtained from environmental sample
  misc_feature (1)..(1209): n is a, c, g, or t
gtgaagcgaggcgttcttcaccaccgtcccacccaaaaacacgggacgcagccgcgccacgggcgtcacgacgcccgtccgcccaaccgaccaatcaaccccatccaccaccgtcgccgccctctccggcgcgtacttgtaggcgatcacccagcgcggcgacttcgacgtaaaccccaaacgcccctgctgctcaaacgagtccaccttgatcacaacgccgtctacaggaaagggcaaggtatggcgcttagactcccaatcgccgcaaaacgacatgatctcgcctacgccggagagcaacccggagcgctcgacgaccggaaacccgagtccggcgagaaacttcgcgttgtcgtgcagactgacagccctgtcaggatcggacgacagcaggaagtaggcggcgaaactgagcttccgccgcgccgcctccgccggatccaagagcttaagcgtccccgacaccgtattgcgcggattctgcatgggcttctgccccgcctcaacgaggctgtcgttcagcgccgagaagtcgccgaacgtcataaacacttcgccgcgcacctccatcggctccgtatagggaataacgagcggtatagactttatcgtgcggacattggccgtaacgtcgtcgccgacgataccgtcgccgcgggttaccgcccttacaaaacgcccgccctcatagacaagcgaacacgccgccccgtccatcttgagttcgcccaaaaactttatatcctccccggcaagcgccttctcaacgcgccccacccactccgaaacatcctcggcggaatacgtgttgtcgatgctcatcatcggcacggcatgtttaaccttgacaaacgccttggtcaaatcgttcccaacgcggtgggtgggcgaatccggggaatcgtgctcgggatagagcctctccaagtcgcccagctctttaaaaagcgcgtcgtactcgacatcggagataagcgactcgctacgcccgtagtaggcggcgttgtactcgtcgatcttatcacgcaggtcgtctattcgttgtttgaatatagtcatggtaagcggtatggtttttcaaatgattccgaagccgaagtgttgagccgaaccgcacatattttcgtcgaaagagcagatgcggatatcttttctatcgtgccttttactgattttaagggctgccgcgagatgtatcgcatctaa

SEQ ID NO: 48370 - protein, 402 aa, Unknown
  Obtained from environmental sample
  misc_feature (1)..(402): Xaa is any amino acid
MKRGVLHHRPTQKHGTQPRHGRHDARPPNRPINPIHHRRRPLRRVLVGDHPARRLRRKPQTPLLLKRVHLDHNAVYRKGQGMALRLPIAAKRHDLAYAGEQPGALDDRKPESGEKLRVVVQTDSPVRIGRQQEVGGETELPPRRLRRIQELKRPRHRIARILHGLLPRLNEAVVQRREVAERHKHFAAHLHRLRIGNNERYRLYRADIGRNVVADDTVAAGYRPYKTPALIDKRTRRPVHLEFAQKLYILPGKRLLNAPHPLRNILGGIRVVDAHHRHGMFNLDKRLGQIVPNAVGGRIRGIVLGIEPLQVAQLFKKRVVLDIGDKRLATPVVGGVVLVDLITQVVYSLFEYSHGKRYGFSNDSEAEVLSRTAHIFVERADADIFSIVPFTDFKGCREMYRI

SEQ ID NO: 48371 - DNA, 933 bp, Unknown
  Obtained from environmental sample
  misc_feature (1)..(933): n is a, c, g, or t
gtgctggtgtatattaccggggtagttgccggaagcccgccttatgaaatgctggcggcgggagcccaggagtttgccgacgaacacggcaatgtaacaattaaaatatacgaagcgggatttaaccaggccgaatgggaagaacaactccactctctggtagccggcgccgaatacgatctggtgttgggttccaatccctcactgccggagatatgcgccaacgtgggcgcgtcgtttccccggcagaaatttatcattaccgatgccgcgtataacggcaatcaacaaatatgcacatacctgtacaaccaatacgaacaggccctgtttttaggttatcttgcggggcttgtaactacaagcggaatgtcccacgccaacagcgccaaaaaaatcggctttattgccgcacaggaatatcccctgctgaacaggcaaatggttcccggcttccttgacggagcgcgccgtgtcgatccaaacattgaactggattttcgcgttattggtaattggtatgacgcaaacaaggccgccgaacttgcgtccggcatgatcaacgccggggtcgatgtgtttacttcgatcgcgggcggcgcggcgcagggtctggcgcgtaccataaaagaacgcggcgcttattcggtgaattttaataccaacgattacagccaggcgccgggttttatagtaggctgcggcaaaatggaacagaaaaaactggtaaaagaaatacttgcggacgcgcttgccggaaaaatcaactacggcagctcaaaaacagtcggcgtaaaagaaggctacatagattttatttctgatgatcccggctaccgcgataatgttccctcggatatacaaaagaaattcaacagcttcatggatgatttccgcgccgggcgtattaaatatacagtcccggccctgtaa

SEQ ID NO: 48372 - protein, 310 aa, Unknown
  Obtained from environmental sample
  DOMAIN (1)...(304): Basic membrane protein
  misc_feature (1)..(310): Xaa is any amino acid
MLVYITGVVAGSPPYEMLAAGAQEFADEHGNVTIKIYEAGFNQAEWEEQLHSLVAGAEYDLVLGSNPSLPEICANVGASFPRQKFIITDAAYNGNQQICTYLYNQYEQALFLGYLAGLVTTSGMSHANSAKKIGFIAAQEYPLLNRQMVPGFLDGARRVDPNIELDFRVIGNWYDANKAAELASGMINAGVDVFTSIAGGAAQGLARTIKERGAYSVNFNTNDYSQAPGFIVGCGKMEQKKLVKEILADALAGKINYGSSKTVGVKEGYIDFISDDPGYRDNVPSDIQKKFNSFMDDFRAGRIKYTVPAL

SEQ ID NO: 48373 - DNA, 798 bp, Unknown
  Obtained from environmental sample
  misc_feature (1)..(798): n is a, c, g, or t
atgcgagggggtttatttctattcttgcggttatcccatcttctgggtataatgagttcttttaaaacaacgcaggagtatatgcttaacagcaagcttgctttaccaaaaatttggttctatagaaattatcccctggcatggagcaatagtactccgaatttctctattcttattttaaacagcatattctatacagccgtaacggtgatttccataatcatacttagctttatggcaggttttgcctttgccaaacttccgtcaaaaataacgcctgtccttcatagcagttttatagtaggaatactcattacccttcaatgtattatgattcctctttttattttaatcaggggagttgggttgattgatacgaggcttggggtactcatcccctatattggcatagggcttcctatggcagtttatctttctaccgagtacatcaaggccatacctactgaagttattgagtctgcccgtatggacggcgccaagtatctgcgtatttttagaactattatattgccgatggcagcgccggtagctacgaccgtcgcaatcctaaatattaccggaacctggaacgagtttatgctcatcaatattctggtttcttctgacaacttcaaatctatacctgttggaatgaggcaatttgccggttctttggctacggattacggcaagcagtttgccgccctggtaataggcatgatgcctatgattattttttacgccgttttccgaaaacagatcaccaaaggagtttccgctggtgcagtcaaaggttaa

SEQ ID NO: 48374 - protein, 265 aa, Unknown
  Obtained from environmental sample
  DOMAIN (55)...(260): Binding-protein-dependent transport system inner membrane component
  misc_feature (1)..(265): Xaa is any amino acid
MRGGLFLFLRLSHLLGIMSSFKTTQEYMLNSKLALPKIWFYRNYPLAWSNSTPNFSILILNSIFYTAVTVISIIILSFMAGFAFAKLPSKITPVLHSSFIVGILITLQCIMIPLFILIRGVGLIDTRLGVLIPYIGIGLPMAVYLSTEYIKAIPTEVIESARMDGAKYLRIFRTIILPMAAPVATTVAILNITGTWNEFMLINILVSSDNFKSIPVGMRQFAGSLATDYGKQFAALVIGMMPMIIFYAVFRKQITKGVSAGAVKG

SEQ ID NO: 48375 - DNA, 906 bp, Unknown
  Obtained from environmental sample
  misc_feature (1)..(906): n is a, c, g, or t
atgtttcaatacgcgttaaagagatccaaagcgaaagtgaaaaaaattccgcggctttgggaaaaaatcgctgcgctggaaaaaatgcttgcggaaacgtccaaaccgctggtgcgggacgcgccgtcaattgtctggatatgcgccgctggtgaccttatgctgggcaggggcgcgggtgatattttgattaaggaaggcgcaaagggtatttttggaaaaacggcggattactttaagcggtctgaccttaacatgttaaaccttgagggggcgatcagcggcagcggcgccagagtcataaagggttacaatttccgttttgatccgctgactgttccgccattaaagactgcgggaataaacgcggtgctgctggcaaataaccacgcctttgattttggggaaacagcgtttttggacacgctgaaacatcttggagaaaacggcatcgctgttcttggcgcgggacgcaatattaacgccgcagccgcgccttttgtttttacaaaggaacagcttgagatacgggtttttgggattgcttcatataccactgaaagcagcggctggaacagcgattcggtcagcgcgtctgcggagaaagccggaatgctttttggtcgggtcggagcggatcggctcaaggaaaatctcgtccgtaaagacagtgttctcaacgtgattttttttcatggcggcaatgaatggacatgggagccggattacaacacccgcagcttttacgcagagctggcgaaaagcggggcagacttgattatcggctcacatccccatacagtgcagggggttgaatggcttgaagggaagcccgttttttggtcgctgggaaattatgtttttgccggaatggacgaaactgacggcggagaagaaggcctgtga

SEQ ID NO: 48376 - protein, 301 aa, Unknown
  Obtained from environmental sample
  misc_feature (1)..(301): Xaa is any amino acid
MFQYALKRSKAKVKKIPRLWEKIAALEKMLAETSKPLVRDAPSIVWICAAGDLMLGRGAGDILIKEGAKGIFGKTADYFKRSDLNMLNLEGAISGSGARVIKGYNFRFDPLTVPPLKTAGINAVLLANNHAFDFGETAFLDTLKHLGENGIAVLGAGRNINAAAAPFVFTKEQLEIRVFGIASYTTESSGWNSDSVSASAEKAGMLFGRVGADRLKENLVRKDSVLNVIFFHGGNEWTWEPDYNTRSFYAELAKSGADLIIGSHPHTVQGVEWLEGKPVFWSLGNYVFAGMDETDGGEEGL

SEQ ID NO: 48377 - DNA, 783 bp, Unknown
  Obtained from environmental sample
  misc_feature (1)..(783): n is a, c, g, or t
atggttcacaatgtgctcttggctcacggcctttcggttcaggccctgcgttcgctttcgcctggaacaaaaatcggttacgcgcccgcagtcggcgccaattatcctgtatcggacaacccggaggatattgaagcagcccgtaagtccatgtttgcaataaataaggatgttcccagcctttgcgcgtccatttggagcgacccaatttttttgggaaaatatcccgaggaattgtttcaaaagtacggccaatatatgccaaagataggcccggatgatatgaagaccatcgcacagcctcaggactttgtagggcagaacatttacaacggcgacaagatcagggcggacgggaaaggcggatatgaatccgcgcccagagaaaccggttacgcttttacagcagccaaatggccggtaacccccgagtcgctttactggggaccgcgtttcttcgcggagcgctataagataccgatattcatcaccgaaaacggcctttcctgtaccgatgttgtctcgcttgacggcaaagtccacgatcccaatcgcattgattttcttcaccgctatctgcgctgccttaaaaaagctgctgacgacggcgttgatatccggggctactttcattggtgttttacagacaattttgagtgggcaaaaggctatacagaacgctttggaatcgtacactgtaactttgaaactcaacagcggataataaaggattcaggttactggtacaaagacacgattaaattaaacggcgcacagttgtag

SEQ ID NO: 48378 - protein, 260 aa, Unknown
  Obtained from environmental sample
  DOMAIN (1)...(258): Glycosyl hydrolase family 1
  misc_feature (1)..(260): Xaa is any amino acid
MVHNVLLAHGLSVQALRSLSPGTKIGYAPAVGANYPVSDNPEDIEAARKSMFAINKDVPSLCASIWSDPIFLGKYPEELFQKYGQYMPKIGPDDMKTIAQPQDFVGQNIYNGDKIRADGKGGYESAPRETGYAFTAAKWPVTPESLYWGPRFFAERYKIPIFITENGLSCTDVVSLDGKVHDPNRIDFLHRYLRCLKKAADDGVDIRGYFHWCFTDNFEWAKGYTERFGIVHCNFETQQRIIKDSGYWYKDTIKLNGAQL

SEQ ID NO: 48379 - DNA, 429 bp, Unknown
  Obtained from environmental sample
  misc_feature (1)..(429): n is a, c, g, or t
gtgatagttactaaggagttaatcatgggattcagagatgactttatttggggtgttgcctcagcgtcttaccaggtagaaggggccgctaacgaagacggcaagggcgctagcgtttgggatatgttctgcaaagagaagggacgtatcgttgacaactccaacggggatgtagcctgcgatcattatcatcgctacaaagaggacattgctatcatgaaagagctggacgctaaggcttaccgcttttccatcgcctggcccagggtgattccagacggtgacgganaggtaaacgagaagggcctggatttttacgagcggcttaccgacgcanttacggaagcgggaattaccccgtgcgctaccctgtaccactgggatttaccctacgatttattcccgcaagggcggatggatgaattctga

SEQ ID NO: 48380 - protein, 142 aa, Unknown
  Obtained from environmental sample
  DOMAIN (7)...(142): Glycosyl hydrolase family 1
  misc_feature (1)..(142): Xaa is any amino acid
MIVTKELIMGFRDDFIWGVASASYQVEGAANEDGKGASVWDMFCKEKGRIVDNSNGDVACDHYHRYKEDIAIMKELDAKAYRFSIAWPRVIPDGDGXVNEKGLDFYERLTDAXTEAGITPCATLYHWDLPYDLFPQGRMDEF

SEQ ID NO: 48381 - DNA, 549 bp, Unknown
  Obtained from environmental sample
  misc_feature (1)..(549): n is a, c, g, or t
gtgatgtcggtaagccttttccggggcggacggcacattgaaagctccgccttttgtactggcttcagaaacatccgcatagagcggcgggagcttttaattaacgaaagaccggtgttgattaagggcgttaaccgccacgagcacgatgaaaaaacaggcaagaccctttcaactgaagggatgatgagggacattaggctccttaaaacgcacaacttcaacgcggtgcgtacctgccactaccccaacgacgaacgctggtacgagctctgcgacaggtacggaatctatctgctggacgaggccaatattgagcatcactgtttttacgatcagctttgctgggacactgcctgggcctatgcctacgccaagaggattcagcggatggttgagcgcgacaagaaccacccttcggtgatcatttggtcgctggggaacgaaagcgggggatggtgcgaaccacgatatgtgcgcggcctggattcggcgttacgattctttccggcctgtcagctacgaaggggcggtcaggctcaagcgtaa

SEQ ID NO: 48382 - protein, 182 aa, Unknown
  Obtained from environmental sample
  DOMAIN (25)...(182): Glycosyl hydrolases family 2, TIM barrel domain
  misc_feature (1)..(182): Xaa is any amino acid
MMSVSLFRGGRHIESSAFCTGFRNIRIERRELLINERPVLIKGVNRHEHDEKTGKTLSTEGMMRDIRLLKTHNFNAVRTCHYPNDERWYELCDRYGIYLLDEANIEHHCFYDQLCWDTAWAYAYAKRIQRMVERDKNHPSVIIWSLGNESGGWCEPRYVRGLDSALRFFPACQLRRGGQAQA

SEQ ID NO: 48383 - DNA, 594 bp, Unknown
  Obtained from environmental sample
  misc_feature (1)..(594): n is a, c, g, or t
ttgctcgggctccgacatgttgcgggtccacggtttcaggttctctttcactcccctcgccggggttcttttcgcctttccctcacggtacttctgcactatcggtcgcgcactgtgtttagccttggatcgtggtcgacccggattccggcagggtttcacgtgccccgccgtactcaggcaccgccttggaggctccgctatttcgcgtacggggatttcaccctctatgtcaggctttcccaatgcctttccgctatagcgcagctttctggactcccccctttcgggatggcggccctacaaccccgccccagggggcggtttgggctcctccgatttcgctcgccgctactctcggaatcattcttattttcttttcccggggtacttagatggttcagttcccccagtgtcgcctccgcagcctatttattcagcagcggatgccaagctcgcgcttggcgggttaccccattcggctaccggcggatctcaggatgtgtgctcctccccgccgattttcgcagcttgccacggccttcctcgcctcgatacgccaaggcatccaccgcaaacccttctctcgcttga

SEQ ID NO: 48384 - protein, 197 aa, Unknown
  Obtained from environmental sample
  misc_feature (1)..(197): Xaa is any amino acid
MLGLRHVAGPRFQVLFHSPRRGSFRLSLTVLLHYRSRTVFSLGSWSTRIPAGFHVPRRTQAPPWRLRYFAYGDFTLYVRLSQCLSAIAQLSGLPPFGMAALQPRPRGRFGLLRFRSPLLSESFLFSFPGVLRWFSSPSVASAAYLFSSGCQARAWRVTPFGYRRISGCVLLPADFRSLPRPSSPRYAKASTANPSLA

SEQ ID NO: 48385 - DNA, 432 bp, Unknown
  Obtained from environmental sample
  misc_feature (1)..(432): n is a, c, g, or t
atggctagatcacttggcttcgggtctatggcatgcaactgtgatacccttgcgggtatcctcgccctcttcagactcggtttccctccggctccgggactcccatcccttagcctcgctgcataccataactcgcaggctcattctacaaaaggcacgccgtcacccaattgctcgggctccgacatgttgcgggtccacggtttcaggttctctttcactcccctcgccggggttcttttcgcctttccctcacggtacttctgcactatcggtcgcgcactgtgtttagccttggatcgtggtcgacccggattccggcagggtttcacgtgccccgccgtactcaggcaccgccttggaggctccgctatttcgcgtacggggatttcaccctctatgtcaggctttcccaatgcctttccgctatag

SEQ ID NO: 48386 - protein, 143 aa, Unknown
  Obtained from environmental sample
  misc_feature (1)..(143): Xaa is any amino acid
MARSLGFGSMACNCDTLAGILALFRLGFPPAPGLPSLSLAAYHNSQAHSTKGTPSPNCSGSDMLRVHGFRFSFTPLAGVLFAFPSRYFCTIGRALCLALDRGRPGFRQGFTCPAVLRHRLGGSAISRTGISPSMSGFPNAFPL

SEQ ID NO: 48387 - DNA, 486 bp, Unknown
  Obtained from environmental sample
  misc_feature (1)..(486): n is a, c, g, or t
gtgaggccccctagtccatccagtgctctacctgcgcgaggttttggcgaggctgtccctcaaggcatttcggggagagccagctatttccaagtttgtttagtctttcgctccgagccacaggtcatccctgccttttttaacagactagggttcggccctccacccggtttcacccgggcttcagcctgcccatggctagatcacttggcttcgggtctatggcatgcaactgtgatacccttgcgggtatcctcgccctcttcagactcggtttccctccggctccgggactcccatcccttagcctcgctgcataccataactcgcaggctcattctacaaaaggcacgccgtcacccaattgctcgggctccgacatgttgcgggtccacggtttcaggttctctttcactcccctcgccggggttcttttcgcctttccctcacggtacttctgcactatcggtcgcgcactgtgtttag

SEQ ID NO: 48388 - protein, 161 aa, Unknown
  Obtained from environmental sample
  misc_feature (1)..(161): Xaa is any amino acid
MRPPSPSSALPARGFGEAVPQGISGRASYFQVCLVFRSEPQVIPAFFNRLGFGPPPGFTRASACPWLDHLASGLWHATVIPLRVSSPSSDSVSLRLRDSHPLASLHTITRRLILQKARRHPIARAPTCCGSTVSGSLSLPSPGFFSPFPHGTSALSVAHCV

SEQ ID NO: 48389 - DNA, 888 bp, Unknown
  Obtained from environmental sample
  misc_feature (1)..(888): n is a, c, g, or t
gtgtatcagatcggccgaggtcaacaaagacgaaaaaatatgtctcttttacaggatatttatcatgacattcttgcgaaaatttcaaacatgactttgaaagaagggattatcacaaaattgtattcacccaggaatgataataatattcaaaaagatgagcgggttttttatacgcgtagaaacgcgatgtatattgataccatgcggaatattattgacgttgttactgctcaatatcaaaaatattttcttgctccgttaatcgcggaggcctcaattcacaccaatacttcgggcgtatttaaaggtttttataaaaacaaaaaaaccggtataggacaattcggcggcagtaacagcaacgccctttttcggataaatggggatataacactgccctttcctgttttcagcaattttaactgtgaatacagggtatataacggggattcaaacgttatcataaaagaagcgccggaagtagatttggcgtatttggacccgccctacaaccagcatccatacggctcaaattattttatgcttaacctgatacttgaaaacaagcatcctgaaaatgttagtaaaatttccggaattcctgataactggaatcgttccgcgtataacaagaagcaatacgcttactctgctttagccgatttggttgccaacataaaagcaaaatttgttcttatatcattcaactccgagggttttatttcttatgatgagatgatgtccatgctgaaaaaaatcggcaaggttcaaattttggaaaccacttataacactttccgcggctgccgaaatctttccagtcttgccgaacagggcattcgtgatattcatgttactgaatatctttatttactggagaaatga

SEQ ID NO: 48390 - protein, 295 aa, Unknown
  Obtained from environmental sample
  misc_feature (1)..(295): Xaa is any amino acid
MYQIGRGQQRRKNMSLLQDIYHDILAKISNMTLKEGIITKLYSPRNDNNIQKDERVFYTRRNAMYIDTMRNIIDVVTAQYQKYFLAPLIAEASIHTNTSGVFKGFYKNKKTGIGQFGGSNSNALFRINGDITLPFPVFSNFNCEYRVYNGDSNVIIKEAPEVDLAYLDPPYNQHPYGSNYFMLNLILENKHPENVSKISGIPDNWNRSAYNKKQYAYSALADLVANIKAKFVLISFNSEGFISYDEMMSMLKKIGKVQILETTYNTFRGCRNLSSLAEQGIRDIHVTEYLYLLEK

SEQ ID NO: 48391 - DNA, 300 bp, Unknown
  Obtained from environmental sample
  misc_feature (1)..(300): n is a, c, g, or t
atgagctcaggcggcattgtcctcgcaagccttgcgggatacctggttggagaattgtccaattcagcgtcactttccaagatcaaagttttaacgaaggggcgctggctctggttcagggccatggtttccagccttatcggcgaactcctggacagtttaatttttgtgttcatcgcctgcctcaccggcgttttcggctggaacctttttcttagccttgcgctgaccaactatatcctgaaatgcctcatcgaagccctgatactgccgcttacttatacggcggtaaggatttga

SEQ ID NO: 48392 - protein, 99 aa, Unknown
  Obtained from environmental sample
  misc_feature (1)..(99): Xaa is any amino acid
MSSGGIVLASLAGYLVGELSNSASLSKIKVLTKGRWLWFRAMVSSLIGELLDSLIFVFIACLTGVFGWNLFLSLALTNYILKCLIEALILPLTYTAVRI

SEQ ID NO: 48393 - DNA, 366 bp, Unknown
  Obtained from environmental sample
  misc_feature (1)..(366): n is a, c, g, or t
atgctttcctctcaatcaccaaaatcctcttacaggtactttgatgtactaatgacgttttttgtcgtcgttcttgttctgagtaacatcgcttcatcggcaaaaattgttgatctgggtttttcgattttcggaatccccatggcgtttgacggcggcactttgctttttccgctggcttatgtacttggagacatactcacggaagtgtatggctttaaagccgccaagcgggttatctggacaggctttgcggtactggcgttttcagcgctggtgttttttgtccttcggctccttcccggcgaaagctcctggaagctgaaacgggctccgccgcgtacaacgccgttcttggcgggatga

SEQ ID NO: 48394 - protein, 121 aa, Unknown
  Obtained from environmental sample
  misc_feature (1)..(121): Xaa is any amino acid
MLSSQSPKSSYRYFDVLMTFFVVVLVLSNIASSAKIVDLGFSIFGIPMAFDGGTLLFPLAYVLGDILTEVYGFKAAKRVIWTGFAVLAFSALVFFVLRLLPGESSWKLKRAPPRTTPFLAG

SEQ ID NO: 48395 - DNA, 498 bp, Unknown
  Obtained from environmental sample
  misc_feature (1)..(498): n is a, c, g, or t
atgcgccagatagggccatccatgtcctgtcacaggatgctgatggattattccaacaacttctatttccccgcgcttaaaaactaccgcaaactgataaaagatgactatgctgacgcaaaatcccttgcggcatattttggcaagctgcgtgattcctgggacagccttagaatcgcaaaacttgaggccaataccaagccggtaatgcagcggggggattcgctcaatgttacggctcatatcgagcttggcaaaatgtcgcctgacgaactcctggtggaactgtattacggcgcggtatcgaatcagagcaacgaaattaccaatgcccacaaggctgagatgaagtgggtcagtaataaagacggcctgaaccagtaccatgtgcgggttgaatgtaccgacacaggcttccagggccacacagtgcggatcttgcccaagcacgaagctttgatccatccgtaccggtcaggctatattaaatgggcctaa

SEQ ID NO: 48396 - protein, 165 aa, Unknown
  Obtained from environmental sample
  misc_feature (1)..(165): Xaa is any amino acid
MRQIGPSMSCHRMLMDYSNNFYFPALKNYRKLIKDDYADAKSLAAYFGKLRDSWDSLRIAKLEANTKPVMQRGDSLNVTAHIELGKMSPDELLVELYYGAVSNQSNEITNAHKAEMKWVSNKDGLNQYHVRVECTDTGFQGHTVRILPKHEALIHPYRSGYIKWA

SEQ ID NO: 48397 - DNA, 681 bp, Unknown
  Obtained from environmental sample
  misc_feature (1)..(681): n is a, c, g, or t
gtggtaagccagggggtgatagtaaaccgtattgaaaattatattggcagaaatatcgaagatgtgcggatggatctgcagaccgtcgcggcttcttccggcaaccaattcttgtcgttaaaagaaccgctgatgtatgatttttccagcgaaaccccgggtacgataatccggcaaaagccggaggcagggacagatatttccggaccaaccagactggaattcgtggtcagccggggccaggcagacagtgttgtaacagtgccgcagtttgtcggctttccgatttcatcggcattggaacaaataggcagggcggggattgcttttgaatttactatacgggagcttatggaaggcgaaaagggtgaaacggtggtatcccaaaatccccctgcgggcgtaagcgtaacatcgaatgatatattaaggcttacagtaaattccccgtcgcggcttggcgaaaatgaagtttttggcttgtttgcatacacaatgcccaaaaacccctatccccttcctgtgcggctggaagccctgcttccctccggtgaacgcaatcagcttatcggggtggattaccccggcggcaggtttaccgctccctaccgtctgccggtggacagtgttctggtgctttatctaatgaatagggaaatataccgggagacagtgcgctag

SEQ ID NO: 48398 - protein, 226 aa, Unknown
  Obtained from environmental sample
  DOMAIN (86)...(149): PASTA domain
  misc_feature (1)..(226): Xaa is any amino acid
MVSQGVIVNRIENYIGRNIEDVRMDLQTVAASSGNQFLSLKEPLMYDFSSETPGTIIRQKPEAGTDISGPTRLEFVVSRGQADSVVTVPQFVGFPISSALEQIGRAGIAFEFTIRELMEGEKGETVVSQNPPAGVSVTSNDILRLTVNSPSRLGENEVFGLFAYTMPKNPYPLPVRLEALLPSGERNQLIGVDYPGGRFTAPYRLPVDSVLVLYLMNREIYRETVR

SEQ ID NO: 48399 - DNA, 603 bp, Unknown
  Obtained from environmental sample
  misc_feature (1)..(603): n is a, c, g, or t
atgaacttggcggatcggataacattactccgaataattctcgctccgatattttttactgaatatatgctgctcagaaaattccaggcagagcttgcggggcatatgatttggctgatagcgctactctggataatagcgattgtcgctgaattaaccgatatgttcgacggcatggcggcccggcattataatcaaaccagcgactttggcaagcttttcgatccttttgccgatacgctcatgcaaataacagccttcttatgctttgtgctcgacggcatactgccggcatttttgtttctcgtggtggtgtaccgcgagttcggcatcctgtttatccgaaacctcatgctgaaaaaaggcatcgcgatgggggcccgtataggcggtaagataaaaacaattgcctacatcaccgcggctgcaatagccctgatctatgccagccttgtccgcctttcggcgtttgaattcctgcaacccatagccaaaatcgccgctgttgccgttttcagcctgtcggttcttttttcggtactgtcgtttttcgactatctttccgtgtacataaaagccgaaaagactgccggtaaaaattag

SEQ ID NO: 48400 - protein, 200 aa, Unknown
  Obtained from environmental sample
  DOMAIN (44)...(189): CDP-alcohol phosphatidyltransferase
  misc_feature (1)..(200): Xaa is any amino acid
MNLADRITLLRIILAPIFFTEYMLLRKFQAELAGHMIWLIALLWIIAIVAELTDMFDGMAARHYNQTSDFGKLFDPFADTLMQITAFLCFVLDGILPAFLFLVVVYREFGILFIRNLMLKKGIAMGARIGGKIKTIAYITAAAIALIYASLVRLSAFEFLQPIAKIAAVAVFSLSVLFSVLSFFDYLSVYIKAEKTAGKN

SEQ ID NO: 48401 - DNA, 540 bp, Unknown
  Obtained from environmental sample
  misc_feature (1)..(540): n is a, c, g, or t
ttgttcctttgctacttgttatttgttccccgttatttgataatggcatttatgaagacactaatgcggaaaaaaaacgaggctaaatattatttcatctattcactgaaaaaactcaaaattggtattgccgaagaaaacaatgctataacagaggtatattttggcgctgaaataccgaccggctttatcaaagctgaaaccccgctgattaaaaaagccgcagcgcagattgaagaataccttaacgggaaacggaaaaaattctccctgccgcttgccatgcatggaaccgaattccagatggatgtctggagggcgctacaaagcatcccttatggcgagactcgttcttacaaggagattgccgaacttgtacacaggccaaaagcggtacgcgcagtaggcatggcaaaccaccgtaaccccatttcgataatagtgccatgccaccgcgttataggccacaatgggagcctgaccggttacggcggagggcttccccttaaaaagtacctgttggaactggaacaggagtga

SEQ ID NO: 48402 - protein, 179 aa, Unknown
  Obtained from environmental sample
  DOMAIN (97)...(179): 6-O-methylguanine DNA methyltransferase, DNA binding domain
  misc_feature (1)..(179): Xaa is any amino acid
MFLCYLLFVPRYLIMAFMKTLMRKKNEAKYYFIYSLKKLKIGIAEENNAITEVYFGAEIPTGFIKAETPLIKKAAAQIEEYLNGKRKKFSLPLAMHGTEFQMDVWRALQSIPYGETRSYKEIAELVHRPKAVRAVGMANHRNPISIIVPCHRVIGHNGSLTGYGGGLPLKKYLLELEQE

SEQ ID NO: 48403 - DNA, 1605 bp, Unknown
  Obtained from environmental sample
  misc_feature (1)..(1605): n is a, c, g, or t
atggcagattggtataacccgacagagcgttcctggtatcaaaacgcaattgcggcaaacggcgaaatcgcaacgaccatgatatacagcgatgtaatttacgatagtcccgtccttattttttcgcgctgcgtttatgatgatcatggccgccgtttgggcgttgtcggcctcaggatagaaattgacgctatcggagaattcgttatcaatactgcctcggctcatggcggctacggaatactgataagcgaggatttggttttattcgctcacccgaaccgcaaattgattggcaaaaatatgcgcgaaattggagcctctatatcagtccttgcagataaattactaagcggcaaagaaataacagaatacccgattacctcttacaaaggcgaagactctgttgcttttttaagacggctccccaacgactggtatctgggcgttaatttcccgcgactcccatactataaaggcgttatcaatctggctttaatcctcagtataatgcgcatagcgcttgcgtctgttttaagctttatccttattcgtgttgacgccgccagaaacatatccgacatggaaagcaggtataaaagcacctttttggcaaacatgagccacgagatacgcacgccaatgaacgccattatcggcatgactgagcttcttgccaatgaacagttaaacaggcgccagatgagtttcattgacgacattaaggtgtccgcccattcactcctctccatcatcaacaacatactggatttttcaagaatcgaatccgggaaattttcgcttaatcctgtagattacgattttcatacgctaataaataatattgtttacatattcaaacatgtgacacaaaggaaaggactcgaatttaaatacgaaagcccgcctgatttgccggaatacctgtatggcgacgatttaaggctaagacaggtcttgatgaatatctgcggaaacgcggttaagtataccgaacatgggcacatcaaactaaaaataagcttctctgacggcagcctgatatttgaggtctcggacacaggaatgggaatccgcaaggaagatataccaagattattcgacgcgtttgagcgcatggaaatggaaaaaaaccggagcatatccgggacaggcctgggacttccaatctgcaagtcttttgtggaaatgatgggcggtaaaatactggttgaaagcgagtatgagaagagaagcgtttttacggtaataattccagctgtgccaggtgacgaagcaaaggttaaatccgggaagacagagaaaaaagaacagcctctatgtgcgccaaacgccagcgttttaatagtagacgataacgagtttaacctcagggtagcggaaggcctgctcgacctgtttaaaatcaatgccaaaaccgctttttcaggcaaggaagccattaacatggttcagaataacgagtttgacattgtctttatggatcacatgatgcctggaatggacggcgtcgaagcgaccttgaaaatccgttcgctaaaagcgggcaaaaaaaagcggcaaaccccgaagactactttatgcaactgccgatcgtcgcgctga

SEQ ID NO: 48404 - protein, 534 aa, Unknown
  Obtained from environmental sample
  DOMAIN (445)...(527): Response regulator receiver domain
  misc_feature (1)..(534): Xaa is any amino acid
MADWYNPTERSWYQNAIAANGEIATTMIYSDVIYDSPVLIFSRCVYDDHGRRLGVVGLRIEIDAIGEFVINTASAHGGYGILISEDLVLFAHPNRKLIGKNMREIGASISVLADKLLSGKEITEYPITSYKGEDSVAFLRRLPNDWYLGVNFPRLPYYKGVINLALILSIMRIALASVLSFILIRVDAARNISDMESRYKSTFLANMSHEIRTPMNAIIGMTELLANEQLNRRQMSFIDDIKVSAHSLLSIINNILDFSRIESGKFSLNPVDYDFHTLINNIVYIFKHVTQRKGLEFKYESPPDLPEYLYGDDLRLRQVLMNICGNAVKYTEHGHIKLKISFSDGSLIFEVSDTGMGIRKEDIPRLFDAFERMEMEKNRSISGTGLGLPICKSFVEMMGGKILVESEYEKRSVFTVIIPAVPGDEAKVKSGKTEKKEQPLCAPNASVLIVDDNEFNLRVAEGLLDLFKINAKTAFSGKEAINMVQNNEFDIVFMDHMMPGMDGVEATLKIRSLKAGKKKRQTPKTTLCNCRSSR

SEQ ID NO: 48405 - DNA, 591 bp, Unknown
  Obtained from environmental sample
  misc_feature (1)..(591): n is a, c, g, or t
atgaaggaagacggcgccataggcgtgtggacttcccgctcccacgacgacccgctgattacgacttatgccgcgcatttccttacagaagcgcgtaacgcgaattattatgtttcgcccgttatgatggaaaaactgcttaacgcgtgccgaaacatcgcttcaagttcgggaacaagccattacgattttaccacccgcgcctacgcgatttacattcttaccagaaacgaaattgtcaccactcagcttgttgaatcgctcaaaagggacatgaatcgctttgacgagtcgcagacaggtattgccggcctttaccttgccggaacttacgcgttattgcaaaaaacaaacgacgccgccctgcttctgggaaaaatcaaacgcgctatggcaaaagacagcagcttccgttacattgacgagcttatgtatcattcgatttacctcaacattttatcgaggcatttccctaatcgtttgcgcgacatatcggagtccttgttagttgacatggcagggcagatggaaagacagtcctacaccacaatttccgccaccacgcgcttatggcgattgacgcctatctga

SEQ ID NO: 48406 - protein, 196 aa, Unknown
  Obtained from environmental sample
  misc_feature (1)..(196): Xaa is any amino acid
MKEDGAIGVWTSRSHDDPLITTYAAHFLTEARNANYYVSPVMMEKLLNACRNIASSSGTSHYDFTTRAYAIYILTRNEIVTTQLVESLKRDMNRFDESQTGIAGLYLAGTYALLQKTNDAALLLGKIKRAMAKDSSFRYIDELMYHSIYLNILSRHFPNRLRDISESLLVDMAGQMERQSYTTISATTRLWRLTPI

SEQ ID NO: 48407 - DNA, 648 bp, Unknown
  Obtained from environmental sample
  misc_feature (1)..(648): n is a, c, g, or t
atggcgattgacgcctatctgaaagccgttccatccgcggaaacaggccgctatacaatacaggaagtttcaaaagacaaccagcgtaaagaattgaaagccgccggaacaaccttgttcagcgcctccttctccgcaaacgcggcaaaaatcgcgcttgaaaacaaagataaccttaacctgttttatcagataacggccgccggttttgaccgcgaactgccgacgaaagagacaaagaacggcatcgagatttacagggaatttcttgacagttcgggaaaacccgtaacttcgataaaggtgggcgacgtgataacggtaaaactcaatttccgcagcctttccagtgttgagtaccgcgatgtggctattgtagatttatgccctgccggtcttgagacggaaattgactcggcgcggcagaccgaaagatcaaatgatggatggagcgccgattatgttgacatacgcgaggacaggctggtaatttacggaactttaagcgccaggatgggaagtttcagttaccgcgcaagggcgattaacgccggcactttcacaactccgcccctctatgccgaagcgatgtacgacaaatctgtttgggctctccgcccgcaggcttcgattaagattgttaaatga

SEQ ID NO: 48408 - protein, 215 aa, Unknown
  Obtained from environmental sample
  misc_feature (1)..(215): Xaa is any amino acid
MAIDAYLKAVPSAETGRYTIQEVSKDNQRKELKAAGTTLFSASFSANAAKIALENKDNLNLFYQITAAGFDRELPTKETKNGIEIYREFLDSSGKPVTSIKVGDVITVKLNFRSLSSVEYRDVAIVDLCPAGLETEIDSARQTERSNDGWSADYVDIREDRLVIYGTLSARMGSFSYRARAINAGTFTTPPLYAEAMYDKSVWALRPQASIKIVK

SEQ ID NO: 48409 - DNA, 1467 bp, Unknown
  Obtained from environmental sample
  misc_feature (1)..(1467): n is a, c, g, or t
ttgtctgcaatacacgtattactacaaaaaatagtcacaaaatttaaccgcgaggcggtaaaacataataatgatggagcgcgggagttattaggacgccgcgcttccattgttgatgctttgaacaaatcgatagaaatattttccgctaataaagaagaaacatttgacgaagtaatgaccaacggcatacggccttttgcggacgctgttggtattgaccgcgtagttttttatagactgatagacgatgacgggagcaaacatctggggcaaatataccgctgggacaaatcagaaggcggtcttatgtctattgacgaggaacttaagtttttacctaatcatccggttttagaaaactggatgtcaattacagcacagggcggttgtatccggtttagggaaagcgattataccgaagatgtggcggttttgatgcgtacctatggcataaggtctattttgatagtacccattttcacgcatgggaaattttggggcgttattaattttcaagaacataaaaacgaccgttattttgacgaggactgcgccgatttactgtattcggcggcgcgtatattctcaaacgccgttattagggtgggagcgggacacagcgccgaaaaagccaatgatatgctgaaacaccgcgaagaaatggaagctgcgatgaacagggctgccgtcatgtttctctcgcaaagtaaaaaatcttttgaggataccatgacggtaggcgttagggaaatcgccgacgtgttcaatctggacaggctttccatctggcgtaacaaacccagacccgacgccatgcacgtatcccagatataccgatgggacagggattccggcggcactacggtggcgacaaaagggctggaggataccacctatgccaggttcgcgccgcgatgggaaaaactctttgcctcaggcgaatccattaacagccctgtaaggcttctgccggaagcggaaatgctgaaatcatttggctgtatgtcggcgtttgtcacgccgatttttatcaacaacgccgtatggggttttgcccttcttgaagaccgccacaatgagcgtttttttgaggatgacagcgttgaaatgatgcgctcagcgatactcctgtgtacgaacaccgttatacgcgccgacatggaacgtgaaataaccaacgctaatgaatttaaccgggtcacccttgaagcttcgcctgtgggctttaccgtctttgatgaaaatgcccgcgttattgactgcaatgatattgtttggaaaatactgggaaccacaaaaaaatactatcttgaacattttgacgaattttctcctgaataccagaacgacggggtcctgtccctggataaggcggttgagataattaaacgggctataacggcgaaaaactgttatttgagtggacacatcgttcgtctatggggaactactcggccaatctga

SEQ ID NO: 48410 - protein, 488 aa, Unknown
  Obtained from environmental sample
  DOMAIN (240)...(383): GAF domain
  misc_feature (1)..(488): Xaa is any amino acid
MSAIHVLLQKIVTKFNREAVKHNNDGARELLGRRASIVDALNKSIEIFSANKEETFDEVMTNGIRPFADAVGIDRVVFYRLIDDDGSKHLGQIYRWDKSEGGLMSIDEELKFLPNHPVLENWMSITAQGGCIRFRESDYTEDVAVLMRTYGIRSILIVPIFTHGKFWGVINFQEHKNDRYFDEDCADLLYSAARIFSNAVIRVGAGHSAEKANDMLKHREEMEAAMNRAAVMFLSQSKKSFEDTMTVGVREIADVFNLDRLSIWRNKPRPDAMHVSQIYRWDRDSGGTTVATKGLEDTTYARFAPRWEKLFASGESINSPVRLLPEAEMLKSFGCMSAFVTPIFINNAVWGFALLEDRHNERFFEDDSVEMMRSAILLCTNTVIRADMEREITNANEFNRVTLEASPVGFTVFDENARVIDCNDIVWKILGTTKKYYLEHFDEFSPEYQNDGVLSLDKAVEIIKRAITAKNCYLSGHIVRLWGTTRPI

SEQ ID NO: 48411 - DNA, 879 bp, Unknown
  Obtained from environmental sample
  misc_feature (1)..(879): n is a, c, g, or t
atgaccgagaccgccgccgcggtgaacgaaatcaccgccaatatccagagcatcaagggccgcgtcataagccagagcgccagcgttacccagaccaacgccaccatggaacaggttatcaccaatatcaacaaactcaacgaccatgtggaagaccagagcaataatatttcccaggcttcatccgccattgagcaaatggtagccaatgtcaattctgtaacgcaaacgctggttaaaaacgctgataatgtaaacatgttaaaagaagcttccgaggcaggccgcggcggattgcagggagtcgctgcggatattcaggaaatagcccgcaaatccgaagacctgttaaaaattaattcggtaatgaaagacatcgccagccagaccaatctgctttcgatgaacgcggcgattgaagcggctcacgccggggatgcgggcaggggtttcgccgttgtcgccgatgaaatccgcaaactggcggaaagctccagcgaacagtccaagaccatcggcggcgtacttaagaatataaaggaatcaatcgacaaaataaccctttccacgaaagatgtgcttaacgggtttgaagagattgattcaagcgtcaaaacggtagtggagcaggaggataatatccggaacgcgatggaggaacaaggcgagggcagcaggcagatactggacggcataagcaatgtaaacgtagttacccggcaggttaagggcggttccgaggaaatgcttgagggcagcaaggaagtgataaatgaaagccacaaccttgaaatagtaacgcaggaaataaccggcggcatgaacgagatggcatccggagccggaacaggtgaacacagcggtacacaatgtcaatga

SEQ ID NO: 48412 - protein, 292 aa, Unknown
  Obtained from environmental sample
  DOMAIN (51)...(280): Methyl-accepting chemotaxis protein (MCP) signaling domain
  misc_feature (1)..(292): Xaa is any amino acid
MTETAAAVNEITANIQSIKGRVISQSASVTQTNATMEQVITNINKLNDHVEDQSNNISQASSAIEQMVANVNSVTQTLVKNADNVNMLKEASEAGRGGLQGVAADIQEIARKSEDLLKINSVMKDIASQTNLLSMNAAIEAAHAGDAGRGFAVVADEIRKLAESSSEQSKTIGGVLKNIKESIDKITLSTKDVLNGFEEIDSSVKTVVEQEDNIRNAMEEQGEGSRQILDGISNVNVVTRQVKGGSEEMLEGSKEVINESHNLEIVTQEITGGMNEMASGAGTGEHSGTQCQ

SEQ ID NO: 48413 - DNA, 519 bp, Unknown
  Obtained from environmental sample
  misc_feature (1)..(519): n is a, c, g, or t
ttgccacaaccgctttcactgcgcaccgctttggctgcagaatgggtgataagcggtgcaggaaaaaatatagtgagttcctttagcggcattggcggctttgcagcaactgaagaactgattatgattttgaaactaaacgaacttcgcaaaccgaacaaaacctataattttctccccgaaatgacaaagttattttcaaaaatcataaaaaaaaagataccgaaaaacaaacccattataggcagcaaaatatttgaagtagaatctggagttcacgttgacggaattctcaaaaatcctgcaagctatgagccgttttcgccagaaagcgtggggcagaagcggaaaattgtgctgggaaagcatagcggaactgcctcaatacgagcaaagctcgcagagttaaaaattaaatgcacggaagaagatattgtgtatattcttgaacaggttaaaaaaaaaagcgaaatcggtaatcgagaatttgccaaaatcgcaagagaacgctcagcatga

SEQ ID NO: 48414 - protein, 172 aa, Unknown
  Obtained from environmental sample
  misc_feature (1)..(172): Xaa is any amino acid
MPQPLSLRTALAAEWVISGAGKNIVSSFSGIGGFAATEELIMILKLNELRKPNKTYNFLPEMTKLFSKIIKKKIPKNKPIIGSKIFEVESGVHVDGILKNPASYEPFSPESVGQKRKIVLGKHSGTASIRAKLAELKIKCTEEDIVYILEQVKKKSEIGNREFAKIARERSA

SEQ ID NO: 48415 - DNA, 768 bp, Unknown
  Obtained from environmental sample
  misc_feature (1)..(768): n is a, c, g, or t
atgaaacagcgaagataccttttagacaccacgttaagagacggagaacaaagtccgggcttatattttacttccgagcaaaaaataaaaatcgccgcactgctggatttatatggagtgcatcaaattgaagccggagttcctgcggtgtctaagcaggaaaaagaagacataatcaagatcatagaaaacaaaaagaacgctgtgatatcggtgtggtctaggcttgtgccttctgatattgaactagcaattgatacgcgaccggatataattcacatcggcgtgccacttaacaaagactgggttattgaccagttgaaagtttgcttgaatttaatcaacaaaagtggtatttctgcttcggtgggatttataaatgcctttcattcaaaaatggaactcataacaaccattgcaaaaatcctattggactttggagtgaatagaattcgctttgcagacacaacaggcacagcatcgccaagcctttgccacagaatgctgaaagacttttcggaaaaaatggaaggcagggcagagcttggaattcacgcccacaacgatttgggaatggcggtggcaaacacaattgaggcgacaaaagcaggctgcctttacgccgatgtaactataaatggcattggcgagcgagctggaaactgcgacttagctcaacttgttcatgcgagttcatcaatttttgactggggcatcaccgtttctgcggcaaagaaactacaaaaagacataaggaggatattatga

SEQ ID NO: 48416 - protein, 255 aa, Unknown
  Obtained from environmental sample
  DOMAIN (13)...(247): HMGL-like
  misc_feature (1)..(255): Xaa is any amino acid
MKQRRYLLDTTLRDGEQSPGLYFTSEQKIKIAALLDLYGVHQIEAGVPAVSKQEKEDIIKIIENKKNAVISVWSRLVPSDIELAIDTRPDIIHIGVPLNKDWVIDQLKVCLNLINKSGISASVGFINAFHSKMELITTIAKILLDFGVNRIRFADTTGTASPSLCHRMLKDFSEKMEGRAELGIHAHNDLGMAVANTIEATKAGCLYADVTINGIGERAGNCDLAQLVHASSSIFDWGITVSAAKKLQKDIRRIL

SEQ ID NO: 48417 - DNA, 615 bp, Unknown
  Obtained from environmental sample
  misc_feature (1)..(615): n is a, c, g, or t
atgaaaaaaatagctgtattcacaaatgcagattcaaggctgtgcgacttttttgaagctaatcgctttttgatatttgagcgcggcaaaatgggctgggaaaaaacaagcgaaaccagctttgaaaaaatagttccgtctgtgcctgccacaacgcggaaaatcaccgaggcgcttttgccgctcattgagggctgcgaagtgttggcgggtggcccgttggtgggtattccattttcggtatttgaccgagctgggcttcatatttttgaaataggcaaaataggtggcgaaacctttgacggcataatggaagagatatgcaacgcagatgccgccgttgccgcaaaggaggcgattatcagggaagcaaagccagttgaaacatcaacgcctggagtttattttttggatttgatagctttgcaaaaagaatgcccagaggttaccagcaaaaaagcgatgatggactttttaaaaaacacgccctttatggaactccacctagtttgcaaacatatcccaccgtggatagaaaacagcggtgcgtacaaagtgcaaattacgagcgacaaagctggcacggttcaggcggttattactcgggggtgttga

SEQ ID NO: 48418 - protein, 204 aa, Unknown
  Obtained from environmental sample
  misc_feature (1)..(204): Xaa is any amino acid
MKKIAVFTNADSRLCDFFEANRFLIFERGKMGWEKTSETSFEKIVPSVPATTRKITEALLPLIEGCEVLAGGPLVGIPFSVFDRAGLHIFEIGKIGGETFDGIMEEICNADAAVAAKEAIIREAKPVETSTPGVYFLDLIALQKECPEVTSKKAMMDFLKNTPFMELHLVCKHIPPWIENSGAYKVQITSDKAGTVQAVITRGC

SEQ ID NO: 48419 - DNA, 354 bp, Unknown
  Obtained from environmental sample
  misc_feature (1)..(354): n is a, c, g, or t
ttgccaaaaatcctattggattttggcgtaacgcgaattcgctttgcagacacaacaggcacagcatcgccaagcctttgccgagaaatgttggaagatttttcagaaaaactgaagggcaaggcggagcttggaattcacgctcacaacgatttgggaatggcggtggcaaacacaattgaagcggcaaaagctggctgcctttacgccgatgtaactataaacggcattggcgagcgagccggaaattgcgacttagcccaactggtttatgcgagttcgtcaatttttgactggggcatcaccgcttctgcggcaaagaaactacaaacagacataaggaggttgttatga

SEQ ID NO: 48420 - protein, 117 aa, Unknown
  Obtained from environmental sample
  misc_feature (1)..(117): Xaa is any amino acid
MPKILLDFGVTRIRFADTTGTASPSLCREMLEDFSEKLKGKAELGIHAHNDLGMAVANTIEAAKAGCLYADVTINGIGERAGNCDLAQLVYASSSIFDWGITASAAKKLQTDIRRLL

SEQ ID NO: 48421 - DNA, 1581 bp, Unknown
  Obtained from environmental sample
  misc_feature (1)..(1581): n is a, c, g, or t
atggccacacactccgccgaaaccgttgtcacgggtacaggttcagattttatcagtgaatttatcaaagaagatttagcgtcgggcagattcacttatgtgcatacacgtttccctcccgagcccaacggctggctgcacataggccactgcaaggcgttctacatcgacttcacgatggcggagcgtttcggcggcaagtgcaatctccgcttcgacgacaccaaccccgagaaagaagatatatcttatgttgaggcgatcaagcgcgatgttaaatggatgggttatgactgggaggacagggagtactacgcgtcggattattacgagcatctctacgggttagctgtaaaaatcatcaaaaaggggaaggcttatgttgacgatctttccgatgttgaaatgagcgaataccgcggaaccgcggttcaggataaaaacaacataaccgaaacgccgcctggcaaaaacagcccttaccgcgaccgttccattgaagaaaatcttgatcttttcgcccgtatgcgcgccggcgaatttcccgacggggcaagaaccctgagggcaaaaatcgacatggcccaccccaacctgctcatgcgcgatcctgtaatgtaccgcatacgccgcgagacccattaccgcaccggcaacagttggtgcatctatcccatgtacgatttccagcaccccttgtccgacgcgagggagggcataacccattccctctgttcgcttgagtacgagatacaccgccccctgtacgaatggtttatccgcgaagctgaggttttcccctcgcggcagatcgagtttgcccgcctaaacttaagccataccgttatgagcaaacgctggctgcttaagctggtgcaggacaagcgggtttccggatgggacgatccccggatgcccacaatcgcgggtctgcgccgcagaggctatacaccgcaggcgatacggaactttgtttcacagatcggcattgccaaaaccgacagcatggtagacatagcctttttggaatactgcntagggaaagacntgacaaaaaccagcntgagggtaatggcggtgataaagcctctggagcttgttatcgacaactggcctgagggcaaggttgaagaagtcgaagcggtgaacaatcccgaagacgagtcggcgggcaagcggaaaattccctttacaggtaaactgtggattgaacgggaggatttcgaggaagtcccgccacccaagtacttcaggcttttccccggcaacagcgtgcgtctgcgttacggctacatcgttacctgtaccggctgcgacaaggatgcggcgggaaacgtcatcaccgttcactgcacttacgatcctgggacaaagggcgggaacgcgccggacaacaaaaaagttaaaagcaccattcactgggtttccgcttctaatgcgattcctattgaggtgcgtatttacgactatctttttgccgttgataggccgatggaagtggagccgggcaagaccttcctggacaaccttagtctcaattccctggaagttataagtaacgccggccgagccccgccataa

SEQ ID NO: 48422 - protein, 526 aa, Unknown
  Obtained from environmental sample
  DOMAIN (354)...(525): tRNA synthetases class I (E and Q), anti-codon binding domain
  misc_feature (1)..(526): Xaa is any amino acid
MATHSAETVVTGTGSDFISEFIKEDLASGRFTYVHTRFPPEPNGWLHIGHCKAFYIDFTMAERFGGKCNLRFDDTNPEKEDISYVEAIKRDVKWMGYDWEDREYYASDYYEHLYGLAVKIIKKGKAYVDDLSDVEMSEYRGTAVQDKNNITETPPGKNSPYRDRSIEENLDLFARMRAGEFPDGARTLRAKIDMAHPNLLMRDPVMYRIRRETHYRTGNSWCIYPMYDFQHPLSDAREGITHSLCSLEYEIHRPLYEWFIREAEVFPSRQIEFARLNLSHTVMSKRWLLKLVQDKRVSGWDDPRMPTIAGLRRRGYTPQAIRNFVSQIGIAKTDSMVDIAFLEYCXGKDXTKTSXRVMAVIKPLELVIDNWPEGKVEEVEAVNNPEDESAGKRKIPFTGKLWIEREDFEEVPPPKYFRLFPGNSVRLRYGYIVTCTGCDKDAAGNVITVHCTYDPGTKGGNAPDNKKVKSTIHWVSASNAIPIEVRIYDYLFAVDRPMEVEPGKTFLDNLSLNSLEVISNAGRAPP

SEQ ID NO: 48423 - DNA, 831 bp, Unknown
  Obtained from environmental sample
  misc_feature (1)..(831): n is a, c, g, or t
ttgccccaaacataccaaggaagaaaaagaaaaagtaaatggagaatatttatggtatatgaatttgaaggccgcaccgaaaaagaagcgatagatcgggcggcggaagaattaggtcttaaaacagacgattttgatgtcgagattgttgaaagccaacgttcgagtttgttcaaaaaaggctttgtcaagattaaggttcatacgaaccacctggaacgaagcgcctcttctgactctaagagcccgctcgcggacccgaagagcccgcttgcggataacggcaacaaaggcaacgttggcgtcaaacaatcgaacgggcaaaaacaggtaaaccacagcgtattcggcgatcctgagcccaaaaatgaatttgaaaagcagttgatcgattttctggaaggcctcattgagcggatgggttattatggaaaagtcattgtccttttccgtgaagagcacaagattggattgaagattgattccgagtactcatctatcctgatagggaagaaaggaaaaaaccttgacgcccttcagcttctggccaacatttttgcagggcgcaaggggcgcgaagatatgcgggtgattctggacagtgaaaattaccgcatccgccgcgaggaatctctggtgcgcctggcttatactgttgccgaccgtgtccgtgaaaacaggggctcggttttattggaaccgatgaatccctttgaccggaggcttattcacaccactctgaacgacattgccgatgtggaaaccaagagcgaaggcgaagggctttacaagcaggtaagggttttctaccgtgggcttggccgcagttaa

SEQ ID NO: 48424 - protein, 276 aa, Unknown
  Obtained from environmental sample
  DOMAIN (216)...(271): R3H domain
  misc_feature (1)..(276): Xaa is any amino acid
MPQTYQGRKRKSKWRIFMVYEFEGRTEKEAIDRAAEELGLKTDDFDVEIVESQRSSLFKKGFVKIKVHTNHLERSASSDSKSPLADPKSPLADNGNKGNVGVKQSNGQKQVNHSVFGDPEPKNEFEKQLIDFLEGLIERMGYYGKVIVLFREEHKIGLKIDSEYSSILIGKKGKNLDALQLLANIFAGRKGREDMRVILDSENYRIRREESLVRLAYTVADRVRENRGSVLLEPMNPFDRRLIHTTLNDIADVETKSEGEGLYKQVRVFYRGLGRS

SEQ ID NO: 48425 - DNA, 1125 bp, Unknown
  Obtained from environmental sample
  misc_feature (1)..(1125): n is a, c, g, or t
atgacaaagaatattcattccgtaacaaatacattgatagaaaacagtaaaaacgtagaaaagctgacggaagcgtcggaaaacgggaaagaagggcttcagacggtggcggagaaaataaaggaaatcgcccgcgactccgaagggcttttggaaataaacttattaatggacaatatcgccggtcagacaaacctgctttcgatgaacgcggcaatcgaggccgcgcacgccggagaagccgggaagggatttgccgtagtcgcagatgaaatccgcaaacttgccgaatcgtcaagcgagcagtccaaaacaacagcggcaatgttaaagaaaataaaagaatccatagacagcatcacggcatcttccaacgaggttctttcccgtttcgaggttattgattccgaggtaaagacggtatcccagcatgaacaaaatatccttaacgcgatggaagaacaggaagcgggaggaaagcaaatagttgattccatgctgcacttaaaagagacaagcgtaactgtaagacaaggatcggaggatatgcttgaatcgggcagccacctgaccacacaaacgaatgatttcattaatatcagcaacaaggttgtagaaggcatgaacaatattataaacggcgccatgcaggagataaaagccgccgtaaatcttttaaatgagatgagtacggaaaacaccaataatttcgatgagttgaaagcggaatcgttaaaatttaaagttgatacatccggcgcgaagaaaaaaatcattattattgacgatgaggcgaccgttcttaccatgacaaaaaccatgctgggagacgagtatgacgttaccatggcaaagtccggtaatgatgccttaaaattgttcttccagggatatacccccaatttagtgttattggatttaagtatgccggaaatgggcggctgggacgcttataaaaggatacgtgatttatccaaattacacagcgttcctatagcgatatacacaacttcaaatgatccgaaagacagagctcgcgctaaggaaatgggagcggttgattatattcaaaagcccgctaaaaaagaagatcttttaagcaggataaagagaaacattaattaa

SEQ ID NO: 48426 - protein, 374 aa, Unknown
  Obtained from environmental sample
  DOMAIN (1)...(200): Methyl-accepting chemotaxis protein (MCP) signaling domain
  misc_feature (1)..(374): Xaa is any amino acid
MTKNIHSVTNTLIENSKNVEKLTEASENGKEGLQTVAEKIKEIARDSEGLLEINLLMDNIAGQTNLLSMNAAIEAAHAGEAGKGFAVVADEIRKLAESSSEQSKTTAAMLKKIKESIDSITASSNEVLSRFEVIDSEVKTVSQHEQNILNAMEEQEAGGKQIVDSMLHLKETSVTVRQGSEDMLESGSHLTTQTNDFINISNKVVEGMNNIINGAMQEIKAAVNLLNEMSTENTNNFDELKAESLKFKVDTSGAKKKIIIIDDEATVLTMTKTMLGDEYDVTMAKSGNDALKLFFQGYTPNLVLLDLSMPEMGGWDAYKRIRDLSKLHSVPIAIYTTSNDPKDRARAKEMGAVDYIQKPAKKEDLLSRIKRNIN

SEQ ID NO: 48427 - DNA, 600 bp, Unknown
  Obtained from environmental sample
  misc_feature (1)..(600): n is a, c, g, or t
atgttcagattcggccgagcttggcgaaccggcgcgttaattctggaaaaggcaaaatcaggtaaaagccaaaatttcaccgtacctgaaggcgttgctacaattatacccgtcccttctcttaactggcatattgcagccattcttccgcttacggtaaaagactccctgaacggcggcatgacaatgctcttcctgctaatgatggcggccatagcggttatcctgataatttctttcttttttatcacggggatgttaaaacccatgcacagcatgctggaaacattggacaaaatagcggaggactgggatcttacccggcgggttaaattcaggcatctggacgaattcggcgttcttgcccatgactttaactttatgatggatcaaataaaaaaccttgtaggaacgataaaatataaaatcagcgcgctcaccaatacaggttatgaactttcctccaatgtggaaaaaacttccaaagcggtaggttccatttcggcggattttgacggcatgaaggctatgtcgggcaagcaggacataagcggcatccgaagcgcgcaacgcggcgacgactattcaaaacagcattaa

SEQ ID NO: 48428 - protein, 199 aa, Unknown
  Obtained from environmental sample
  DOMAIN (64)...(134): HAMP domain
  misc_feature (1)..(199): Xaa is any amino acid
MFRFGRAWRTGALILEKAKSGKSQNFTVPEGVATIIPVPSLNWHIAAILPLTVKDSLNGGMTMLFLLMMAAIAVILIISFFFITGMLKPMHSMLETLDKIAEDWDLTRRVKFRHLDEFGVLAHDFNFMMDQIKNLVGTIKYKISALTNTGYELSSNVEKTSKAVGSISADFDGMKAMSGKQDISGIRSAQRGDDYSKQH

SEQ ID NO: 48429 - DNA, 957 bp, Unknown
  Obtained from environmental sample
  misc_feature (1)..(957): n is a, c, g, or t
gtgctggaagacgatgagatgttcaattcaggcctgctgagagaccatatcggccagatgatctcgtcaggccggcgccatatcgccatagacatctcgccgctcgactatatatactcagacggcatcaacgcgctggtgacgctcaacaagcgtatgcaggaggccggggcgggcgggacgctcgccctcctttcgcctcaggcaaaggttattggcatactccagaccgccgggatacagagcgcgatgcgcgtcttgtccggcgaggccgaacttatggggttgtcgagcgagatatcggccgccgccgcggctgccggttccgccgcgcagtcagagttcgagagcctgcgttccgagatcggctccgctttcggggacgacgcgccgctgggcgttcgcacccccgccgcctccgcgcctccgccgcctccggtctatgcgcctccgcctcctcctccaccgccgccgcttgcgatggagcctctgtccgctccggcaccgtcgtttgaaccgatgtcgccgccgccgcccctatggagttgcagcccatggccccgccgcctacggcacccgctttcccgccgccgtccgaatctttcccgtcggagaccatggccttcggggaactcggcggcagttcgttcggcatgctcgagacgccccccaagaagtcgttcgacgacgacgatttcgacgacgacttcggcggcaagaaaaagaagaagcccaaggcgcggttcgacgactttgacgacgatgatttcggtgtcaagaagaagaagagcaaggatccctttgacgacgacttcgatttcaagaagaagagcaaagacccgttcgacgacgacttcggcggcaagaagaagttcgccaaggagtcgtttaacgacttcggcatggaggacagcgtattcagcgataagaagaaaggctctcccgtcgcggcgatag

SEQ ID NO: 48430 - protein, 318 aa, Unknown
  Obtained from environmental sample
  misc_feature (1)..(318): Xaa is any amino acid
MLEDDEMFNSGLLRDHIGQMISSGRRHIAIDISPLDYIYSDGINALVTLNKRMQEAGAGGTLALLSPQAKVIGILQTAGIQSAMRVLSGEAELMGLSSEISAAAAAAGSAAQSEFESLRSEIGSAFGDDAPLGVRTPAASAPPPPPVYAPPPPPPPPPLAMEPLSAPAPSFEPMSPPPPLWSCSPWPRRLRHPLSRRRPNLSRRRPWPSGNSAAVRSACSRRPPRSRSTTTISTTTSAARKRRSPRRGSTTLTTMISVSRRRRARIPLTTTSISRRRAKTRSTTTSAARRSSPRSRLTTSAWRTAYSAIRRKALPSRR

SEQ ID NO: 48431 - DNA, 1026 bp, Unknown
  Obtained from environmental sample
  misc_feature (1)..(1026): n is a, c, g, or t
atgatggccgagagacctgcgctacccaagatagtgctgatgacagacgccgacgtggacggaagccacatacgcaccttgctcctcacgtttttttataggcaggcaccggagctggttctgaggggcaacgtttacatcgcccagccgcccctttacaaggtcaagaagggcaagcaggagcagtacctgaaagacgagcgcagcctagaagagtacctcttcagccgtgccttggacggttggagccttctcctgcctgacaagcaaaaaattgcgggcagtgcgcttgtggccaagctaaaaaaactgggcgaagttaaacacctctacagcaagctagaacgtcgcggctatgccaaagaactcactgatgcgctattggccgatgggtttctggagccaggctgcttcaagtccaaagagtccgcagaggcgctggcagggtacctgacggagcgcggcatgggtgcctgcaccatcgaaagcacggaggatgcctcggatgaaaatgaggcagtccctgccttccatgccataaggctggttagggtacacctgtcccgccccataaccctgcggattgattcctctgtcgcgcattggggcgaatttcgccgattggcggcacttcgcaaagagttggcctcattttatagtggcgagctgactctggcgcgctcggctcaaaaaaaggccgccccgcaagaggacggcgatgaggatgttcccaagctgtcggctagagagatgtccttctccagcccggaggacatgctggccgccgttttggaggaaggcaagcgaggcgtgtccatacagaggtacaagggcctcggcgagatgaaccctgaacagctttgggagaccaccatggaccccagccgccggactctgctccaagtgcgagtggacgatgcggtagaggccgatgaaatctttaccgtgcttatgggcgatgcagtggagccaaggcggcggtttattgaagacaatgcccttttggcggaaaacattgatgtgtaa

SEQ ID NO: 48432 - protein, 341 aa, Unknown
  Obtained from environmental sample
  DOMAIN (264)...(330): DNA gyrase B subunit, carboxyl terminus
  misc_feature (1)..(341): Xaa is any amino acid
MMAERPALPKIVLMTDADVDGSHIRTLLLTFFYRQAPELVLRGNVYIAQPPLYKVKKGKQEQYLKDERSLEEYLFSRALDGWSLLLPDKQKIAGSALVAKLKKLGEVKHLYSKLERRGYAKELTDALLADGFLEPGCFKSKESAEALAGYLTERGMGACTIESTEDASDENEAVPAFHAIRLVRVHLSRPITLRIDSSVAHWGEFRRLAALRKELASFYSGELTLARSAQKKAAPQEDGDEDVPKLSAREMSFSSPEDMLAAVLEEGKRGVSIQRYKGLGEMNPEQLWETTMDPSRRTLLQVRVDDAVEADEIFTVLMGDAVEPRRRFIEDNALLAENIDV

SEQ ID NO: 48433 - DNA, 642 bp, Unknown
  Obtained from environmental sample
  misc_feature (1)..(642): n is a, c, g, or t
gtgcggatggtatttaccgatgacgtcgccgacgatacgcgccgactttttatatggcttgttatacgtgttgcccagatcgtgcatcgcgtacagaacgcgccgatgcacgggtttcagcccgtcgcgcgcgtccggcagcgcgcgccctatgatgacgctcatcgcgtagtccagataggacttgcgcatttccttttctatttcaattggttctattcgctggggttttgccgcttgttccacgtggaacctcaaattttgttacacatcaatgttttccgccaaaagggcattgtcttcaataaaccgccgccttggctccactgcatcgcccataagcacggtaaagatttcatcggcctctaccgcatcgtccactcgcacttggagcagagtccggcggctggggtccatggtggtctcccaaagctgttcagggttcatctcgccgaggcccttgtacctctgtatggacacgcctcgcttgccttcctccaaaacggcggccagcatgtcctccgggctggagaaggacatctctctagccgacagcttgggaacatcctcatcgccgtcctcttgcggggcggcctttttttgagccgagcgcgccagagtcagctcgccactataaaatga

SEQ ID NO: 48434 - protein, 213 aa, Unknown
  Obtained from environmental sample
  misc_feature (1)..(213): Xaa is any amino acid
MRMVFTDDVADDTRRLFIWLVIRVAQIVHRVQNAPMHGFQPVARVRQRAPYDDAHRVVQIGLAHFLFYFNWFYSLGFCRLFHVEPQILLHINVFRQKGIVFNKPPPWLHCIAHKHGKDFIGLYRIVHSHLEQSPAAGVHGGLPKLFRVHLAEALVPLYGHASLAFLQNGGQHVLRAGEGHLSSRQLGNILIAVLLRGGLFLSRARQSQLATIK

SEQ ID NO: 48435 - DNA, 1062 bp, Unknown
  Obtained from environmental sample
  misc_feature (1)..(1062): n is a, c, g, or t
atgacatcatattcccaaaaagaggtagttatgaagattcataatgattttaccttgtattttcgggttgccccttcggggaaacgggtcgtgtatttctacgcttatgacgaaaacggcaggcggacgcagggcaggtccaccgggcagaccacaaaaacggctgcaagggtgctggtgaacaggcttttgaaagaaggagcattattgccgaaaaaaaacgacacgcccactttcggcgaatacgccgtggactggtgggattgggaaaaatgcgaatacctgaaaaagagacggaagcgggctaatttgacccaaagctattccgaccacatgaagcggaatttggataaggtcgtgctgccgtatttcaggaatatgaaaatggacgcgattacccctgcggttatcgaggcgtttttggacagccctcatcaacaaaaatacaagaataccacgattaacggctactacggcactttcaaaaccatgatgatcgaagccgtcgagcgcggggttatagccgcagaccctaccgccaaagtcgagcgcctgataaacgaccgcaatgaaataaagattattacccctcttgaattcaaaaagctgtttgtggtggactggcgcaaagcttgggaagacaatttcatcgcctgtaccgtgaacaagctggcggctctgtcgggcatgagggtgtccgagattttggggcttaaagggagctgcctgttcgacgatcacatttacgtctgtatgcagcatgacatatacggctacaggccgaccaaaacaaaagacaggcataacataccgcttcccgcttcccttatcggcgatttgaaactgctgaaagaaacaagcggggacggatacctgttttccgctaacggcgggggcagccccatttgcaggaaaactgttttgatgtatctgcgaaaggcgctggtaaatatcgggattaccgccgccgagattaaagagcgcaatttgcatatccacgcatggaggcattttttcaatacggaaatgctgaagggcgggatgactacggaacaggcgtag

SEQ ID NO: 48436 - protein, 353 aa, Unknown
  Obtained from environmental sample
  misc_feature (1)..(353): Xaa is any amino acid
MTSYSQKEVVMKIHNDFTLYFRVAPSGKRVVYFYAYDENGRRTQGRSTGQTTKTAARVLVNRLLKEGALLPKKNDTPTFGEYAVDWWDWEKCEYLKKRRKRANLTQSYSDHMKRNLDKVVLPYFRNMKMDAITPAVIEAFLDSPHQQKYKNTTINGYYGTFKTMMIEAVERGVIAADPTAKVERLINDRNEIKIITPLEFKKLFVVDWRKAWEDNFIACTVNKLAALSGMRVSEILGLKGSCLFDDHIYVCMQHDIYGYRPTKTKDRHNIPLPASLIGDLKLLKETSGDGYLFSANGGGSPICRKTVLMYLRKALVNIGITAAEIKERNLHIHAWRHFFNTEMLKGGMTTEQA

SEQ ID NO: 48437 - DNA, 852 bp, Unknown
  Obtained from environmental sample
  misc_feature (1)..(852): n is a, c, g, or t
ttgtcgcacaggaaaaatactgaagccgagtggattaactggaaaggcgaacctgtcgtcgggtttttcaggactcttcacaacgggtggcgtttgggacttttgtcgccgaaagatatgtattttcaggctgtaaacgaaatggcgtttattctttgtttattgggttttgcgctcgcggcggtgctgataattgttttaatccgcgttgacatggcaaaaaacaaatcagacagggaaagcaggcacaaaagcgcgtttctggcgaacatgagccacgagatacgcactccaatgaacgctataaccggaatgatcacgataggaaaagcggcatccgatattgagcgcaaggattattgcttcgagaaaattcatgacgccgctaatcatctgttaggtgtaattaacgatattctggatatgtcaaaaatcgaagccaacaaatttgaacttgttccggcggaattcgggcttgaaaaaatgctgcgccgggtggtgaacgtcaacactttccgcatggacgaaaagcatcttaaattttcggtgaatattgatcattccattcccggtacattgataggagatgatcagcgccttgcacaggtaattaccaatcttctcggaaacgcggtcaaattcacgcctgaacacggcgcgataagttttaccgtgcgtcttgttgagaaagtaaataatatgtataccctgcaattctcggtaagcgatacgggaatcggcataagccccgaacaacaggaaaaacttttcaatcctttgaacaggccgaatccagcacaacccgcaaatacggcggcacaggacttggacttgcaatttccaaaaacatag

SEQ ID NO: 48438 - protein, 283 aa, Unknown
  Obtained from environmental sample
  DOMAIN (195)...(283): Histidine kinase-, DNA gyrase B-, and HSP90-like ATPase
  misc_feature (1)..(283): Xaa is any amino acid
MSHRKNTEAEWINWKGEPVVGFFRTLHNGWRLGLLSPKDMYFQAVNEMAFILCLLGFALAAVLIIVLIRVDMAKNKSDRESRHKSAFLANMSHEIRTPMNAITGMITIGKAASDIERKDYCFEKIHDAANHLLGVINDILDMSKIEANKFELVPAEFGLEKMLRRVVNVNTFRMDEKHLKFSVNIDHSIPGTLIGDDQRLAQVITNLLGNAVKFTPEHGAISFTVRLVEKVNNMYTLQFSVSDTGIGISPEQQEKLFNPLNRPNPAQPANTAAQDLDLQFPKT

SEQ ID NO: 48439 - DNA, 888 bp, Unknown
  Obtained from environmental sample
  misc_feature (1)..(888): n is a, c, g, or t
atgggcggcagtatttggattgaatcagaactgggaaaaggcgctgttttttcctttaccattaaattaaaacgcgtaacaaatgaaaaacaaaagaccttatccgccgatataaatataaaaaatgtccgtatcctcgctgttgacgatgacgcggacgtattggcgtactttaatgaaatagcgcagaacctcggcctaatttgcgatactgccgcaagcggggaagaagcgcttaaacttatagaacaaaaaggcggctacaatatttatttcatagactggaagatgccaggcatggacggcatacagcttgcccgtgaaataaaaacaaatgtcacaaaaaattccattgtaacaatgataactgccgccgaatggggcgatattgccgaagaagctaanatggcgggcgttgataaatttcttcccaagcccctgttcccttccgccattgcggagatggttaataaatgtctncgcgcagacaggcagccaggcgaaaaatcgcaagttcaggacattgccggcatctttgcggggcatcgcatacttcttgtagaagacgtagaaataaaccgtgaaatagtactatccttgcttgaatcaacaaagctggagatagactgcgcggaaaccggaaaggaagcggtgcgtatgttcagcgaagcgcctgataaatacgaattgattttcatggatttacagatgcccgaaatggacggctacgaagcgacacaacttatcagggctatagaagcggagcgcgataaaaatattttagaagatattgtcgcgaattcgaccgaaaataataacaacggcgcaaataatgggaatttgcgcaagcaaattcccatttatcgcaatgaccgcgaatgtttttag

SEQ ID NO: 48440 - protein, 295 aa, Unknown
  Obtained from environmental sample
  DOMAIN (182)...(266): Response regulator receiver domain
  misc_feature (1)..(295): Xaa is any amino acid
MGGSIWIESELGKGAVFSFTIKLKRVTNEKQKTLSADINIKNVRILAVDDDADVLAYFNEIAQNLGLICDTAASGEEALKLIEQKGGYNIYFIDWKMPGMDGIQLAREIKTNVTKNSIVTMITAAEWGDIAEEAXMAGVDKFLPKPLFPSAIAEMVNKCLRADRQPGEKSQVQDIAGIFAGHRILLVEDVEINREIVLSLLESTKLEIDCAETGKEAVRMFSEAPDKYELIFMDLQMPEMDGYEATQLIRAIEAERDKNILEDIVANSTENNNNGANNGNLRKQIPIYRNDRECF

SEQ ID NO: 48441 - DNA, 432 bp, Unknown
  Obtained from environmental sample
  misc_feature (1)..(432): n is a, c, g, or t
ttgcccaacggcgcaacaattgccataccgaatgatccgtctaatggaggacgcgctctgcttctgcttcaggcaaaagggcttataactcttaaaaccggcaataaactgactgccactcctcgtgacattggcgataacccaaaaaatttccgttttcaggaacttgaagccgcccaacttccccgttcattacaagacgtggatgccgctaccattaacggcaactatgcgcttgaagccaaacttaatcctgtgaaagacgcacttatcattgaaggggcggattctccctatgtcaacattgttgtagtgcaaaaaggcaagcaaaatgatcccggtatcattgccctgaaaaacgccctcctcagtaataaggtaaagaattatatcgacagtcactacggcggtggcgttgtagcggttttttaa

SEQ ID NO: 48442 - protein, 143 aa, Unknown
  Obtained from environmental sample
  DOMAIN (1)...(143): NLPA lipoprotein
  misc_feature (1)..(143): Xaa is any amino acid
MPNGATIAIPNDPSNGGRALLLLQAKGLITLKTGNKLTATPRDIGDNPKNFRFQELEAAQLPRSLQDVDAATINGNYALEAKLNPVKDALIIEGADSPYVNIVVVQKGKQNDPGIIALKNALLSNKVKNYIDSHYGGGVVAVF

SEQ ID NO: 48443 - DNA, 801 bp, Unknown
  Obtained from environmental sample
  misc_feature (1)..(801): n is a, c, g, or t
ttgtcatcatcaatagaagcgtttttcatccctatgccgtatatggttatggaatactgttttgaaaaagcactatttaaagcagccggtgatgacagggtagaaacctgttcaggtccgctttctcagttgaaggaagacagacctagagaacggcttgtacgtttaggtcctcaatcactgtcggacgaggaactgctttccattattttggtctcaggaatacacgggaaaaatgtatctattcttgcgcgggatctgttatcaaaactggaagcggaaaagaaattgcccacagtgaatgaactttgcaggctttcgggactgggcgtttcaaaggcatgtactgtgtcggcaatgcttgaattcggtagaaggaaatgggcgtcaggccagcgtattaagcatcctgaggatatttataatattatcaggcatcatgccgaccgcaggcaggagaaatttatcagcatttccctaaacggagcgcatgaagtaattgccgtccggattgttacaatcggcctggtgaacagaacgattattcatccaagggaggttctggcagatccccttcaagatagggcaagctcaatcgccgttgcccacaatcacccttccgggaaccttcaaccctccatggaggacagaaaaatcacccagaggttaaaagactcggcggaaatcctgggcctccattttcttgaccatttgattttttcggataccgacctattcagtttccgccgggaaggattgatcatagaaaaagaaaaaaagcagctggatgatatcgggtga

SEQ ID NO: 48444 - protein, 266 aa, Unknown
  Obtained from environmental sample
  DOMAIN (131)...(254): RadC, DNA repair protein
  misc_feature (1)..(266): Xaa is any amino acid
MSSSIEAFFIPMPYMVMEYCFEKALFKAAGDDRVETCSGPLSQLKEDRPRERLVRLGPQSLSDEELLSIILVSGIHGKNVSILARDLLSKLEAEKKLPTVNELCRLSGLGVSKACTVSAMLEFGRRKWASGQRIKHPEDIYNIIRHHADRRQEKFISISLNGAHEVIAVRIVTIGLVNRTIIHPREVLADPLQDRASSIAVAHNHPSGNLQPSMEDRKITQRLKDSAEILGLHFLDHLIFSDTDLFSFRREGLIIEKEKKQLDDIG

SEQ ID NO: 48445 - DNA, 1035 bp, Unknown
  Obtained from environmental sample
  misc_feature (1)..(1035): n is a, c, g, or t
atggcacaaaatagaccccccacccccctattgtctgaaccccgattggccaggattttaggatttacaggatttcaacattcaatccctcaaaatggagaacaaactatgataacacaatatcataaaatcgtattggcggcaaccttcgggcttgctatggctttcaccctttcctgttccgatgactctggcggtagtaattacacgccgagttacaaatattgcattaaggacaatatttgcctggaaggtccatttacagtcaactattgcctagacggccaattgagcaatagctgcccctcaagcccaggcggtggttctagttcgtctgccacaataggcggtagcggttccagcagttccacaactggtaacggcggttcgtcttcgtccggtggtggcggtagccccagcgaatacacaggcggttcttgcaatgcgagtgattacggaagagctgaaattggcggtaaagtatggatggctaagaattggggctgctatgcttctggcagcaagtgctacgataatgaccccgccaactgcacaaaatacggcaggctttacgactgggcaaccgcgatggctcttccttccaaatgcaacactattctttccacaagtgatgcagcttgtgctataagaactccgcatcagggaatatgccccagtggttggcatattcctacaaacgctgagtgggatgctttgttccgctctgcggatggcacgagcggcacatcaagcccttacgacagtcccacagctggcaagcatttgaaggcgaaggacggctggtataattgcggtccttctggctctggcaaagaatatttatgcgaggacacatacgctttttccgccctgccgggcggcctcggcacttccagtggcagtttcgaccttgccggcagccacggctactggcggagtgccagcgagagcgttagcggcaacgcctacagcagggacttgtactacagccacgaggacgcctactacaactacttcataaatcctcggcgataa

SEQ ID NO: 48446 - protein, 344 aa, Unknown
  Obtained from environmental sample
  misc_feature (1)..(344): Xaa is any amino acid
MAQNRPPTPLLSEPRLARILGFTGFQHSIPQNGEQTMITQYHKIVLAATFGLAMAFTLSCSDDSGGSNYTPSYKYCIKDNICLEGPFTVNYCLDGQLSNSCPSSPGGGSSSSATIGGSGSSSSTTGNGGSSSSGGGGSPSEYTGGSCNASDYGRAEIGGKVWMAKNWGCYASGSKCYDNDPANCTKYGRLYDWATAMALPSKCNTILSTSDAACAIRTPHQGICPSGWHIPTNAEWDALFRSADGTSGTSSPYDSPTAGKHLKAKDGWYNCGPSGSGKEYLCEDTYAFSALPGGLGTSSGSFDLAGSHGYWRSASESVSGNAYSRDLYYSHEDAYYNYFINPRR

SEQ ID NO: 48447 - DNA, 1314 bp, Unknown
  Obtained from environmental sample
  misc_feature (1)..(1314): n is a, c, g, or t
ttgaccgtcagcgacaccggccaagggatgtcgaaagagcagatgcaacggctctttaccgaatacacgcgcttcaaccttgaagccaaccgcgctgtggagggcaccgggcttggcatgaacatcacgcggcggctgataaccctgatgggcggctcaatctccgtggacagcgacgtaggccgagggactacggtcaacgtgcgcctgccgcagaaacgcgtgggcgaggagcgcataggcaaggaactggccgaaaacctgcggaaattccgcgtggatacctcgttcaacgaaagaagggcgcagttcaaacgagattacatgccctacggcaaagtgctcatagtcgacgacgtggaatcgaatctctatgtgggcaaggggctcatggcgccgtacggcctggccatagacaccgtcggcggcggcattgaggccattgagaaaatcaaatccggcaaagtttatgatgtgatattcatggaccacatgatgccgaaaatggacgggatcgaggcggcggcgcgtatacgggcgctcggctacacccggcccatcgtggcccttacggccaacgccgttatcgggcaagcggatatgtttctcgaaaacggattcgacgactttatctcaaaacctattgacatcaggcagttgaacgcggtgctcaacaacttggtgcgcgataaacaaccgccggaagtcttagaaaaggcccggcgcgagaaagccgtcgcggaagcggacgcggtaaacccgagcgccgccgcggcccacgccgaactgctcgcggtcttcgcccgcgacgcgggcaaggcgctgcaaatccttgagtccaccgcccaaaacgtaagaaatctttcagccgacgatatgcgcctcttcacgataagcgtccacggattgaagagcgccctgtcaaacatcggggagaccgctctctcgcaaaccgccctcgccttggaaaaagcgggagagcgcggcgacaagggcgctatcgacgcccaattgaacaacttcataaacgccatcagcagtgtgatcgtaaaagccgaagcggaaaacagcagggcgaggagcttgtcgccggaagacgaagaccctaaatacctgcgcgaacggttaaccgcaatagcgtccgcctgcaaagactacgataaagacctcatcgatgagacgctgaaaaagttgaaaaaaatgtcttggacggcggcgacgcacgagacgctggacaaaatcgccgcgcttattctgaacagcgatttcagcggggcggcggaaatcgcggagagctctattcccacttcataa

SEQ ID NO: 48448 - protein, 437 aa, Unknown
  Obtained from environmental sample
  DOMAIN (262)...(344): Hpt domain
  misc_feature (1)..(437): Xaa is any amino acid
MTVSDTGQGMSKEQMQRLFTEYTRFNLEANRAVEGTGLGMNITRRLITLMGGSISVDSDVGRGTTVNVRLPQKRVGEERIGKELAENLRKFRVDTSFNERRAQFKRDYMPYGKVLIVDDVESNLYVGKGLMAPYGLAIDTVGGGIEAIEKIKSGKVYDVIFMDHMMPKMDGIEAAARIRALGYTRPIVALTANAVIGQADMFLENGFDDFISKPIDIRQLNAVLNNLVRDKQPPEVLEKARREKAVAEADAVNPSAAAAHAELLAVFARDAGKALQILESTAQNVRNLSADDMRLFTISVHGLKSALSNIGETALSQTALALEKAGERGDKGAIDAQLNNFINAISSVIVKAEAENSRARSLSPEDEDPKYLRERLTAIASACKDYDKDLIDETLKKLKKMSWTAATHETLDKIAALILNSDFSGAAEIAESSIPTS

SEQ ID NO: 48449 - DNA, 810 bp, Unknown
  Obtained from environmental sample
  misc_feature (1)..(810): n is a, c, g, or t
atggcagtcagcctcaagtacagggaaaaggatatgttggtatcatacgcccgcgatatgcgtgagataaacgcggcgaacgcgaagatgcgcgaggcggacgagcgcgctcagatactgctagactccgcgcctataagctgcaccctgttcgacgagaacagcaaagcgatagagtgcaacgtggaggcgcttaaaatgctcggcgtgtcggacaaggacgacttcctgaatcaccataccaggtattcgccgaagtaccagccggacgggacgctgtccgcggaaaaggctattgagatcaccaaaaaagcgatggaaaccggtagagcccgctttgagtggacgcacttagacgtacacggacaggcggtgccgtgcgcggttacgctggtgcgcgtcaagtacaaggggcagtttgtggtcgccggatacgcgagagatttgcgagagtttcgggcgatggtaaatgagatgcatcgggcggagatcgccgaggagagcaacaaggcgaagagcaagtttctggcggccatgagccacgagatacgcacgccgatgaacgttatcttgggggtaacggagatacagcttcaggacgagtcgctcccggcgcacgttcgggaagccttcatgcagatctataattcaagcgacctattgcttggtatcatcaacgatatcttagacttctccaaaatagaggcggggagaatggagtttacgcccgtcaaatataggctcgcgagcctgataaacgacgccgttcacctcaacatgatacgcggcagcaaacgcggtggcgtttga

SEQ ID NO: 48450 - protein, 269 aa, Unknown
  Obtained from environmental sample
  DOMAIN (171)...(237): His Kinase A (phosphoacceptor) domain
  misc_feature (1)..(269): Xaa is any amino acid
MAVSLKYREKDMLVSYARDMREINAANAKMREADERAQILLDSAPISCTLFDENSKAIECNVEALKMLGVSDKDDFLNHHTRYSPKYQPDGTLSAEKAIEITKKAMETGRARFEWTHLDVHGQAVPCAVTLVRVKYKGQFVVAGYARDLREFRAMVNEMHRAEIAEESNKAKSKFLAAMSHEIRTPMNVILGVTEIQLQDESLPAHVREAFMQIYNSSDLLLGIINDILDFSKIEAGRMEFTPVKYRLASLINDAVHLNMIRGSKRGGV

SEQ ID NO: 48451 - DNA, 567 bp, Unknown
  Obtained from environmental sample
  misc_feature (1)..(567): n is a, c, g, or t
atgtatcagatggccgaggaaaatacgctggacgactgttcccaggctacaatcgaagtccaggttcttggccttgaccggacaggggatatatccggcgctatggcccctgaaatttggttttcgtttttaagaaacggcgatgaggcggaaagtgtacgggaactccttttgatctgtgatcacaacgtgcgggatgtagcgggccttgcgacgcttttccttgcccttggaaaaatagcgtctgatccgttcgggagccgggatacttttcgttttgatgataaagcgctggctttgtcctggtggaaggccgttaaaaagcatcccgctttttttgaggatgatgaattctgcgctaaaacagcttttcctcttctggaagccgcggctactgacggaagtcctcaagcggctattacccttgcaaaagacgcggagtggcggctaagggattttagtttggcgctgcattacactaatttagcgctgactgctccggaacttcctttgagctttcgggacgagatagaaaaaaggcaaaaacggctggaaaagaaaatatga

SEQ ID NO: 48452 - protein, 188 aa, Unknown
  Obtained from environmental sample
  misc_feature (1)..(188): Xaa is any amino acid
MYQMAEENTLDDCSQATIEVQVLGLDRTGDISGAMAPEIWFSFLRNGDEAESVRELLLICDHNVRDVAGLATLFLALGKIASDPFGSRDTFRFDDKALALSWWKAVKKHPAFFEDDEFCAKTAFPLLEAAATDGSPQAAITLAKDAEWRLRDFSLALHYTNLALTAPELPLSFRDEIEKRQKRLEKKI

SEQ ID NO: 48453 - DNA, 636 bp, Unknown
  Obtained from environmental sample
  misc_feature (1)..(636): n is a, c, g, or t
atggctcagccggaatacgggaaaaagagggcttccgaaatcggtgaaaaagcctgcatgcccgggcctttgcgtccaccaaaggaaggcacggtttatctcgccacagccgatggcgatggaaacatggtctcgtacatacaaagcaactacatgggctttggcagcggcgttgtaatccgcggaacaggcattgcccttcaaaaccgcggggtggacttttcccttgacccccttgcgcctaacgcgctggctcccggcaaaaagagctatcatactatcatccccggtttccttaccaaagacgggaaagcagttggcccctttggtgtcatgggtggttatatgcagccccagggccatgtccaggtgattaccaacatgttggattttggccttaacccccaacaggccctggatgctccccgctggcagtggatcgagggccgaaaaatacaagtggaagcgggctttgatcctgaaatcgcacgtgtccttgcgaacaggggacacgagataagcgtttcccttcaaacatcaagcttcggcagggggcaatgtattgtccgtctggataacggcgtcctcgtgggcgctactgaagggcgcacggatgggagtattgcgtgtgtgtga

SEQ ID NO: 48454 - protein, 211 aa, Unknown
  Obtained from environmental sample
  DOMAIN (1)...(206): Gamma-glutamyltranspeptidase
  misc_feature (1)..(211): Xaa is any amino acid
MAQPEYGKKRASEIGEKACMPGPLRPPKEGTVYLATADGDGNMVSYIQSNYMGFGSGVVIRGTGIALQNRGVDFSLDPLAPNALAPGKKSYHTIIPGFLTKDGKAVGPFGVMGGYMQPQGHVQVITNMLDFGLNPQQALDAPRWQWIEGRKIQVEAGFDPEIARVLANRGHEISVSLQTSSFGRGQCIVRLDNGVLVGATEGRTDGSIACV

SEQ ID NO: 48455 - DNA, 609 bp, Unknown
  Obtained from environmental sample
  misc_feature (1)..(609): n is a, c, g, or t
atgattgtatctgtcgatgatactactccgacttttataggacttttggcgattggcaaaaaaccgcgctttcatcttggaggagcctatatccaatttttacggattgacggccctgatcacatgtcgcgaattattgatgagctggaaattgatggaagaatacttgacatgtacaatctggccgaaggaaaatttaaggcttacaacaatatagatattgatgttcttgacggcccaactcatgttatttcaccctattatcctgagaccgcgttcagacagatactatgtaatgccattttacaccgccgttacgaggaaaataacgcgcctattcatttttactggtacaatgacagaatagaaattaacagtcccggcggcccctttggggatgttacaattgacaatttcgggaagccgggtttagtttcttaccgtaaccgcaatcttgcagaggttatgaaaaacttaggtatgggtcagcgctttgggtttggaataaaatgggcaagagaaacaatggcggaaaacggtaatccgccgatagaatttcaggtgagcaacggtaatgtgtgttgtgttctaaggaagaagttaagctga

SEQ ID NO: 48456 - protein, 202 aa, Unknown
  Obtained from environmental sample
  misc_feature (1)..(202): Xaa is any amino acid
MIVSVDDTTPTFIGLLAIGKKPRFHLGGAYIQFLRIDGPDHMSRIIDELEIDGRILDMYNLAEGKFKAYNNIDIDVLDGPTHVISPYYPETAFRQILCNAILHRRYEENNAPIHFYWYNDRIEINSPGGPFGDVTIDNFGKPGLVSYRNRNLAEVMKNLGMGQRFGFGIKWARETMAENGNPPIEFQVSNGNVCCVLRKKLS

SEQ ID NO: 48457 - DNA, 1053 bp, Unknown
  Obtained from environmental sample
  misc_feature (1)..(1053): n is a, c, g, or t
atgccgtttacaaaggaacttgcgacttctctggaaaaatggagctttaattcggttttcagcgaaggcgaaccgcacatagagtatactaccgcgtcaacaggagccgcggcggctgaaagcagcggcataaaatctcttgccacacagccggattccgacaaacttgagaaagccgaaaccttttattcaaatttattatattttatcgaagatatgtttataagggctaccgtatcaaacgaactggactttaaaatcatatcggaaaagattaaagacataatcgaatatgtaaaggaagacaggcgttatctgatgagggtattaaaaaacattgaacccgcgcctgataagaattacctggccactcattcggtgcgttctacaattattgccataatcatagggacatatctaaaacttcccaaccacagattgcttgaattgggaatagctgccatagttcatgaagcgggtatgttaaaattaccttcccagctgtatcttagcaacagggctcttaatcctcaggagagaaaagcgattttgacgcatcctattcttggttatactttgttgaaatctctggattttccgcttgcggtatgtcttgccgcgcttgaacaccatgaacgcgttaacggaacaggctatcctcgccagcttgcaggagaaaaaatcagtctgtattcaaaaataatagccgtagcctgttcttacgaagcgctaagttccaagcgtccgcacaaggaagcaaaagacggttataccggaatgcttgagctgttgaagaacgagggcaaacaatacgatgacacagtagtcagggcgcttgtcctgtcgctttcaatatacccgataggcctgtatgtgctcctttctaacggaaagaagggacaggttattgacgtgaatcccgagaatccaaaattcccgattgtggaaattttcggagatgttactccggatggaagaaataaaaccgtgcaaacgtcagctaacgaactgagtattgtgcgccctcttaaccgttcggagattgaaagctaa

SEQ ID NO: 48458 - protein, 350 aa, Unknown
  Obtained from environmental sample
  DOMAIN (122)...(244): HD domain
  misc_feature (1)..(350): Xaa is any amino acid
MPFTKELATSLEKWSFNSVFSEGEPHIEYTTASTGAAAAESSGIKSLATQPDSDKLEKAETFYSNLLYFIEDMFIRATVSNELDFKIISEKIKDIIEYVKEDRRYLMRVLKNIEPAPDKNYLATHSVRSTIIAIIIGTYLKLPNHRLLELGIAAIVHEAGMLKLPSQLYLSNRALNPQERKAILTHPILGYTLLKSLDFPLAVCLAALEHHERVNGTGYPRQLAGEKISLYSKIIAVACSYEALSSKRPHKEAKDGYTGMLELLKNEGKQYDDTVVRALVLSLSIYPIGLYVLLSNGKKGQVIDVNPENPKFPIVEIFGDVTPDGRNKTVQTSANELSIVRPLNRSEIES

SEQ ID NO: 48459 - DNA, 735 bp, Unknown
  Obtained from environmental sample
  misc_feature (1)..(735): n is a, c, g, or t
ttggggtctttgatacttggggcttttttaatgaaccgtattgattacagccgcgctgtgaagaatcaggaacttgctcgtgaacttgcgcaggaaaattccgccgacgcgaagctcgctaactttttttcccgaagcaaaacggaacatcgggacattattctggaactgtaccgggatgagaaagcgcaggatcgggtgattgattttttttccggtgtctgcgcttccccggaaattgttagggtgattcttgccaacgcgaacgagttcaacattgcgccggctcttgcgtttgctctggcctgggaggaaagccgccttaacccctacgcggtgaattacaaaaaccgggacggcagtatagaccgcggtctttttcagttgaacagccgttcttttccccggctggaagtacaggcttttttaaatcccgagataaacgcgcggcacgccatgggtcatttgcgtcattgtctggatattagcggttctgaaattgccgcgctggcgatgtataacgcggggacaagccgggtaaattcttcgggtacgccgcgctcaacgctggattatatcagccggattatggaaaatcggcggggaattgaaaatctgttttatgatcaggaaagtctgttccaggaacagcttgacgctttttccggagtcgccgaaatagcgccggagcatccccgcctggtgccgctgatgccgctggcgggacttaagtaa

SEQ ID NO: 48460 - protein, 244 aa, Unknown
  Obtained from environmental sample
  DOMAIN (82)...(196): Transglycosylase SLT domain
  misc_feature (1)..(244): Xaa is any amino acid
MGSLILGAFLMNRIDYSRAVKNQELARELAQENSADAKLANFFSRSKTEHRDIILELYRDEKAQDRVIDFFSGVCASPEIVRVILANANEFNIAPALAFALAWEESRLNPYAVNYKNRDGSIDRGLFQLNSRSFPRLEVQAFLNPEINARHAMGHLRHCLDISGSEIAALAMYNAGTSRVNSSGTPRSTLDYISRIMENRRGIENLFYDQESLFQEQLDAFSGVAEIAPEHPRLVPLMPLAGLK

SEQ ID NO: 48461 - DNA, 753 bp, Unknown
  Obtained from environmental sample
  misc_feature (1)..(753): n is a, c, g, or t
ttgagggatgcctcccggcgcaatgtcgcggcacatcccgcgtgggacaaaaatgatccgcctaacgcggtcaatgcgtttcactggtatgacggttttactttgtttatcaaacagttccggccctggtttacgattaatcctaaccgggtgaaattaattttgggcagaaaaaaagtacaggcttattttaccgaatgtctggcaaaaggggtcaagtggtcccgtgaaaagatgaataacattccctgcctgttaggagaatttggccttccctttgacatgaacaaacgccgcgcctttgccgatggaaattattctttgcatgaggaagccctgtccatgtattacaacgcggtcgacgcaaacctcctccattcaacaatctggaattatacagcggacaataccaataaaaccggcgacggctggaacgatgaagacctctcgattttttcagaaggaaaagaacgcgccgccgcgggctggaaacgcccctaccccatggctaccgcgggtgtccccctttcgataaaatggaatcatcggcagggcattttccgctatcgctatacagcggacagcgccattgccgccccaacggttatttatcttccggcggagtggtttggatcgcaaacaaaatttactattccactgcgccatgaacaccggcgggaagaacagcggctcttgattttcaacgataactttggcggagaggcggaggttgtggtgaaagcgggggtgtaa

SEQ ID NO: 48462 - protein, 250 aa, Unknown
  Obtained from environmental sample
  misc_feature (1)..(250): Xaa is any amino acid
MRDASRRNVAAHPAWDKNDPPNAVNAFHWYDGFTLFIKQFRPWFTINPNRVKLILGRKKVQAYFTECLAKGVKWSREKMNNIPCLLGEFGLPFDMNKRRAFADGNYSLHEEALSMYYNAVDANLLHSTIWNYTADNTNKTGDGWNDEDLSIFSEGKERAAAGWKRPYPMATAGVPLSIKWNHRQGIFRYRYTADSAIAAPTVIYLPAEWFGSQTKFTIPLRHEHRREEQRLLIFNDNFGGEAEVVVKAGV

SEQ ID NO: 48463 - DNA, 378 bp, Unknown
  Obtained from environmental sample
  misc_feature (1)..(378): n is a, c, g, or t
atgaaaacaattccctgcatcgtctgtccaaacggatgccgccttagcgctgaaaaaaatgcagacggctctggctatgcaattagcggcaataaatgcaaacgtggtattgatttcgcgatcgcggaaattaccaaccccatgcgtacattaaccaccacgatccgtactaattttccgggcgtccccgtactaccggtgcgtactacgggggaaattcccaaaggaaaaatcagagaagcaatgaactacattaacaccattactgtcagccagcctttaggcatcggtgaaatcgtagtagaaaatatacttggtttgggcgcagatataatagttacaaacgatattttaaaaggagataacaatggcgcataa

SEQ ID NO: 48464 - protein, 125 aa, Unknown
  Obtained from environmental sample
  DOMAIN (2)...(115): Protein of unknown function (DUF1667)
  misc_feature (1)..(125): Xaa is any amino acid
MKTIPCIVCPNGCRLSAEKNADGSGYAISGNKCKRGIDFAIAEITNPMRTLTTTIRTNFPGVPVLPVRTTGEIPKGKIREAMNYINTITVSQPLGIGEIVVENILGLGADIIVTNDILKGDNNGA

SEQ ID NO: 48465 - DNA, 414 bp, Unknown
  Obtained from environmental sample
  misc_feature (1)..(414): n is a, c, g, or t
atgacggaggttccaggcgtgtttagctgcggtaacgctctgctggtaaatgacctggtggactatgtttccgaaagcggggaagaagcgggaaaaagcgcagcgcgttatgccttatctcatattgaacaacgcagactaaatattgcaagttttgagtttgataacgggtttttctgcatcagcccccaacggctcgatctggatagccttgaagaggaaacgacggtgtttttccgttccagcgaagagcgggacgacactcgcgttacatttactgtatatggcagggagcttttcaccaaacaatattccaagctaaggccgcctgagatggaaaggatcggcttgcgaatgaaagacgcggggctgcaatcaggcgatataatcaatgcagtcatggagagcgtataa

SEQ ID NO: 48466 - protein, 137 aa, Unknown
  Obtained from environmental sample
  misc_feature (1)..(137): Xaa is any amino acid
MTEVPGVFSCGNALLVNDLVDYVSESGEEAGKSAARYALSHIEQRRLNIASFEFDNGFFCISPQRLDLDSLEEETTVFFRSSEERDDTRVTFTVYGRELFTKQYSKLRPPEMERIGLRMKDAGLQSGDIINAVMESV

SEQ ID NO: 48467 - DNA, 687 bp, Unknown
  Obtained from environmental sample
  misc_feature (1)..(687): n is a, c, g, or t
ttgattgactggcgggccaccagccgtaaccgtcggctggacggtaggctcaagctcattgtcagaaattatcaggaggaacaggatcagcaagtcctctttatcattgactcgggttaccgcctgccggattttcaatttgacagcgctcttaacgccatgctgctcctttcgtatgtggcccttaaacacggcgacggcgtagccgctgcaagtttcggccctgccaaacgctggcttgggccgcgaaagggcttaagcgcctttcccctgattatgaacggcctctatgaccttacaagcagcccctatccgtcttcacctttttcagctttggaggatgcccttattcgcttgaaacggcgcacattcatcatccttatcagcaacttccgcgaagaggacggacagcccctcttcctgattctaaagcgccttgaaaagcggcaccttcttttaatggtaagtttaagagaaaaagaatccgaattccttgctttaaggcatccggtgggtggcgaagaggcgctggaaacagccgcagccttttcgtaccttgctgccagaagggaattgtacgcctcatgggaacattcaggccttttgaccctggaaacttccaccgccgccctttcagcggcgctggttaaccgttaccttctggtaaagcgttccggccggttttaa

SEQ ID NO: 48468 - protein, 228 aa, Unknown
  Obtained from environmental sample
  misc_feature (1)..(228): Xaa is any amino acid
MIDWRATSRNRRLDGRLKLIVRNYQEEQDQQVLFIIDSGYRLPDFQFDSALNAMLLLSYVALKHGDGVAAASFGPAKRWLGPRKGLSAFPLIMNGLYDLTSSPYPSSPFSALEDALIRLKRRTFIILISNFREEDGQPLFLILKRLEKRHLLLMVSLREKESEFLALRHPVGGEEALETAAAFSYLAARRELYASWEHSGLLTLETSTAALSAALVNRYLLVKRSGRF

SEQ ID NO: 48469 - DNA, 786 bp, Unknown
  Obtained from environmental sample
  misc_feature (1)..(786): n is a, c, g, or t
atgaaattaaaatttctgaaaagaataaatctattctgtggaaacattgtattattgatattaggaatatttatctcatcgtattttacaatcacttcaatctattggagaagatttgatgtttttaatttcttagtaagcctaaccggagttttatttataatcctggcttttaaaattaactctattatttataaagtcaaaaaacggccaaaactaattcaatatttcttaaaaatagtttttatttgccttatattatcatttctcatcgttcagacatttattatttataatatgcgtaatacatcgaaagccggagcggattatattattattcttggctgtcaggttgtcggcgaatatgcttcattgccgttattaagcagaggttacacggctgtcaggtatttagaaaaaaatcctgagacaaaggttattgtaaccggcgggcaaggacctagggaaaatatttcagaagcggaggctttgaaaaggttattgctggagagaaaaatagacaaagaaaggatatttatggaagataaatcaaaaaacacaatggaaaatttaaaattttccaatgaattgtataatttatcgaataaaaatataataattgtcacatctgattatcatatgttcagagcaatatctatagctaaaaaattaaaatttatgaacgtttccggattaccaagtagaagccaacggtcagttttgccggcgtttcttttacgggaatatgtaactatattgtattataaattattaaatcgaatataa

SEQ ID NO: 48470 - protein, 261 aa, Unknown
  Obtained from environmental sample
  DOMAIN (107)...(252): DUF218 domain
  misc_feature (1)..(261): Xaa is any amino acid
MKLKFLKRINLFCGNIVLLILGIFISSYFTITSIYWRRFDVFNFLVSLTGVLFIILAFKINSIIYKVKKRPKLIQYFLKIVFICLILSFLIVQTFIIYNMRNTSKAGADYIIILGCQVVGEYASLPLLSRGYTAVRYLEKNPETKVIVTGGQGPRENISEAEALKRLLLERKIDKERIFMEDKSKNTMENLKFSNELYNLSNKNIIIVTSDYHMFRAISIAKKLKFMNVSGLPSRSQRSVLPAFLLREYVTILYYKLLNRI

SEQ ID NO: 48471 - DNA, 621 bp, Unknown
  Obtained from environmental sample
  misc_feature (1)..(621): n is a, c, g, or t
atgagctttgaccggcctgatgatgatccgttttccttcattattaaaaacctggccggattttccgccacgccgaatcatcaggaacggttaatcctgaaatcggccctccggttctctttccttgcgaaaacccgccaggggctggaagatatgctgcgctgcctttttaattttcccattgagatccgtgattatatcccttcatcacgggatattccccatgaaagcagagttattctggggaggaaaaacaacaccctgggtctggatatgcagatagggagaacctatacaagcatcacgggaaaatttgagatacgcataggccccatttcctatgaggattaccatgtttttatatccggccgcaacggctgccagttccttgtcgaggctgtctccctgtatatggaccggcccttgaactattcgatgctgtttattatccgccgggataccattcctccggcgcgcctgggctttgatctggctgagggccgctgggacgctgcccggctgggttatacctgctggattggcactgctaaagaaaaatttacgatgctgagtattggcgccgtcagatttaaccggggcgcaacaaaggcaccgcgttaa

SEQ ID NO: 48472 - protein, 206 aa, Unknown
  Obtained from environmental sample
  DOMAIN (1)...(182): Protein of unknown function (DUF1305)
  misc_feature (1)..(206): Xaa is any amino acid
MSFDRPDDDPFSFIIKNLAGFSATPNHQERLILKSALRFSFLAKTRQGLEDMLRCLFNFPIEIRDYIPSSRDIPHESRVILGRKNNTLGLDMQIGRTYTSITGKFEIRIGPISYEDYHVFISGRNGCQFLVEAVSLYMDRPLNYSMLFIIRRDTIPPARLGFDLAEGRWDAARLGYTCWIGTAKEKFTMLSIGAVRFNRGATKAPR

SEQ ID NO: 48473 - DNA, 477 bp, Unknown
  Obtained from environmental sample
  misc_feature (1)..(477): n is a, c, g, or t
ttgaagccaccgtttattccaagattcgccgcgcttctgttatacgccgtatcaatgctgatcagcccggccgccctccgtacggcgtcggcggattccaacctctttcccgtcccggacgtcataaagaacaacgtggccttttggatacgcatctacacggaggtgtccctgcaagaggggcttctgcacgaccgcgactatccgcaggtggtctacgagaagatgtcgaacggcgataggaccgggaagaaactcagcgagcttatcgaccagcgccgaaagatctatatagacgccatagctcaggtaagggactccgcgccggcaaagtggggggcggaggctaagcgcgtggcggagctgtttaagctggcgccggagggagctatagccggcgcggaggagcgcatccgccaccaaggcggccagcgcgagcgcttcaggctcgggcttatgcggtcaaccatgtactag

SEQ ID NO: 48474 - protein, 158 aa, Unknown
  Obtained from environmental sample
  SIGNAL (1)...(27)
  misc_feature (1)..(158): Xaa is any amino acid
MKPPFIPRFAALLLYAVSMLISPAALRTASADSNLFPVPDVIKNNVAFWIRIYTEVSLQEGLLHDRDYPQVVYEKMSNGDRTGKKLSELIDQRRKIYIDAIAQVRDSAPAKWGAEAKRVAELFKLAPEGAIAGAEERIRHQGGQRERFRLGLMRSTMY

SEQ ID NO: 48475 - DNA, 921 bp, Unknown
  Obtained from environmental sample
  misc_feature (1)..(921): n is a, c, g, or t
atggatttatcaatcgagaaaaaactgagcattctgatagtcgacgacgagaagtcgaacatcgacgtgctcagccacatcctcaaggacaagtacaaactgtacatcgcgaagaacggcgaaggcgcgctgaagatcgcccgcgacaacctgcccaacctcatcctcttagacgtcatcatgcctgaaatggacggtttcgaggtattgtccgagctaaagaaatccgagcacaccaacaagataccggtcatcttcatcacgggccaagacagcaaggaagcggagatcaacgggctcaacaagggcgcggtggattacataactaagccgttccacagcatgatagtggaggcgcgggtaaacacgcacatgaagatcgtggagcagatgcgcataatcgagcgtatgagcataatggacgagctgaccgagctgcccaaccggcgttacttcaacgaccagctggctcgcgagtggggccgcgccatacgggagacgctgtcgataagcctcttgataatagacgtcgacaagttcaaggtgtacaacgacactttcggccatccgcagggcgacacgctgctgcacacggtggccggcgtgttcaaggagtcgctgaagcgccccgccgacttcgtggcccgttggggcggcgaggagttcataatgctgctgcccggctccgacttagagggcgcgatgaacgtggcggagagggtgcgggcgtcggtagaggccacaatcataccgtgtatcgacggaacgtccacgagcgccaccgtgagcataggcgtcaactccgaacgcccgataatacacctgccggcggcgggattcgtctctagggcggacaaggcgctgtacgaggctaaggagtcgggcaggaacagaatttgcgtatataaagagggaatgtag

SEQ ID NO: 48476 - protein, 306 aa, Unknown
  Obtained from environmental sample
  DOMAIN (9)...(122): Response regulator receiver domain
  misc_feature (1)..(306): Xaa is any amino acid
MDLSIEKKLSILIVDDEKSNIDVLSHILKDKYKLYIAKNGEGALKIARDNLPNLILLDVIMPEMDGFEVLSELKKSEHTNKIPVIFITGQDSKEAEINGLNKGAVDYITKPFHSMIVEARVNTHMKIVEQMRIIERMSIMDELTELPNRRYFNDQLAREWGRAIRETLSISLLIIDVDKFKVYNDTFGHPQGDTLLHTVAGVFKESLKRPADFVARWGGEEFIMLLPGSDLEGAMNVAERVRASVEATIIPCIDGTSTSATVSIGVNSERPIIHLPAAGFVSRADKALYEAKESGRNRICVYKEGM

SEQ ID NO: 48477 - DNA, 516 bp, Unknown
  Obtained from environmental sample
  misc_feature (1)..(516): n is a, c, g, or t
atgcgcctgatatcgaacttcctaaaggacaacaaaacaaaggacgaggagatcaagaacgccttggctgacggcgacatcaaactggcgcaccgtttggcgcacacgctcaaaggcgtagcgggcttggtagcccagcccggcttgcagagcgcctcctacgtaatagaaaacgccctaaactccggcgataccgacacagcctcaaaaggcctcggaaagctctcagaggagctgaaaaaatcattggcggagctgaccgtgatcgcagattccgcgcagaagcaggaagaggtcaaagcggaaccggcggtaacgttggacaaattcgaggctttagaactgatagacaagctccgcacactgttggaaaacggcgattccgactgcatgagcctgatagacggcttacgctccataccggaatcaaagaagctgatagagcaagtggaagactatgattttgaaccggcgttagaaacgttagaagagatcaggaagaacttagcgggctga

SEQ ID NO: 48478 - protein, 171 aa, Unknown
  Obtained from environmental sample
  DOMAIN (2)...(85): Hpt domain
  misc_feature (1)..(171): Xaa is any amino acid
MRLISNFLKDNKTKDEEIKNALADGDIKLAHRLAHTLKGVAGLVAQPGLQSASYVIENALNSGDTDTASKGLGKLSEELKKSLAELTVIADSAQKQEEVKAEPAVTLDKFEALELIDKLRTLLENGDSDCMSLIDGLRSIPESKKLIEQVEDYDFEPALETLEEIRKNLAG

SEQ ID NO: 48479 - DNA, 1251 bp, Unknown
  Obtained from environmental sample
  misc_feature (1)..(1251): n is a, c, g, or t
atgacaaacagcagagaaaagttgcttgaaaagtattccgccaaggtctataagaaccgcaaagaacatcttttgcagcttgtcgaaggcgataaaaacgctgcaattgctgccaacactcgtgccattccaggcgtgatgacggctcgcggttgttgctacgctggttgtaaaggcgtggtggtgggtccgcttaaagatgtgttggttatcactcatggacctattggctgcggcttttatagctggggcacaaggcgaaacaaagcaaaacccgatgaaaatacagataaaaactttattccatactgtttttccaccgatatgcaggaatccaatattgtgttcggtggcgagaaaaagttggaaaaagctattgaagaagctatggagctcttcagcccaaagtgcattatgatatgttccacttgccccataggtcttataggcgatgatgtgcaagcggtagcaaggcgaaccgaagccaaatacggcataaccgctataggttattcgtgcgaaggctataaaggcgtctcgcagtctggcggtcaccatatagctaacaacgggcttatgcgctatgttataggcactggcgataaaaaacccaaaacaaaattttccgtcaatatccttggcgaatataacatcggtggcgatggctgggaagaggatcgcatttttaaacgctgcggcattgaagtgcttaacctatttaccggcgatgcttcttatgaagggcttaaaagtgcgcacctcgctcatttgaatttggtgatgtgccatcgctctataaactatatagccgagatgatgaaaaccaaatacggcatagactggataaaggtgaattttattggcgttgaggcaacgtgcaaatcgcttagagacattgcaaaatatttcaacaaccccgaactcacaaaaaaggttgaagaggtaattgcagacgaagtcgcgactattaaaagcgatatggagcattacaaagccaagttgacgggcaaaactgctggtattttctccggcggttctcgttctcaccactatcaggttcttttgcaagaactcggcatgaaaaccataattgctggttatgaatttgctcatagagacgactacgaagggcgagacataattccgcaaatcaaggaagatgccgacaacaaaaacattgaaagcataactgttgcaaaagacgaaaagttctacagagaaactacaccgaagataaaatcgccgccttaa

SEQ ID NO: 48480 - protein, 416 aa, Unknown
  Obtained from environmental sample
  DOMAIN (44)...(414): Nitrogenase component 1 type Oxidoreductase
  misc_feature (1)..(416): Xaa is any amino acid
MTNSREKLLEKYSAKVYKNRKEHLLQLVEGDKNAAIAANTRAIPGVMTARGCCYAGCKGVVVGPLKDVLVITHGPIGCGFYSWGTRRNKAKPDENTDKNFIPYCFSTDMQESNIVFGGEKKLEKAIEEAMELFSPKCIMICSTCPIGLIGDDVQAVARRTEAKYGITAIGYSCEGYKGVSQSGGHHIANNGLMRYVIGTGDKKPKTKFSVNILGEYNIGGDGWEEDRIFKRCGIEVLNLFTGDASYEGLKSAHLAHLNLVMCHRSINYIAEMMKTKYGIDWIKVNFIGVEATCKSLRDIAKYFNNPELTKKVEEVIADEVATIKSDMEHYKAKLTGKTAGIFSGGSRSHHYQVLLQELGMKTIIAGYEFAHRDDYEGRDIIPQIKEDADNKNIESITVAKDEKFYRETTPKIKSPP

SEQ ID NO: 48481 - DNA, 315 bp, Unknown
  Obtained from environmental sample
  misc_feature (1)..(315): n is a, c, g, or t
atgattcccgaaatggaagcagaatctgttgttgttgatgactacaaccactttgaaacagatgagcttatcaagtctatgaaacccgatattttcttatctggcatcaaagataaatactccatacaaaaagctggcacagcctctaggcaaattcattcctacgattactcaggtccatattctggttttcgcggtgcggtgacttttggaagagatgttgcaatggctatatttaccaatgcatggcccttggtcactccgccctggaagaacaaacctatgctcacaggcaaattgaaggaggtaggataa

SEQ ID NO: 48482 - protein, 104 aa, Unknown
  Obtained from environmental sample
  misc_feature (1)..(104): Xaa is any amino acid
MIPEMEAESVVVDDYNHFETDELIKSMKPDIFLSGIKDKYSIQKAGTASRQIHSYDYSGPYSGFRGAVTFGRDVAMAIFTNAWPLVTPPWKNKPMLTGKLKEVG

SEQ ID NO: 48483 - DNA, 417 bp, Unknown
  Obtained from environmental sample
  misc_feature (1)..(417): n is a, c, g, or t
atgctagacttaactcctaaagaagtaaaagaacgcagtgctttgcgaataaatccctgcaaaacttgccaacctgttggtgcaatgtttgctgctttgggtgtggcaaaatgtatgccgcacagccacggctctcagggttgctgttcttaccacagaatggtgttgtctcgccacttcaaagaacctgctgttgcatcttcatcttcatttaccgaaggtgcctccgtattcggcggcaaagccaatatcaccacatcggtgaaaaatatctttgagatgtataatccagatatcatcgctgtgcatacaacctgcttgtcagagaccatcggagacgatttaacttcgttcatcatagacttacaaattccagaaggaaagagggtagttcattgcaatactccgagttattag

SEQ ID NO: 48484 - protein, 138 aa, Unknown
  Obtained from environmental sample
  misc_feature (1)..(138): Xaa is any amino acid
MLDLTPKEVKERSALRINPCKTCQPVGAMFAALGVAKCMPHSHGSQGCCSYHRMVLSRHFKEPAVASSSSFTEGASVFGGKANITTSVKNIFEMYNPDIIAVHTTCLSETIGDDLTSFIIDLQIPEGKRVVHCNTPSY

SEQ ID NO: 48485 - DNA, 699 bp, Unknown
  Obtained from environmental sample
  misc_feature (1)..(699): n is a, c, g, or t
gtggaagggcaaacgcctcccgcttttaaggatatgagtaatttatacggaagaatgactcagacaacacgggacacaaattatgagattaaccagcgtaattcacaggaagaaataagcccccaaattaatcgtgtaactgtttctgtaaatattgacggggtatggaaaagaaaatttgacgaaaagagaaaccccgtaattacggcggaaggaaccattgaaagggagtacgttccggttcctattgaggagcttaaaaaggtagaagacttaataaagggctctatcggatataatccggcaagaggagattccattaacgtaacaaatattccggtggatcgcacaaaagaatttatggatgaagacgccgcgtactttagaaagaaacaaatgcaaattacgataattgtttttatcgccggtttgacattaatgttatttggatttatgctgtttaggatgatctctcgcgagatggaaagacgcagaaggcttgccgaagaagagcgggcgcgtcgcgaacagatgctgcgggagagcgcaatggccgaggcggaacaggaaggagaggacgtctccatttcactggaagaacgcacaagaatgcagttgatggaaagcgctatcaatttggcgaaggagcatccggaagatgccgctcaactcatcagaacatggttattggaggaataa

SEQ ID NO: 48486 - protein, 232 aa, Unknown
  Obtained from environmental sample
  DOMAIN (1)...(114): Flagellar M-ring protein C-terminal
  misc_feature (1)..(232): Xaa is any amino acid
MEGQTPPAFKDMSNLYGRMTQTTRDTNYEINQRNSQEEISPQINRVTVSVNIDGVWKRKFDEKRNPVITAEGTIEREYVPVPIEELKKVEDLIKGSIGYNPARGDSINVTNIPVDRTKEFMDEDAAYFRKKQMQITIIVFIAGLTLMLFGFMLFRMISREMERRRRLAEEERARREQMLRESAMAEAEQEGEDVSISLEERTRMQLMESAINLAKEHPEDAAQLIRTWLLEE

SEQ ID NO: 48487 - DNA, 522 bp, Unknown
  Obtained from environmental sample
  misc_feature (1)..(522): n is a, c, g, or t
ttgcgcatgatgaaaaaagaagcgcgtataataaacctttcccgcgccgggcttgtgaaagacaaggatattattgaggcgcttgaatccggaaaaataagcgcctatgtaacggactttcccacgccggatttgtcaaactgtaaaaaagttatctgtattccgcaccttggcgcgtctacaccggaggcggaagacaactgcgcggttatggctgttaaacagataatggattatctggaatgtggagccgtccgcaattctgtaaatttttcgcgctgtaaacttgatcagcgtactccgttcagattgcttgtaataaataaaaatattcccaatatgattgggcagattactacaattcttgccggcgcgaatatcaatattctggacttaatcaaccaccatcgtgatgattatggctataacatcattgatatcgaacagcaattatcagagtctatactcgagaagattcgtaaagtaaatggaattatcagagttagaacaatcgcaaagtaa

SEQ ID NO: 48488 - protein, 173 aa, Unknown
  Obtained from environmental sample
  misc_feature (1)..(173): Xaa is any amino acid
MRMMKKEARIINLSRAGLVKDKDIIEALESGKISAYVTDFPTPDLSNCKKVICIPHLGASTPEAEDNCAVMAVKQIMDYLECGAVRNSVNFSRCKLDQRTPFRLLVINKNIPNMIGQITTILAGANINILDLINHHRDDYGYNIIDIEQQLSESILEKIRKVNGIIRVRTIAK

SEQ ID NO: 48489 - DNA, 309 bp, Unknown
  Obtained from environmental sample
  misc_feature (1)..(309): n is a, c, g, or t
atggaattatcagagttagaacaatcgcaaagtaaacattcgcagaatgcaagttcgcagaatgcaagttcgcagaatgcaagttcgcagaatgcaagttcgcagaatgcaagttcgaagaatgcaagttcgaagaatgcaagttcgaagaatgaacatccgcctgtaaaaatcgaacggcggatgaattttcgaaatgtaaagatggaggtagtagttcctctgttttttgggttaataggctctcttcttttatgcgcggttgtttccgccgataccgcgattttttctaagattacgcggcaataa

SEQ ID NO: 48490 - protein, 102 aa, Unknown
  Obtained from environmental sample
  misc_feature (1)..(102): Xaa is any amino acid
MELSELEQSQSKHSQNASSQNASSQNASSQNASSQNASSKNASSKNASSKNEHPPVKIERRMNFRNVKMEVVVPLFFGLIGSLLLCAVVSADTAIFSKITRQ

SEQ ID NO: 48491 - DNA, 552 bp, Unknown
  Obtained from environmental sample
  misc_feature (1)..(552): n is a, c, g, or t
atggaatattaccgcagaagcgagtataaaaaatgggtaattgatttttttacggacatttgttcaagcagggaaattgcgcaggcaattttgcataatgcgaatgaatttaatgtgcctgctgcgcttgcctttgcccttagctgggaagaaagcagatttaacccccgcgctgtcagcaggccgaaccgcgatggcagtgttgacagggggttgtttcagcttaacaaccgctcttttcccgatttggatacgctttctttttttaatatccagtacaacgcgcgttatggtgtcagttacctgcggtactgtctggatttcggaggcagtgaggtttccgctcttgctatgtacaatgcgggaacgggacgggttaaatctacaggcgcgccaagtgttactcttaattacataagccgaatattggagaacaagagcaaaatagaaactcgttttcacactatgttgataaaagaagaagaaaagaaatatgccgagaattccaatcagcttcagtttaacccgactttaaggatcacttctccgtaa

SEQ ID NO: 48492 - protein, 183 aa, Unknown
  Obtained from environmental sample
  DOMAIN (28)...(142): Transglycosylase SLT domain
  misc_feature (1)..(183): Xaa is any amino acid
MEYYRRSEYKKWVIDFFTDICSSREIAQAILHNANEFNVPAALAFALSWEESRFNPRAVSRPNRDGSVDRGLFQLNNRSFPDLDTLSFFNIQYNARYGVSYLRYCLDFGGSEVSALAMYNAGTGRVKSTGAPSVTLNYISRILENKSKIETRFHTMLIKEEEKKYAENSNQLQFNPTLRITSP

SEQ ID NO: 48493 - DNA, 405 bp, Unknown
  Obtained from environmental sample
  misc_feature (1)..(405): n is a, c, g, or t
ttgatggccgaggctctacaaaaaagaattatcaatgaactgctggacattcttgtcaaaacagggaaaatcaacgacagggaagccgctttggccgctgtgatggaaagggaagataaaatgtctaccggcatgaagcacggtattgctattccccacggtaaatgttcatctattcctgacttggttgcctgcataggtatttccgaaaaaccggtagatttcgattcgttggatcatgaaccatgcagaatatttatcatgaccctttcgccggtggaaaaaacgggaccgcatttgcaatttttagcggaggtttctctgctttttaaaagctccgaaaagcgcaaggaaattcttaacgccaaaactcccgaagaagtgcaaaaaatactggcagagtaa

SEQ ID NO: 48494 - protein, 134 aa, Unknown
  Obtained from environmental sample
  DOMAIN (4)...(134): Phosphoenolpyruvate-dependent sugar phosphotransferase system, EIIA 2
  misc_feature (1)..(134): Xaa is any amino acid
MMAEALQKRIINELLDILVKTGKINDREAALAAVMEREDKMSTGMKHGIAIPHGKCSSIPDLVACIGISEKPVDFDSLDHEPCRIFIMTLSPVEKTGPHLQFLAEVSLLFKSSEKRKEILNAKTPEEVQKILAE

SEQ ID NO: 48495 - DNA, 513 bp, Unknown
  Obtained from environmental sample
  misc_feature (1)..(513): n is a, c, g, or t
atgcgcatcaaagataatttaattcttgatgacgaaggcagaaccttgattctccgcggagtaaatcttggcggagattcaaaaattccctataccgcgcccggcggtgaaatttctcccgattttctagacagaaaaaaagaagtctcttttatcggaagacctttccccattgaagaagcggaaactcattttcgccgtttgaaaaaagcgggaatgacttttctgcggtttcttgttacatgggaggctgtcgaacatgagggaccgggaatttatgacgaggcgtatttagcttatctgcgaaaaatactgcagtccgctgaaaaagaggtatctgcgtttttattgatcctcatcaggatgtgtggagcaggtggacgggcggagacggcgctccggcgtggacaatggaaaagcttgggtttgacttggatctgctcgaccgctgcggcgcggcgattacaaaacagcgttacacattttaccacaataagccttacccgaagatga

SEQ ID NO: 48496 - protein, 170 aa, Unknown
  Obtained from environmental sample
  misc_feature (1)..(170): Xaa is any amino acid
MRIKDNLILDDEGRTLILRGVNLGGDSKIPYTAPGGEISPDFLDRKKEVSFIGRPFPIEEAETHFRRLKKAGMTFLRFLVTWEAVEHEGPGIYDEAYLAYLRKILQSAEKEVSAFLLILIRMCGAGGRAETALRRGQWKSLGLTWICSTAAARRLQNSVTHFTTISLTRR

SEQ ID NO: 48497 - DNA, 843 bp, Unknown
  Obtained from environmental sample
  misc_feature (1)..(843): n is a, c, g, or t
ttggaattgccctgctcgctgttgttaaggataaaaaccttatcgctcttacaaaaatgtatgctaacaggaataaaaatgagaacagcgcataaaaaatacagaaatcttcccgttgtggttcttgcaggccgtcccaatgtaggcaaatctacgctctttaaccgcctccttcataaacgcagagcaattacagacccaacgcctggtgttacgcgcgattctgtagaagcggattgttttataggcgataaacctttcaggcttgtggataccggcggcttcaaactgtctcacgaagatacggacgccttttcgtctttggataaaatggtagttgaaaaaacgttagccacaataaaaagggccgatctcataatccttctgcttgaagccggcgagataacaagtgaagatgaggagttcatcagtcttctgcgtccgtatcacggcaaacttataactacggtaaacaaaaccgaaggcggcagacatcaggctgatgcatggaacattctcacctttggttttgaaaaagtccttatgatttccgcagaacacggcgacaatatcggcgaacttgaacaggaaattattaaaaaacttgatttttccaaagttgaagaaacggatgaggagcaaaattcaatcatccgtatagctttgctcggaaagcccaacacgggcaaatccactctgtcaaaccggctcacttcaactaacgcttccattgtaagtgaaatccccggtacaacaagagacactgttgaaggcagttttagctggaaatccagaaactttatatcatggatacggcgggcatcaggcgtaaggcaaaagtaa

SEQ ID NO: 48498 - protein, 280 aa, Unknown
  Obtained from environmental sample
  DOMAIN (218)...(278): GTPase of unknown function
  misc_feature (1)..(280): Xaa is any amino acid
MELPCSLLLRIKTLSLLQKCMLTGIKMRTAHKKYRNLPVVVLAGRPNVGKSTLFNRLLHKRRAITDPTPGVTRDSVEADCFIGDKPFRLVDTGGFKLSHEDTDAFSSLDKMVVEKTLATIKRADLIILLLEAGEITSEDEEFISLLRPYHGKLITTVNKTEGGRHQADAWNILTFGFEKVLMISAEHGDNIGELEQEIIKKLDFSKVEETDEEQNSIIRIALLGKPNTGKSTLSNRLTSTNASIVSEIPGTTRDTVEGSFSWKSRNFISWIRRASGVRQK

SEQ ID NO: 48499 - DNA, 654 bp, Unknown
  Obtained from environmental sample
  misc_feature (1)..(654): n is a, c, g, or t
atggatacggcgggcatcaggcgtaaggcaaaagtaaatgaaaacatcgaatactattcagtaaaccgcgccattaaaacaatcagcgacgctgatattgtcgtattgatgatcgacgcggaagaggggctttccgatcaagacaaaaaaattgccgcgctcgcgcatgacaagggcaggggtataattatggcgcttaataaatgggacataataccacggcagaaaaatacatttaaggacgcggaagaaaaaatacattttcaattcggtcaaatggaatacgcgcccgtaatacccgtcagcgcaaaggacggaaccggcgttgataaattgttgaataccgtaataaagatgtacggacagctcaatttgcaaataggaacatcacagcttaatcaggcgcttgaaaagtggctgcaggaatatccaccacctacgggaccgcgaacctattttaagattaaatacgccgtgcaaaaatccgtaaaccccgtacacttcattttttttgtttcccgcattcaagttataagcgattcgtatatctcgtatttaaggaacaaaatacgcaaagatttgggcttttcactaattcccgtattgcttgaaattaaaagttcctcacctaaagacaggaaaaagggcaattga

SEQ ID NO: 48500 - protein, 217 aa, Unknown
  Obtained from environmental sample
  misc_feature (1)..(217): Xaa is any amino acid
MDTAGIRRKAKVNENIEYYSVNRAIKTISDADIVVLMIDAEEGLSDQDKKIAALAHDKGRGIIMALNKWDIIPRQKNTFKDAEEKIHFQFGQMEYAPVIPVSAKDGTGVDKLLNTVIKMYGQLNLQIGTSQLNQALEKWLQEYPPPTGPRTYFKIKYAVQKSVNPVHFIFFVSRIQVISDSYISYLRNKIRKDLGFSLIPVLLEIKSSSPKDRKKGN

SEQ ID NO: 48501 - DNA, 588 bp, Unknown
  Obtained from environmental sample
  misc_feature (1)..(588): n is a, c, g, or t
gtgcacggttccgagcgcggcaatattcccccgcttttcacgcaggggtgtatcgcggtctccaacccggacatcctcgacattgtcgcgacgtttaagagcggctggccgggggtacccgtcgtcgtgttcagcggggaggcggacgccaagaagcacgtggcttccgtcgatttcccaaaattgcaggcgcggcggcatgaagtagtagccgagcataacgagaggcagagcgagttcgagaacatagtgataggctggaagacggcttgggaggcgagggacatagaggcttactcatctttctacctcacctccggcttcgcggacggcccgatgaagtgggaggcgtatcgcgaccgcaaaaaggggttgttcgcctcgtactcggccatacacgtggacttgagcggtatcactctgaccgagtacacggataatgtcgcgaccgtcaagttttatcaggtgtacaacaccaataggaataaccgtatggagaacgcgaagcggttgatattcagaaaagatcaggggcagtggaaaatataccgggagataccattcccaaaagaggagcttctcttatga

SEQ ID NO: 48502 - protein, 195 aa, Unknown
  Obtained from environmental sample
  misc_feature (1)..(195): Xaa is any amino acid
MHGSERGNIPPLFTQGCIAVSNPDILDIVATFKSGWPGVPVVVFSGEADAKKHVASVDFPKLQARRHEVVAEHNERQSEFENIVIGWKTAWEARDIEAYSSFYLTSGFADGPMKWEAYRDRKKGLFASYSAIHVDLSGITLTEYTDNVATVKFYQVYNTNRNNRMENAKRLIFRKDQGQWKIYREIPFPKEELLL

SEQ ID NO: 48503 - DNA, 1506 bp, Unknown
  Obtained from environmental sample
  misc_feature (1)..(1506): n is a, c, g, or t
atgatgcgcgcggcggcgtttctgtgcgcgaacaccgttatacacgccgacatggaacgtgaaataattgacgctaacgaatttaaaagcgccatccttgacgccttgccgcttagcattaccatttttgacgagaacgcccgcataattgactgtaacgatactcttgttgaatcattaaaaacaacgaagaaatactatatcgaacattttggcgaattttcgcccaaataccagagtgacgggaacctgtccatagacaaggcaatcgagtcggtcaggcgggcgctgaacggtgaaaaactggtatttgagtgggagcattgtacctcatcgggagagccagtccactacgaagtcacgctggcgcgcgctatgtataaaggcaagtatgtggccctgggttatcaatatgacctgcatgaaagaaaaacacgggaaatagagctggcgcgcgccaaggaattaaacgagcttcagcttgccaaactgaatctggtagtgcaggggaccaaaatcggcttgtgggatatggaagtagtgaaggacgatcccgtaaacccgaacaacacctttgtatggtctgatgagttcaggcacatgctcggctacaacgacgagaatgattttcccaacatcttaagcagttggagcgacctcctgcaccccgaggacaaggaaaggacgctgaccgcgttcgcgaaccatatgctcgacaaaacaggcaagacgccatacgatgtagaataccgcctgttacgcaaaaccggcgaatacgcttattaccgcgcttccggggaatccattcgcgacagtgaaggcaacgctatacgcgtcgccggcgcgctcatggatattaccgataccaagaatatgctgctgataaaggatcggcaaagagaagaggcggaagccgctaaccgcgcgaaaagcacattcctcagcaccatgagccacgagatacgaacgccgatgaacgcgatcataggcatgacgaccataggcaagggcgcgaaggaaataaatcaaaaagattacgcgctggataaaatcggagacgcgtcttcccatttgctcggcgtaataaatgacgtgcttgatatggcaaagattgaggcgagcaaactggaacttgcgtccgttgaatatgattttgagaaagtactgcaaaaaactctgacaatcattcatttccgcgtggatgaaaagcggcaaaaattgacagctaacgtagacactaacattccgcgcttccttgtaggtgacgaccagcgtttagcgcaggtcataaccaacctgttatccaacgcggtaaaatttacgcctgaaggcggtaatatccatcttgctgcgtctttgcttaacgaaaccgacggaaaatgtgaagtgcgtatcgaagttgccgacagcgggataggtatatctcccgcccagcagaaaagattgttaacgcttttgaacaggctgaaagcggaacaagccgcacatacggcgggacaggattag

SEQ ID NO: 48504 - protein, 501 aa, Unknown
  Obtained from environmental sample
  SIGNAL (1)...(16)
  DOMAIN (33)...(145): PAS fold
  misc_feature (1)..(501): Xaa is any amino acid
MMRAAAFLCANTVIHADMEREIIDANEFKSAILDALPLSITIFDENARIIDCNDTLVESLKTTKKYYIEHFGEFSPKYQSDGNLSIDKAIESVRRALNGEKLVFEWEHCTSSGEPVHYEVTLARAMYKGKYVALGYQYDLHERKTREIELARAKELNELQLAKLNLVVQGTKIGLWDMEVVKDDPVNPNNTFVWSDEFRHMLGYNDENDFPNILSSWSDLLHPEDKERTLTAFANHMLDKTGKTPYDVEYRLLRKTGEYAYYRASGESIRDSEGNAIRVAGALMDITDTKNMLLIKDRQREEAEAANRAKSTFLSTMSHEIRTPMNAIIGMTTIGKGAKEINQKDYALDKIGDASSHLLGVINDVLDMAKIEASKLELASVEYDFEKVLQKTLTIIHFRVDEKRQKLTANVDTNIPRFLVGDDQRLAQVITNLLSNAVKFTPEGGNIHLAASLLNETDGKCEVRIEVADSGIGISPAQQKRLLTLLNRLKAEQAAHTAGQD

SEQ ID NO: 48505 - DNA, 756 bp, Unknown
  Obtained from environmental sample
  misc_feature (1)..(756): n is a, c, g, or t
ttgtttatcaaaaaccccctgttctttaaagggaacccgtcaaaactccaagcccagggattcccaccagcgaagttttacctgctcaccggcgagggaaggcatcatcagggctacggtttgggcggcgcaaagagcaaactgcgctcccatgccgcaccgtacaatccagggcaggtctggatatacgnagatccggcgaaagattaccgcaaactaagcgactttgacgttcattcgtggcggccgggactgagggagctttacgagcggacaatggccgcaagcgcagtggcggagacaattctgtcctctcacggcggcggcagcgactggagcgaagctctgtccctcgcttgtgcaacgctggatacgctggaaaactcaggcgaggaattgtgcgagcggcttttgattcactttttatggcgctgggcgggttttctcgggcttcagccgcaggttgaccgctgttcaaactgcgcaaatgaggctcccccggacaatccccttttctttaacagccgtgaaaacagcctgttatgcgcaaactgcctctctgcggcggactctgcctcagacttgataaaactcaactccggcagccgccgctggctttccctgacagggcagattgagccttctcttgtataccgttattcaatggacgaaaaatctttccgtgaggcaaaaacaatcgccgctgcggtaatgacagcggcaatcgggaagcagcttgcaagttgggactggtaa

SEQ ID NO: 48506 - protein, 251 aa, Unknown
  Obtained from environmental sample
  misc_feature (1)..(251): Xaa is any amino acid
MFIKNPLFFKGNPSKLQAQGFPPAKFYLLTGEGRHHQGYGLGGAKSKLRSHAAPYNPGQVWIYXDPAKDYRKLSDFDVHSWRPGLRELYERTMAASAVAETILSSHGGGSDWSEALSLACATLDTLENSGEELCERLLIHFLWRWAGFLGLQPQVDRCSNCANEAPPDNPLFFNSRENSLLCANCLSAADSASDLIKLNSGSRRWLSLTGQIEPSLVYRYSMDEKSFREAKTIAAAVMTAAIGKQLASWDW

SEQ ID NO: 48507 - DNA, 954 bp, Unknown
  Obtained from environmental sample
  misc_feature (1)..(954): n is a, c, g, or t
ttggcatggcttttaccgtttgtggaaaacccagaagaaatgataactctgcagctggcaaaggaattcggcatcgctcctgaaaaactggttatagaaattacggaagaagatttttattcaagcggggaatatacccgcgccatagtccactataaaaaagcaggctgccgcatcgcgcttgacgattacggaaaggaagcaagcaatattgacaggttggcaaaacttcagcccgacattataaaaatcaatattgattatatccataacagtgaaacgtcttatcattatcgcgagtatttacgcgccattgccgtcttcgccgattctgtaggtattgaagttctgcatgagggagtagagactgaacgtcagcttgatatttgcatttcttcaaagggaaggttctttcagggatttttacttgccgtccctcaggcatctatgcgcgatacgaatactaacacgtttgttttttccactctgctcgaaagctcttattcggcaatacaaaccagggtaaccgatggggagtccctaaaaaattcttttgatattcatgttgaacggtttttccttgaaaacccgtttgaacgcgaaaaaataaacaacgatgaatatcttatgaatcttttttttaaattgcctgangtaatacggatttatctgtgtaacagaaaaggcatccagctttccaataatattgagcgtgaatcggataatatcgtatgccgcgattataaaaataaaatttgggcatggcgcggattttttcatgaaaccatgaaggcctttatccgaggcagaaaaagttgtttgtcaaacccgtaccgtgattttacgacaaaagaaaaaatatgcacctactgttacgcgataaccgatgatatattcttatttgcggatatgataaaaaattcggaggagacaaaagataatgccgttagatag

SEQ ID NO: 48508 - protein, 317 aa, Unknown
  Obtained from environmental sample
  DOMAIN (1)...(146): EAL domain
  misc_feature (1)..(317): Xaa is any amino acid
MAWLLPFVENPEEMITLQLAKEFGIAPEKLVIEITEEDFYSSGEYTRAIVHYKKAGCRIALDDYGKEASNIDRLAKLQPDIIKINIDYIHNSETSYHYREYLRAIAVFADSVGIEVLHEGVETERQLDICISSKGRFFQGFLLAVPQASMRDTNTNTFVFSTLLESSYSAIQTRVTDGESLKNSFDIHVERFFLENPFEREKINNDEYLMNLFFKLPXVIRIYLCNRKGIQLSNNIERESDNIVCRDYKNKIWAWRGFFHETMKAFIRGRKSCLSNPYRDFTTKEKICTYCYAITDDIFLFADMIKNSEETKDNAVR

SEQ ID NO: 48509 - DNA, 1500 bp, Unknown
  Obtained from environmental sample
  misc_feature (1)..(1500): n is a, c, g, or t
atgctgttaagatttaccgcgggcgcgggatatgaagattcggacatggacggaatattggaaaacaaaattcacaataaatattttactgatgatttcccttcagctattaaatttttcttgacatcaaaaggtatggatccggataaatatcaatattacggcgaaatgcacatggttcaaacagatacaaaatacaatatacagggacgcattgattatgactggaaattatcaaataactttcttgccgccgttggagcgcaggaattattttctgtttcagaatcaaaaggcgatcagaaatcatcccgtgtcactcaattcgataaaattacagatgaaaatataaaaaataatattataaatttctttggtcgttacccgggaaatatacttgttgaagtgccaatggctgaaaagcctaattcgcaaaacaaacttatgacgacttccggttacctgcttagtgaattcaatacggatgggaatcgtttcggcgcggaattaggcgtccgcatggatcattttattttattgggagaaggttttacattacaaagcgatcctgtatttaatccgcggttaaatcttgattttaatattttacgcaacaaggggatattcaactcaattgacatatccgccggaaccggattgttttcatctatggatgataccgtctttgacgctgagaaaaaatataatattggtcaaattaaaccaaaccgaagctggacatccattttaggcgtcaaatttgaattccccgaatcattaatattaaatgttgaaggttattacaaaaaagtttttgacagaatgtatgttttaatagattcgggaaatgatacggttaaagttgatccttattttgacggcgaaggaataatatggggcatagacgctatgctgcaaaaaatacaaaaccgtttttgggacggctggctttcttactcatataactgggcaaagtaccgcgagccgaacggtaaaatgggcggaatggcaagatcgggcggaaataacggcgacgactggtattttccgtcataccacaggtttcataatcttaatttggtattaaatgttaaacctacgcaaaaaatgaatgtttatacgcgtcttggaatagcgtccggcggactttttccaaaaagagatgaggacggacctaaaagcgctcctgtgttggtttataacggaggaaatagttattttatagaagaattcttttggaattctgtttatgatgaaaataaccgcactaccgcgtcgctggctttagatataaaaatttcattctttggaggaaataaaacgggaaagacaagatatgaattttattttgctatagaaaatgttttaggattattgtatactcctcaagggaataaaaattttaacaactatacaggcgaaattgatgaaggcggtttttcagcaagttatgatatacctattccaataccgtcatttgggtttaaaatcagttattaa

SEQ ID NO: 48510 - protein, 499 aa, Unknown
  Obtained from environmental sample
  misc_feature (1)..(499): Xaa is any amino acid
MLLRFTAGAGYEDSDMDGILENKIHNKYFTDDFPSAIKFFLTSKGMDPDKYQYYGEMHMVQTDTKYNIQGRIDYDWKLSNNFLAAVGAQELFSVSESKGDQKSSRVTQFDKITDENIKNNIINFFGRYPGNILVEVPMAEKPNSQNKLMTTSGYLLSEFNTDGNRFGAELGVRMDHFILLGEGFTLQSDPVFNPRLNLDFNILRNKGIFNSIDISAGTGLFSSMDDTVFDAEKKYNIGQIKPNRSWTSILGVKFEFPESLILNVEGYYKKVFDRMYVLIDSGNDTVKVDPYFDGEGIIWGIDAMLQKIQNRFWDGWLSYSYNWAKYREPNGKMGGMARSGGNNGDDWYFPSYHRFHNLNLVLNVKPTQKMNVYTRLGIASGGLFPKRDEDGPKSAPVLVYNGGNSYFIEEFFWNSVYDENNRTTASLALDIKISFFGGNKTGKTRYEFYFAIENVLGLLYTPQGNKNFNNYTGEIDEGGFSASYDIPIPIPSFGFKISY

SEQ ID NO: 48511 - DNA, 630 bp, Unknown
  Obtained from environmental sample
  misc_feature (1)..(630): n is a, c, g, or t
atgggctatgccttgcttccccttctcatatatacccaagggttcagacgggggaagtgtaccggcatcagttttatcgactccactcctgtgaaagtctgcaatgtaaggcgcatctatagccataaggtgttcaaagcctatgcggcgcggggaaaaagctctaccggatggttttatggctttaaattacacctggttatcaacgatatgggagagatatgctctttttgtcttagtccaggcaacattgatgaccgcaatattgacgtcattggccgactttgccgggaattgagcggaaaagtctttggggatcggggatatatttcacaagaactgttcgaacgcctgtatcagcagggcatccaattaatcacgaaactacggaagaacatgaagaataagctgatggatatgaaggacaagatactgttacggaaacgtgcggtgatagagtcggtcaatgattttctaaaaaacatctgccaagtggaacacagccgtcatcggagcattaacaattttctagtcaatgtattggcggctctatcggcatatagctttctgccgcataagccgtctattcacggtctatgtgatgaaaaggctttgcctatacttgtttaa

SEQ ID NO: 48512 - protein, 209 aa, Unknown
  Obtained from environmental sample
  DOMAIN (23)...(189): Transposase DDE domain
  misc_feature (1)..(209): Xaa is any amino acid
MGYALLPLLIYTQGFRRGKCTGISFIDSTPVKVCNVRRIYSHKVFKAYAARGKSSTGWFYGFKLHLVINDMGEICSFCLSPGNIDDRNIDVIGRLCRELSGKVFGDRGYISQELFERLYQQGIQLITKLRKNMKNKLMDMKDKILLRKRAVIESVNDFLKNICQVEHSRHRSINNFLVNVLAALSAYSFLPHKPSIHGLCDEKALPILV

SEQ ID NO: 48513 - DNA, 303 bp, Unknown
  Obtained from environmental sample
  misc_feature (1)..(303): n is a, c, g, or t
atgacttataaaattgaagggaaatctctgaatgctattggcagttcttttgatgattttcttgttgaagaaggtatttccgaagaagtagaggctggagccataaaaaaaataattgcctatcaattactggaagctatcgaaaaagaacacctttcaagaaccgctttggcgactaggcttgaaacctctcgtgccgcggtaaacagattgcttgatcctgataatgagtcaatcactctattaacccttaaaaaagcggctaatgtattagggaaaaaactaaggcttgaattagtatag

SEQ ID NO: 48514 - protein, 100 aa, Unknown
  Obtained from environmental sample
  misc_feature (1)..(100): Xaa is any amino acid
MTYKIEGKSLNAIGSSFDDFLVEEGISEEVEAGAIKKIIAYQLLEAIEKEHLSRTALATRLETSRAAVNRLLDPDNESITLLTLKKAANVLGKKLRLELV

SEQ ID NO: 48515 - DNA, 1620 bp, Unknown
  Obtained from environmental sample
  misc_feature (1)..(1620): n is a, c, g, or t
atgcagcagttaaccgcctatccggaaaaactggcgcttgtaaataacggaagatcgctattagtccagaaccgtttcggcgtgtcgaggattcccgtaaccggcggcatcccttcgccgctatcgggctttccctctttcgcgtcgggaaatgtgccgcttaaaggcagggcgcatgaatacgcggtttcgaacgacggaaaatggcttctttatattgaacctgtaagccccgccttcggaaatctttacattgtagaagttgaaagcggcgcgagactgcttgtaagcgaaaaaattgaactgcccaatacggggtttcccgcctgctggaatcccgattcaaggctttttgtctacgcgaaaggcggaaaacttttttactttcctatgcttgcggaccttacggttatagcggacgagcgtttcagacacatagggcccggcgaaattaactccgttacatgggggcatcagggggatttttattattttacgggcaataccctgtaccgcgttttaagccccgaactttttacaagaacgatttacggcgattttctttctataggaaccgttatcgccgttctgccttttgactttgaaccgggctttgacaaatactggctggccccgaattcaagttccgttttaataaataaaaaagggaaaagcctttttctctttttgttaggtgaaaaccaatacaacaattcagcgcttccccacattatgcttcctcagggagaaggaaccctcaacgtgctttggccttcttccggccctcttacgatagtgtcttcgcttaaaaaagaacttacggtctggcgttttgaaattacgggaaaaaccgttaggactttaactccctcaagcgtcccgctttcttcaaacggcgcgctttctccggacgggacaaaggcggttttctggggggataaaggtttagagctttgggattattcgagctggcggctggttcaaaaaataagcgagaataagactctttcctgcgtgtggctgaacaacagggaatttattaccggaaacacaaggtttattgaggcggttaataccggcagcgcggagtttgcgcgcagaaggatctgcctttcgggcgcggatgaattcggctttgaggagaacgggcgcaatcagcgtatattcgccagaaccggaagcgaatggttcgcgaacacgggaaggggcgcgtgggcgcccgcgtcggagcctgtaatgcgcaatgtctcgctttcatccgaccgcttccgtatttttctggaaccccaggtatcggggccgtttacaaatatccctatgatacgcaataccctttcagtcggcacaacgtcgcttgtgtcggggcattccgccaacggcgcctacaaacaggggcgcaatatacgcgtcgcgctctgctttgacctttacgacgatgaaacagggctgtcacaagtgcttaactcccttcgctgttttaacataaaagccactttctttttaaacggcgattttatccgcaggtgcccgaacgcggcggcggcgataatcgcggcgggccacgaaacggcttccctcttttacgcccctaatgatctttcggacgcgcgttaccggtaa

SEQ ID NO: 48516 - protein, 539 aa, Unknown
  Obtained from environmental sample
  misc_feature (1)..(539): Xaa is any amino acid
MQQLTAYPEKLALVNNGRSLLVQNRFGVSRIPVTGGIPSPLSGFPSFASGNVPLKGRAHEYAVSNDGKWLLYIEPVSPAFGNLYIVEVESGARLLVSEKIELPNTGFPACWNPDSRLFVYAKGGKLFYFPMLADLTVIADERFRHIGPGEINSVTWGHQGDFYYFTGNTLYRVLSPELFTRTIYGDFLSIGTVIAVLPFDFEPGFDKYWLAPNSSSVLINKKGKSLFLFLLGENQYNNSALPHIMLPQGEGTLNVLWPSSGPLTIVSSLKKELTVWRFEITGKTVRTLTPSSVPLSSNGALSPDGTKAVFWGDKGLELWDYSSWRLVQKISENKTLSCVWLNNREFITGNTRFIEAVNTGSAEFARRRICLSGADEFGFEENGRNQRIFARTGSEWFANTGRGAWAPASEPVMRNVSLSSDRFRIFLEPQVSGPFTNIPMIRNTLSVGTTSLVSGHSANGAYKQGRNIRVALCFDLYDDETGLSQVLNSLRCFNIKATFFLNGDFIRRCPNAAAAIIAAGHETASLFYAPNDLSDARYR

SEQ ID NO: 48517 - DNA, 474 bp, Unknown
  Obtained from environmental sample
  misc_feature (1)..(474): n is a, c, g, or t
atgcgcaaagggataatattagccggcggttccggaacgcgcctttatcctacgactatcgccgtctccaaacagctcatgccagtctacgacaaaccgatggtctactacccgctctccacgcttatgctggccggaataacggatatattggtgatcactacgccggaagacggcgccgcttttcggaggcttcttggtgacgggtcgcagtggggcattaaactctcctacgcggcgcagccgcgtcccgaaggcttggcgcaagcgttcatcataggcgaggagtttgtcgggggaggcccggcggccctgattctcggcgacaatatcttctggggccacggcttggtagaacgcctgcaattggccatcaatcgccccgattccgccacgatcttcgcctatcgggtaaacgacccgcaacgctacggaatagtagaggttgacaaggctggaaacgccgtatcataa

SEQ ID NO: 48518 - protein, 157 aa, Unknown
  Obtained from environmental sample
  DOMAIN (3)...(157): Nucleotidyl transferase
  misc_feature (1)..(157): Xaa is any amino acid
MRKGIILAGGSGTRLYPTTIAVSKQLMPVYDKPMVYYPLSTLMLAGITDILVITTPEDGAAFRRLLGDGSQWGIKLSYAAQPRPEGLAQAFIIGEEFVGGGPAALILGDNIFWGHGLVERLQLAINRPDSATIFAYRVNDPQRYGIVEVDKAGNAVS

SEQ ID NO: 48519 - DNA, 684 bp, Unknown
  Obtained from environmental sample
  misc_feature (1)..(684): n is a, c, g, or t
ttgattttaaggattttgattttaaagaatttgattttaaggatagaaccatctcaaatgacaaaaggcaaattttacacattcgaaggtatagacggttgcggcaagagcactcagttagcccgtgtggccgaacgtttgcgtgaaaacaatacgccgtgtcttgtcacccgtgaacccggcgggacggttatcagcgagaaaatcagggagttgttaatatcaccggataataaagcgatgtgtcctgagacggaactgctgctttatttggccgctcgcgcccagcatgtaagagaaattataataccggctattgacaggggggaaacggttctttgcgatagatttgaacaggctacgtttgcttatcagggtggcggcagggggcttgacgttgaagtgatccgccgtatcaatagttttgctacgggcgggatagtgccggacatgacgtttattatagacatttccgtggagatttcccaagagcgtttgaataagataggtaagggcaaagaccggatggaaagcgccggatcgcaatttttcgagcgtgttcgggccggatacatgagcgccgcgtcagccgatccgcaaagaataaagctgctcgacgggactaagggagtggatgagttgacagatgagatattgggggtaataacatgcgcaaagggataa

SEQ ID NO: 48520 - protein, 227 aa, Unknown
  Obtained from environmental sample
  DOMAIN (28)...(218): Thymidylate kinase
  misc_feature (1)..(227): Xaa is any amino acid
MILRILILKNLILRIEPSQMTKGKFYTFEGIDGCGKSTQLARVAERLRENNTPCLVTREPGGTVISEKIRELLISPDNKAMCPETELLLYLAARAQHVREIIIPAIDRGETVLCDRFEQATFAYQGGGRGLDVEVIRRINSFATGGIVPDMTFIIDISVEISQERLNKIGKGKDRMESAGSQFFERVRAGYMSAASADPQRIKLLDGTKGVDELTDEILGVITCAKG

SEQ ID NO: 48521 - DNA, 966 bp, Unknown
  Obtained from environmental sample
  misc_feature (1)..(966): n is a, c, g, or t
atggtacggtgcgttaggcccaaactcaataaaacgatagctgatccatgctgcgggagcggagggtttctactagcagttaagtcatttttagaaaaaaattacacgatgaacgccgatgaaaaaaggtttctaaaattcaaaatgttcaaaggatgggagattgtcccaagtacctaccgcctatgcctgatgaaccttttcctgcacaacataagcgactttgacggaacgccgccaatcacccgcgccgattcccttgtagccgatcccggcgatagattcgactacattttgacaaatccgccattcggtaaaaaatcatctataacgttcaccaatgaacaaggtgaacaagaacaagacgatttggtctataaccgtcaagatttttgggcgaccacatccaacaaacaattgaattttgtccagcatatccatactctcttaaagacagacggtactgcggcgattgtcgtaccggacaacgtactatttgaaggcggtgctggtgaaatcgtccgcagaaaactacttcaaacaaccgatttacacacgattctacgactacccaccggcatattctatgcacagggcgtaaaagccaatgtgatattcttcgataatcgcgccgcctcgccaaaacaccaaacaaaagaggtttggatttatgactatcgtacaaatatcaagcatactttgaaaaagaatccgctccgcgaaaccgaccttgacgattttgtaaagtgctataaccctgaaaaacgccatctccgcaaagcaacatacagtgataaaaacccagaaggccgttggcgcaagttcacctacgatgagattatcgcacgagacaaaacaagccttgacatcacatggctcaaatcgggcgataacaccgacgatcaaacgcttgctgaactactcggcctcataaagagaaatcggcggctatcgttacagcggtaa

SEQ ID NO: 48522 - protein, 321 aa, Unknown
  Obtained from environmental sample
  DOMAIN (1)...(290): N-6 DNA Methylase
  misc_feature (1)..(321): Xaa is any amino acid
MVRCVRPKLNKTIADPCCGSGGFLLAVKSFLEKNYTMNADEKRFLKFKMFKGWEIVPSTYRLCLMNLFLHNISDFDGTPPITRADSLVADPGDRFDYILTNPPFGKKSSITFTNEQGEQEQDDLVYNRQDFWATTSNKQLNFVQHIHTLLKTDGTAAIVVPDNVLFEGGAGEIVRRKLLQTTDLHTILRLPTGIFYAQGVKANVIFFDNRAASPKHQTKEVWIYDYRTNIKHTLKKNPLRETDLDDFVKCYNPEKRHLRKATYSDKNPEGRWRKFTYDEIIARDKTSLDITWLKSGDNTDDQTLAELLGLIKRNRRLSLQR

SEQ ID NO: 48523 - DNA, 798 bp, Unknown
  Obtained from environmental sample
  misc_feature (1)..(798): n is a, c, g, or t
gtgatcaacgcggatgacccaagcgcggaattttttgaaaacgcgacacagcgggaaaccttgagtttcagcgtaaaaggaaaagacgccgatcttatggtaaaaagcatagaaagcggcgccatggggaacagttacaaagtatatataaggaaagaaagaacaaacatcgacatacgcgacaatcttcccggcgcgttcaacacggggaacgtgctggcctcgcttttggttgtttccggcctgacaaagatcccggtaagggaattgaccccgctctgccccaaactgctgcccgtgcgcggacgcatgaccgccgtcgacaaaggccaaaacttcgaagtactggtggactacgcccacacgccatcctcttttcagactatattcccccctttgagagcgcggcttgacagttccggcagcccacggcgaaggataatcaccctctttggttccgccggagagagggacacgcaaaaacgcgccgagcagggaaaaatcgccgccagatattcggacataataatattaaccgatgaagatcctcgaggcgaagttcccattgacatactcaatgaaatcgcccgcggtgtatatgctgaaaaatcggcgctgttcaaacaaaatgaaaatgttttttttattcccgaccgccctgcggcgatacggaaagccttttcccttgcccgcgaaggcgacctcgtgcttctgctgggcaaaggccacgaaaatacgataatatacaaagatcacgtaatgccgtatgatgagattggagaagcggagaagcgctag

SEQ ID NO: 48524 - protein, 265 aa, Unknown
  Obtained from environmental sample
  DOMAIN (100)...(192): Mur ligase family, glutamate ligase domain
  misc_feature (1)..(265): Xaa is any amino acid
MINADDPSAEFFENATQRETLSFSVKGKDADLMVKSIESGAMGNSYKVYIRKERTNIDIRDNLPGAFNTGNVLASLLVVSGLTKIPVRELTPLCPKLLPVRGRMTAVDKGQNFEVLVDYAHTPSSFQTIFPPLRARLDSSGSPRRRIITLFGSAGERDTQKRAEQGKIAARYSDIIILTDEDPRGEVPIDILNEIARGVYAEKSALFKQNENVFFIPDRPAAIRKAFSLAREGDLVLLLGKGHENTIIYKDHVMPYDEIGEAEKR

SEQ ID NO: 48525 - DNA, 1002 bp, Unknown
  Obtained from environmental sample
  misc_feature (1)..(1002): n is a, c, g, or t
ttgtgctatacttcctccatgccaaaaaatcccctgtatttgattgacgcctacggtcttatctaccgatcctattttgcctttatgtcttttccgctgaagaacaacgcggggaaaaatgtttccgcccttttcggatttgcccgcacgttgataagcctgttgaatgacggggcgcccgtatttagggaaaacggcaaaccggacaaaatcacgccaaaactgcttgcggctgtttttgattcccgcacccccacgttccgccataagatgtacagcgagtacaaggccacacggcagaaggcgccggacgatttgcacgcgcaaattccgttagtagatgaatttcttgccgcgctgaatataccaagcctgagggcggacggttttgaagccgatgatattatcgcaaccctggcgagaaaatgccaggaagagaaaaggcagtgctacattctttcctcggacaaggatctgctgcagctggtagggaacggaacctttgaactgcgtccggcaaaagtcccaaaaaacgccgcccctgccggaggcgctcctaacggaggcgctcctaacggaggcgctcctaacggagcggcgcagaatacgggcccggcctgggaaataataggaccggctgaagtaaaagccgaatggggcgtcccgcccgaaaagatactcgaccttctttcgcttatcggggattcttcggacaatgttcccggcgtcaggggcataggcgaaaaaacggcagtggaatatataaaacgctacggatcgcttgacgggatctatcaaaacatcgccggtcttgggggagtcagaggcaaaaagatcgccgaaggaaagaaggacgcttatttttcacagtcattgataaggctggaaaccaatgtgccattgcccataacggatatagacaaactgtcggcagaaaacctaacagaaaggcctcggcgcggtactgtctcggccgactctgtacttgccnnnnnnnaatag

SEQ ID NO: 48526 - protein, 333 aa, Unknown
  Obtained from environmental sample
  DOMAIN (221)...(316): 5'-3' exonuclease, C-terminal SAM fold
  misc_feature (1)..(333): Xaa is any amino acid
MCYTSSMPKNPLYLIDAYGLIYRSYFAFMSFPLKNNAGKNVSALFGFARTLISLLNDGAPVFRENGKPDKITPKLLAAVFDSRTPTFRHKMYSEYKATRQKAPDDLHAQIPLVDEFLAALNIPSLRADGFEADDIIATLARKCQEEKRQCYILSSDKDLLQLVGNGTFELRPAKVPKNAAPAGGAPNGGAPNGGAPNGAAQNTGPAWEIIGPAEVKAEWGVPPEKILDLLSLIGDSSDNVPGVRGIGEKTAVEYIKRYGSLDGIYQNIAGLGGVRGKKIAEGKKDAYFSQSLIRLETNVPLPITDIDKLSAENLTERPRRGTVSADSVLAXXX

SEQ ID NO: 48527 - DNA, 765 bp, Unknown
  Obtained from environmental sample
  misc_feature (1)..(765): n is a, c, g, or t
atggcgtatcaattcatgaaagcgaatcagaaccggtacgccgttaaggagatggccatgctttttggggtaagccgcagcgcctattacagatgggccaggaacggggcctcgcaacggcgtaaggcaaacgatgcggagcttgtacgccttattcttgaaatagcggcaaagcaccgccgccggtatggcagcccgcgggtacgccgggaacttcgcgatgcctacggaaagcgcgtcagccttaagaaagtggcccgcctgatgcgggaaaacggccttaacgcacgaaaaagcaggaagcatgtcccgacgacagactccagccacgcctttgcagtctttgaaaacatactgtccagggagttttatgccgaatccggcggcgcaaagtgggtttcggacattacctatctgcgcacggtaaacggctgggtgtatctgaccgtagtgcttgacctgtacgacagaaaagcaataggctgggcgcttagccttggcatggaggcttccgagaccagcattgccgctttggaaatggcagtcaaaaaccggagcccccaagtcggccttatattccattcggacaggggagtacagtattgcgcccaatccttccgcgacattttgcgggaaagctgtccgggtgcccgtccagagcatgagccggaaagggaactgctgggacaacgcctgcgcggagagttttttcaaaacgctgaagagcgaactggaaacattagacggcaggcattccgaggctga

SEQ ID NO: 48528 - protein, 254 aa, Unknown
  Obtained from environmental sample
  DOMAIN (124)...(253): Integrase core domain
  misc_feature (1)..(254): Xaa is any amino acid
MAYQFMKANQNRYAVKEMAMLFGVSRSAYYRWARNGASQRRKANDAELVRLILEIAAKHRRRYGSPRVRRELRDAYGKRVSLKKVARLMRENGLNARKSRKHVPTTDSSHAFAVFENILSREFYAESGGAKWVSDITYLRTVNGWVYLTVVLDLYDRKAIGWALSLGMEASETSIAALEMAVKNRSPQVGLIFHSDRGVQYCAQSFRDILRESCPGARPEHEPERELLGQRLRGEFFQNAEERTGNIRRQAFRG

SEQ ID NO: 48529 - DNA, 381 bp, Unknown
  Obtained from environmental sample
  misc_feature (1)..(381): n is a, c, g, or t
ttggcatggaggcttccgagaccagcattgccgctttggaaatggcagtcaaaaaccggagcccccaagtcggccttatattccattcggacaggggagtacagtattgcgcccaatccttccgcgacattttgcgggaaagctgtccgggtgcccgtccagagcatgagccggaaagggaactgctgggacaacgcctgcgcggagagttttttcaaaacgctgaagagcgaactggaaacattagacggcaggcattccgaggctgaagtcaggcaatcggtgtttttctacattgaggcgtattacaatcgcatccgcatgcattcggcgcttgactatgtagcgcctaacgtgtttaacttaggtaaccccgcttaa

SEQ ID NO: 48530 - protein, 126 aa, Unknown
  Obtained from environmental sample
  misc_feature (1)..(126): Xaa is any amino acid
MAWRLPRPALPLWKWQSKTGAPKSALYSIRTGEYSIAPNPSATFCGKAVRVPVQSMSRKGNCWDNACAESFFKTLKSELETLDGRHSEAEVRQSVFFYIEAYYNRIRMHSALDYVAPNVFNLGNPA

SEQ ID NO: 48531 - DNA, 429 bp, Unknown
  Obtained from environmental sample
  misc_feature (1)..(429): n is a, c, g, or t
atgccgtttaaaggagtcgatgcaatggacgtaaagaaggagtttgtattaaagtcgctggacgacagggtagtattcacagagctatgccgtgaatatggaattggaactaagtgcgggtacaaatggcgtcggaggtttcttgaagaggggtacgcaggccttgaggagcattcaaggaaaccgctggccaacagccgcagcataccggaaccggtaagcgtggaaatattgcggataaagaaattgcatcccgcatggggggcaaagaaaatccttgaaatatacaaacgcaaccacacaggaaagtacgctcccgtgaggggaagcgtggaaaacctttttgtccgcgccggatacaccggggtaaggcggcgcaggaacctgcgcggcggagggataatacaaaactggactttaccccaatag

SEQ ID NO: 48532 - protein, 142 aa, Unknown
  Obtained from environmental sample
  misc_feature (1)..(142): Xaa is any amino acid
MPFKGVDAMDVKKEFVLKSLDDRVVFTELCREYGIGTKCGYKWRRRFLEEGYAGLEEHSRKPLANSRSIPEPVSVEILRIKKLHPAWGAKKILEIYKRNHTGKYAPVRGSVENLFVRAGYTGVRRRRNLRGGGIIQNWTLPQ

SEQ ID NO: 48533 - DNA, 738 bp, Unknown
  Obtained from environmental sample
  misc_feature (1)..(738): n is a, c, g, or t
atgggacctattcttctcgcacgtattcttgatctgaatgatacgcagagtggcattttacaggtaatattcaaaattgccgacgacaacaaactactgttgatcgatttaaaggatatgcgggcaatggtgcagtatgtgtgcgacaactcgaaggaattgtcggctgcatacggcaatatctcatcgcaaagcgcgggtaccattcaacgaaatcttttgactctggcctcaagcggaggagatattttcttcggcgaaccggcacttgatatgcgcgattggctcggctgggatgaatccggacgcggctttataaatattctggattgcgtgaaactttttcagagcccgcagctctattcgacttttctcctgtggatgctttccggactctacgagatgatgccggaagtcggcgatcttgaaaaacccaggatggtattcttttttgacgaggcgcatattttgtttaacgacgcgccgaaggccctgctgcagaaaattgaacaagttgtgcgccttatacgttccaaaggagtgggtatctactttattacacagtccccggccgatattccggacaccgttttatcgcagttgggcaataaaatccagcatgcgctgcgggcatacacgccaaaggaccaaaaggcggtcaaagcagccgcggcctcattccggcctcacccggatttttcaagcgaaacaggttttgggcgagctttccaccggtga

SEQ ID NO: 48534 - protein, 245 aa, Unknown
  Obtained from environmental sample
  DOMAIN (1)...(245): Bacterial protein of unknown function (DUF853)
  misc_feature (1)..(245): Xaa is any amino acid
MGPILLARILDLNDTQSGILQVIFKIADDNKLLLIDLKDMRAMVQYVCDNSKELSAAYGNISSQSAGTIQRNLLTLASSGGDIFFGEPALDMRDWLGWDESGRGFINILDCVKLFQSPQLYSTFLLWMLSGLYEMMPEVGDLEKPRMVFFFDEAHILFNDAPKALLQKIEQVVRLIRSKGVGIYFITQSPADIPDTVLSQLGNKIQHALRAYTPKDQKAVKAAAASFRPHPDFSSETGFGRAFHR

SEQ ID NO: 48535 - DNA, 711 bp, Unknown
  Obtained from environmental sample
  misc_feature (1)..(711): n is a, c, g, or t
ttgaaaaacccaggatggtattcttttttgacgaggcgcatattttgtttaacgacgcgccgaaggccctgctgcagaaaattgaacaagttgtgcgccttatacgttccaaaggagtgggtatctactttattacacagtccccggccgatattccggacaccgttttatcgcagttgggcaataaaatccagcatgcgctgcgggcatacacgccaaaggaccaaaaggcggtcaaagcagccgcggcctcattccggcctcacccggatttttcaagcgaaacaggttttgggcgagctttccaccggtgaagcgctcatatccgtacttgacgaaaagggcgcgccgcagatcgtacagcgcgcgtttatgctgccgccaaagagttttatcggccccgccgaaccggatcgcataagcggcttcatcaaaagctgtgcgctgtacccaaaatacaaagatgcgattgaccgtgaatccgcgtatgaagtattgcaggaacaaaaaaagcagacggacgcgcagaagcagaaaccagccgccgcccaacaaactgcggcccagcaaacccggccggccaacgcgccgaacgcaaaaaaaacaagcagtccggcaaaacaggttatctcaagcgcgatgacgcaggtcggcagagaagccggaagagccctggtgcgcggcttgcttggaaacataaagaagtggtaa

SEQ ID NO: 48536 - protein, 236 aa, Unknown
  Obtained from environmental sample
  DOMAIN (16)...(235): Bacterial protein of unknown function (DUF853)
  misc_feature (1)..(236): Xaa is any amino acid
MKNPGWYSFLTRRIFCLTTRRRPCCRKLNKLCALYVPKEWVSTLLHSPRPIFRTPFYRSWAIKSSMRCGHTRQRTKRRSKQPRPHSGLTRIFQAKQVLGELSTGEALISVLDEKGAPQIVQRAFMLPPKSFIGPAEPDRISGFIKSCALYPKYKDAIDRESAYEVLQEQKKQTDAQKQKPAAAQQTAAQQTRPANAPNAKKTSSPAKQVISSAMTQVGREAGRALVRGLLGNIKKW

SEQ ID NO: 48537 - DNA, 1203 bp, Unknown
  Obtained from environmental sample
  misc_feature (1)..(1203): n is a, c, g, or t
ttgggcaaacgatttaagcattatgtggaaatcaactttgataacgacgcggacgcggcaaatttttttaaggataatcttgaaccggatgagttgtgcaggcgcctttccgtatatgtccgcgccccaataacgccgggggaaacgctcctgttttttgatgaaattcaaagctgtacggaggcgataaaatcgcttcgttatttttacgagaaatatccccagcagcatgtcattgcggcaggctcgcttttggagttcgcgttaggtgaaataccgtcttttggcgtaggcaggcttcattcggtttttatgtacccgttttcgttttatgaatttctggacgcgctgggcgaagaaatgttgtccggagcctgccgggaagccgcaccggataagccgctcccgcagcctgttcataaacaacttctggatcgcctgaagatttttttgctgataggcggtatgccggaagctgtctcaagttacgcgcaaagcagggatatactgcatagtcaggtaattcttgaggatattataactacgttcagggatgatttttccaaataccggacaaagatgccggcccttattttaaacgaagtttttgaatcggtgatgcatcaggcgcagggaaaatttatctatgaacatgccgcggtggaaacggcaaacgccagaattaagcaggccctggagctgcttatcatggccggactcgcaattcctgtaacacacagcgcggcaaacggcattccacttggcgcgcagacaacccctaaataccgccgtgttattccatgcgataccggtattttcctgcatatactcggaattgataaatcgcagatacttttatctgacgattttaaaaccgttaaccagggagccttagcggaaatatatgccggccttgaacttctgaaaaacggtggtactcatgcccgcagacagctttattgctggagcagggaaaaagcccaaagcagcgcgcagatcgattatcttatacagatcaagtcgtcaatcgttcccattgaagttaaatcaggaacacagggcggtatgaaaagcctgaatatttttatgaaggaaaaaaacatcagccggggagtaagggcttcgcttgagaatttcgcgcaaaaagacaaattcgacatttatccgttgtacgcgatttcaaatttatatataaacagttag

SEQ ID NO: 48538 - protein, 400 aa, Unknown
  Obtained from environmental sample
  misc_feature (1)..(400): Xaa is any amino acid
MGKRFKHYVEINFDNDADAANFFKDNLEPDELCRRLSVYVRAPITPGETLLFFDEIQSCTEAIKSLRYFYEKYPQQHVIAAGSLLEFALGEIPSFGVGRLHSVFMYPFSFYEFLDALGEEMLSGACREAAPDKPLPQPVHKQLLDRLKIFLLIGGMPEAVSSYAQSRDILHSQVILEDIITTFRDDFSKYRTKMPALILNEVFESVMHQAQGKFIYEHAAVETANARIKQALELLIMAGLAIPVTHSAANGIPLGAQTTPKYRRVIPCDTGIFLHILGIDKSQILLSDDFKTVNQGALAEIYAGLELLKNGGTHARRQLYCWSREKAQSSAQIDYLIQIKSSIVPIEVKSGTQGGMKSLNIFMKEKNISRGVRASLENFAQKDKFDIYPLYAISNLYINS

SEQ ID NO: 48539 - DNA, 504 bp, Unknown
  Obtained from environmental sample
  misc_feature (1)..(504): n is a, c, g, or t
ttggaaaaattaggcgcatacacagatgatttagattacgtattctacgacgttcttggagacgttgtgtgcggtggtttcgcaatgcctatccgcgaaggcaaggcgcgggaaatttacatcgtttgctctggcgaaatgatggcattgtatgctgcgaacaacataacaaaaggcatatcaaaatacgccaccacaggcggtgtccgtttgggcgggcttatttgcaactcacgtaaagttgacggcgaagcagaccttgtttctgcagttgcaaaagaacttggcacacaaatgatacattttgtaccacgcgataacgctgtgcatagggcagagatcaacaaaaaaactgtaattgatttttcaccccaagaaccgcaggcagatgaataccgtgcactagcacgtaaaattgatgccaacgatatgtttgttgtaccaaaaccaatgtccatcgatcgcttagagtcgattcttcaagaacacggtatcatggattaa

SEQ ID NO: 48540 - protein, 167 aa, Unknown
  Obtained from environmental sample
  DOMAIN (1)...(167): 4Fe-4S iron sulfur cluster binding proteins, NifH/frxC family
  misc_feature (1)..(167): Xaa is any amino acid
MEKLGAYTDDLDYVFYDVLGDVVCGGFAMPIREGKAREIYIVCSGEMMALYAANNITKGISKYATTGGVRLGGLICNSRKVDGEADLVSAVAKELGTQMIHFVPRDNAVHRAEINKKTVIDFSPQEPQADEYRALARKIDANDMFVVPKPMSIDRLESILQEHGIMD

SEQ ID NO: 48541 - DNA, 324 bp, Unknown
  Obtained from environmental sample
  misc_feature (1)..(324): n is a, c, g, or t
atgttattagttagagcaattattcgtcccgaaaaagctggagctgttatgagcgagctggcttccgctggttttcctgccatcacaaaactcgacgtgttcgggcgcggcaaacaaaaaggcattacagtcggtaatgttcattacgacgagattcccaaagaaatgctcgttatagtctgcaatgacgaagacaaagacgatcttgtgaaaatcatcgtccgcgttgcaagaacaggcgaaggcaactacggagacgggcgtatttttgtttcccctgtggaatctgcctacactgtcagctctggcaagtctgggctatag

SEQ ID NO: 48542 - protein, 107 aa, Unknown
  Obtained from environmental sample
  DOMAIN (4)...(103): Nitrogen regulatory protein P-II
  misc_feature (1)..(107): Xaa is any amino acid
MLLVRAIIRPEKAGAVMSELASAGFPAITKLDVFGRGKQKGITVGNVHYDEIPKEMLVIVCNDEDKDDLVKIIVRVARTGEGNYGDGRIFVSPVESAYTVSSGKSGL

SEQ ID NO: 48543 - DNA, 513 bp, Unknown
  Obtained from environmental sample
  misc_feature (1)..(513): n is a, c, g, or t
ttgcaagaacaggcgaaggcaactacggagacgggcgtatttttgtttcccctgtggaatctgcctacactgtcagctctggcaagtctgggctataggaggtggaatatgcgggaaattatgtgttttatacgaccaaacaaggtcaatgacacgaaaagagcaatggcagaaaacggtttccccgcttttacctgctgtaaatgccttgggcgtggcaaaaaaagcattgatccggaattgctcaaaacagttcttgcagcaggcgagttgccgctttctccaattggggaaagcacaaccgaggccactcggttagtcgccaaacgctttttcacgctgatcattgacgataaagatgttgataaagcggttaaaacaataatcgctgccaaccaaaccggcaaccccggagatggcagaatttttgttttgcctatccttgaaactttctccgttagaacaggcgaaggcggtttacacatttcactagaagaagagggaggcacataa

SEQ ID NO: 48544 - protein, 170 aa, Unknown
  Obtained from environmental sample
  DOMAIN (40)...(156): Nitrogen regulatory protein P-II
  misc_feature (1)..(170): Xaa is any amino acid
MQEQAKATTETGVFLFPLWNLPTLSALASLGYRRWNMREIMCFIRPNKVNDTKRAMAENGFPAFTCCKCLGRGKKSIDPELLKTVLAAGELPLSPIGESTTEATRLVAKRFFTLIIDDKDVDKAVKTIIAANQTGNPGDGRIFVLPILETFSVRTGEGGLHISLEEEGGT

SEQ ID NO: 48545 - DNA, 582 bp, Unknown
  Obtained from environmental sample
  misc_feature (1)..(582): n is a, c, g, or t
atggccgagcggcttgcccgggagatttttccgcattttaccgtggcgctgattcattcaaaacttgatgacgaggaaaaacggcagacaatggaacgttttcacaaaggtgaaataaccgtgttagttgcaaccagcgttgtcgaggtgggggtggatgtgcccaacgcaaactgcatggtgatagaacacgcggaacgtttcggcctttccgccctgcatcagcttcggggcagggttggccgcggtcaggatcaggcgtactgttttttggtgtactccgatgatcttaccgaagacggcaaagtgcgcctgaaggtgatgctggaaaacaccgacggctttattattgccgaggaagacttaaaactgcgcggaccgggccagattgccggaaccgaacaatccggctaccttaatctgggaatcgccaatcccatccgcgacatagacgaacttgcccgcgccagaaccgacgccttctttatactgaaaaacgaccccggccttgttctggacagccaccgcattattgcccgcgtcctgaaagaagccccgctgtttgacgaggttgtgctgtaa

SEQ ID NO: 48546 - protein, 193 aa, Unknown
  Obtained from environmental sample
  DOMAIN (7)...(84): Helicase conserved C-terminal domain
  misc_feature (1)..(193): Xaa is any amino acid
MAERLAREIFPHFTVALIHSKLDDEEKRQTMERFHKGEITVLVATSVVEVGVDVPNANCMVIEHAERFGLSALHQLRGRVGRGQDQAYCFLVYSDDLTEDGKVRLKVMLENTDGFIIAEEDLKLRGPGQIAGTEQSGYLNLGIANPIRDIDELARARTDAFFILKNDPGLVLDSHRIIARVLKEAPLFDEVVL

SEQ ID NO: 48547 - DNA, 714 bp, Unknown
  Obtained from environmental sample
  misc_feature (1)..(714): n is a, c, g, or t
atgaccgaagtaaagaatctgtgcgccggctacaatggcaatgatgttatacacgatataagttttagggttgagaaaggggagtgtctctgtgtgctgggaccgaacggctgcggcaaaagcaccttgcttaaatccattgcccgcattatcgattaccggggccaggttctggtagacgaaagcgacatttccgccgttccccgcaaacagcttgcgcaaaaagtcgccctgctgagtcagaatatgcaggttttcttcccctacacggtatatgaaacggtttcaatgggacgctacgcctattcccgcggcttcctcaaaaatctttccgcggaagacgccgccattatcaatgacactcttaaaaaactggacctgtgggacagcagggatcgcatgattgatgaactaagcggcggaaccttacagcgggtttttctggcaaagactctggcgcagactccgcgcctgattctgctggacgaaccggcaaatcaccttgacctgaaacatcaaattgcgctgttggattatttgaaagcgtgggttaagggaaacgacacgagtttaatcggcgtgtttcatgaccttaacctggcgcggtatttcggcgacacggcgatagttttgaataacgggaatcttgccgcctgcggaacgatagaagcagtgttgaacagcgcgattttggaaacncgtttatggcattga

SEQ ID NO: 48548 - protein, 237 aa, Unknown
  Obtained from environmental sample
  DOMAIN (27)...(214): ABC transporter
  misc_feature (1)..(237): Xaa is any amino acid
MTEVKNLCAGYNGNDVIHDISFRVEKGECLCVLGPNGCGKSTLLKSIARIIDYRGQVLVDESDISAVPRKQLAQKVALLSQNMQVFFPYTVYETVSMGRYAYSRGFLKNLSAEDAAIINDTLKKLDLWDSRDRMIDELSGGTLQRVFLAKTLAQTPRLILLDEPANHLDLKHQIALLDYLKAWVKGNDTSLIGVFHDLNLARYFGDTAIVLNNGNLAACGTIEAVLNSAILETRLWH

SEQ ID NO: 48549 - DNA, 537 bp, Unknown
  Obtained from environmental sample
  misc_feature (1)..(537): n is a, c, g, or t
ttgcgcaagctgtttgcggggaacggcggaaatgtcgctttcgtctaccagaacctggccccggtaatcgataatgcgggcaatggatttaagcaaggtgcttttgccgcagccgttcggtcccagcacacagagacactcccctttctcaaccctaaaacttatatcgtgtataacatcattgccattgtagccggcgcacagattctttacttcggtcatcgccgccccctgaaatacacccaggcaaaaaacggcgctccgataagggcggttattgcccctaccggcagttccgacggcgaaatgaccgttctggcgattaaatcggttattaccatcaacgagccgccgatgaaaaacgacatgggaattaagtgccggtgcagtgaaccggtgatcttccgcgccgcgtgcggggcgataaggtcaacaaagccgataacgccgcttaacgctaccgccgcgccggtcaatacactgcacaatgccagtaatttttttctcagccctgttgtttccacgcccgccgattga

SEQ ID NO: 48550 - protein, 178 aa, Unknown
  Obtained from environmental sample
  misc_feature (1)..(178): Xaa is any amino acid
MRKLFAGNGGNVAFVYQNLAPVIDNAGNGFKQGAFAAAVRSQHTETLPFLNPKTYIVYNIIAIVAGAQILYFGHRRPLKYTQAKNGAPIRAVIAPTGSSDGEMTVLAIKSVITINEPPMKNDMGIKCRCSEPVIFRAACGAIRSTKPITPLNATAAPVNTLHNASNFFLSPVVSTPAD

SEQ ID NO: 48551 - DNA, 963 bp, Unknown
  Obtained from environmental sample
  misc_feature (1)..(963): n is a, c, g, or t
atggcgggagctttcctgggcagctcgggcatcagcctgggcgatactgttatgatcgttctgcataaaatttcagggcttccccttaacgcggatgttgacccgaaaaatgtctcgattgtctggttgctgcgactgccgcgggtgttactgctttttcttataggcggctgccttgcgataagcggcgcggtttgccagtccattttacgcaatccccttgcctcgccctacattttgggcgtttcttccggcgcgtccctgggcgcgggaataatcatcatcagtgggattacgctccccctgctgggcgcttttaccctgccgttgactggctttgtcttcgggcttttaaccgttttttttgtagccgccttttcttcacgcattgacaagtcaatgtcgaataacacaatcattctctgcggcatggtgttttcactttttttaaacgccctgcttaccctgttaagcgctattttttccgatgacttaaaacgcataacgctgtggcagatggggagtttcgccatgcgcggctggacttatgttcaactgctgctgccttttttaatagttggaaccgcgggcgtactcctatacgccaaagaaatggacattatgacctttgacgacgatcaggctcaatcggcgggcgtggaaacaacagggctgagaaaaaaattactggcattgtgcagtgtattgaccggcgcggcggtagcgttaagcggcgttatcggctttgttgaccttatcgccccgcacgcggcgcggaagatcaccggttcactgcaccggcacttaattcccatgtcgtttttcatcggcggctcgttgatggtaataaccgatttaatcgccagaacggtcatttcgccgtcggaactgccggtaggggcaataaccgcccttatcggagcgccgttttttgcctgggtgtatttcagggggcggcgatga

SEQ ID NO: 48552 - protein, 320 aa, Unknown
  Obtained from environmental sample
  DOMAIN (69)...(318): ABC 3 transport family
  misc_feature (1)..(320): Xaa is any amino acid
MAGAFLGSSGISLGDTVMIVLHKISGLPLNADVDPKNVSIVWLLRLPRVLLLFLIGGCLAISGAVCQSILRNPLASPYILGVSSGASLGAGIIIISGITLPLLGAFTLPLTGFVFGLLTVFFVAAFSSRIDKSMSNNTIILCGMVFSLFLNALLTLLSAIFSDDLKRITLWQMGSFAMRGWTYVQLLLPFLIVGTAGVLLYAKEMDIMTFDDDQAQSAGVETTGLRKKLLALCSVLTGAAVALSGVIGFVDLIAPHAARKITGSLHRHLIPMSFFIGGSLMVITDLIARTVISPSELPVGAITALIGAPFFAWVYFRGRR

SEQ ID NO: 48553 - DNA, 477 bp, Unknown
  Obtained from environmental sample
  misc_feature (1)..(477): n is a, c, g, or t
atggaaggaactatgcgtataattatggggctgctggcgacgcttatcggtctgtactctctgcttattatcgtcaggataatactcacctggttcagtaatatccagtacggaaaagcggtgcagtttcttgccgctattaccgatccctaccttgactggtggcggcgcaatttcagactaaaggcgggcgttctggatctttcacccattgcggcgttggcatttctttcaattatgcagacggtatgttccagcattgccagtcagggcagagtcagcctggggataattctcgctgtctgcctttccgccgtgtggtcggcggtttcctttatcgtaggtttttctctcatcgttcttgttctgcgttttatcgcgtttgtatgtaacagtaatatgtactctactttttggcggattattgattctattgcgcgtcccctcatgtaccgctcaaccgctcggccaatctga

SEQ ID NO: 48554 - protein, 158 aa, Unknown
  Obtained from environmental sample
  DOMAIN (5)...(87): YGGT family
  misc_feature (1)..(158): Xaa is any amino acid
MEGTMRIIMGLLATLIGLYSLLIIVRIILTWFSNIQYGKAVQFLAAITDPYLDWWRRNFRLKAGVLDLSPIAALAFLSIMQTVCSSIASQGRVSLGIILAVCLSAVWSAVSFIVGFSLIVLVLRFIAFVCNSNMYSTFWRIIDSIARPLMYRSTARPI

SEQ ID NO: 48555 - DNA, 987 bp, Unknown
  Obtained from environmental sample
  misc_feature (1)..(987): n is a, c, g, or t
atgccaggttttttcgtggatagacaaatatacggacgagggttgcgaatacttcgcatagtagcttatttccctgttttttattttttgtgggaaggttttttaaaactcgccgctgtgaatataagcataattttaatcggtgcatggtacttatcctttagagttcgccagcaagacacagaaaaaccatactaccagttatggctatcgttcatcgaagggatttttgcttttgcggtgatgatttgtatttttataaaagattcgctaggcgaaaacggacctgataaaatgctcgccgttggctgtgttttgttcttatccagagttgtgaccagaactctttacctgctttctatgctgcgcgagggaatgcattttttcaaaagcgggttttggtctagggtagccactttaagcatcaatacaaccatgctcatctatgttttggagttggagtattacgagcagatttgtatgggattgtcaatactcctcatgtttgcttccagcgtatcttttggctatcgctactaccgcgaccctgcgcatcgcaagcctttgtcaatctcaaatcagctgacgatgagccgcatagttttaactcctgtgtttttgttggttttcttttacgatggcaatttgaattaccaagacaatagcttggtgtttaaaattttagctttggttatggttgtagcttttatggttacggattttttagatggatatttggcgcgcagatggggcgaagtttccacgcttggcaaataccttgacccattttctgataaaatctcaaatatgaccgtgttcctgtgctttttggcttctggctattcttcggtttggatggttgcactaatttactttagagaagcgagcgtagaaaccctgcgaactttggcagccaacgaaggaatgaccatgcccgcccgcaggagcggcaaatggaaaaccgcaattcagggcacaggaatttga

SEQ ID NO: 48556 - protein, 328 aa, Unknown
  Obtained from environmental sample
  DOMAIN (230)...(328): CDP-alcohol phosphatidyltransferase
  misc_feature (1)..(328): Xaa is any amino acid
MPGFFVDRQIYGRGLRILRIVAYFPVFYFLWEGFLKLAAVNISIILIGAWYLSFRVRQQDTEKPYYQLWLSFIEGIFAFAVMICIFIKDSLGENGPDKMLAVGCVLFLSRVVTRTLYLLSMLREGMHFFKSGFWSRVATLSINTTMLIYVLELEYYEQICMGLSILLMFASSVSFGYRYYRDPAHRKPLSISNQLTMSRIVLTPVFLLVFFYDGNLNYQDNSLVFKILALVMVVAFMVTDFLDGYLARRWGEVSTLGKYLDPFSDKISNMTVFLCFLASGYSSVWMVALIYFREASVETLRTLAANEGMTMPARRSGKWKTAIQGTGI

SEQ ID NO: 48557 - DNA, 579 bp, Unknown
  Obtained from environmental sample
  misc_feature (1)..(579): n is a, c, g, or t
atggaaaagaaagacgggcatttaaaacaacaacttgacctttggtacgaaaaaatctgcacaaaagattttattctttctgatccggttcagtttccgcgcaggttttcaaaacgggaagatattgagattgcggcttttctttcagcgacaatcgcatggggcaggcgggatttaattctgcgcagtgcggaaaaaatgtttgtcattatggaacacagtccatataactttgtaatgtccggcggatacaagaaactgaaaaaccgcaacattcaccgtactttttttgaggatgaccttaaatacttctgccgcggctttgaatactgttacgcaaaatacaagaatttggaaaaattgttcgccgccgaggatgtttgggaagggtttaccctgttccgagaggaaatggcaagagcaaacaaggggcattattcaaaacacatttcaaatcctggcgcgcaggacagtaacggctccgcatgcaagcggctaaacctcgtgctgcgttggcttgtgcgtaagggacctgtgatctcgaacttggaaaagtctcggccaatctgtcatgcctga

SEQ ID NO: 48558 - protein, 192 aa, Unknown
  Obtained from environmental sample
  misc_feature (1)..(192): Xaa is any amino acid
MEKKDGHLKQQLDLWYEKICTKDFILSDPVQFPRRFSKREDIEIAAFLSATIAWGRRDLILRSAEKMFVIMEHSPYNFVMSGGYKKLKNRNIHRTFFEDDLKYFCRGFEYCYAKYKNLEKLFAAEDVWEGFTLFREEMARANKGHYSKHISNPGAQDSNGSACKRLNLVLRWLVRKGPVISNLEKSRPICHA

SEQ ID NO: 48559 - DNA, 1023 bp, Unknown
  Obtained from environmental sample
  misc_feature (1)..(1023): n is a, c, g, or t
ttgccgcgacgattctcttcccgtgtaaaagttatgaccgaagaagtagtcgttgtaaaaggagagccgacggtagaaaaagcgcgtgataaatttttcgaattccgtattgagaaacttccggtagtggataacgaaggcaggcttacaggccttatcaccgtaacggacatggagaaacatgaaaatttccccaacgcggcgacggataaatccggcaggctcattgtaggcgcggcaatctccccgcaggattatgatgtgcgccttcccctgcttgtaaaagccagagttgattttgtagtccttgacaccgcccacggcgattcaaaaaatgttatggaatcgattcgcaaaattaaaaaagaatataatattcctgtaatcggcggaaacgtcgccacaaaagagggaacaaaaaaattaatcgacgcgggagcggatgcggtaaaggtaggcataggacccggatcaatttgcacaacaagggttgtcgcaggaatcggcgtgcctcagtttaccgcagtatgggagtgcgccgaagaagcgtcaaaatcaaaaattcccgtcattgcagacggcggcattaagttctcaggagacattaccaaagcaatcggcgcgggagctagtgttgtaatgataggcaaccttttcgccggattaaaagaagcgccgggaaacgaaattatttttgacggaagaatttacaaggaataccgtggaatgggcagcatgggcgctattgcggacggttcaggcgaccgttatcagatcggcaaagatgaagaacccgtgccggaaggaattgaagggcgcgtaccttacaagggcgaactgcgtacatacatgaaccagcttatcgcaggacttcgcaagggtatgggttactgcggctgccgcaatataacggaattgaagcaatacaaaaaatttgtaaaaattacagcttcaggcatacgtgaaagccaccctcatgatgttacgattacacaggaagcgccaaattattcccgcctgtaa

SEQ ID NO: 48560 - protein, 340 aa, Unknown
  Obtained from environmental sample
  DOMAIN (10)...(207): CBS domain pair
  misc_feature (1)..(340): Xaa is any amino acid
MPRRFSSRVKVMTEEVVVVKGEPTVEKARDKFFEFRIEKLPVVDNEGRLTGLITVTDMEKHENFPNAATDKSGRLIVGAAISPQDYDVRLPLLVKARVDFVVLDTAHGDSKNVMESIRKIKKEYNIPVIGGNVATKEGTKKLIDAGADAVKVGIGPGSICTTRVVAGIGVPQFTAVWECAEEASKSKIPVIADGGIKFSGDITKAIGAGASVVMIGNLFAGLKEAPGNEIIFDGRIYKEYRGMGSMGAIADGSGDRYQIGKDEEPVPEGIEGRVPYKGELRTYMNQLIAGLRKGMGYCGCRNITELKQYKKFVKITASGIRESHPHDVTITQEAPNYSRL

SEQ ID NO: 48561 - DNA, 441 bp, Unknown
  Obtained from environmental sample
  misc_feature (1)..(441): n is a, c, g, or t
atgtttaacgaaagttattcttacgacgatgttcttttgcagcccggatattccgaggtcctgccaaaggaatgtaacatccaaaccgttctttgcgacggcattcatttgaacgtaccgataatttccgccgcgatggataccgttaccgaagaaaaacttgcaatcgcaatcgcgctggaaggcggcgcaggggttattcaccgtaatctgccgcccgaagatcaggctcatcaggttgcaaatgtaaaacggtttttaaattggataattgagtcgcccatgacagtcccgcatgacgcttatgtccgcgacgtaaggattcttgtcaaagatcacggagtatcgggacttcccgtcgtggacaaagacggaaaattaaaaggaataatcacaaaccgcgacctgcgtttttgccgcgacgattctcttcccgtgtaa

SEQ ID NO: 48562 - protein, 146 aa, Unknown
  Obtained from environmental sample
  DOMAIN (4)...(146): IMP dehydrogenase / GMP reductase domain
  misc_feature (1)..(146): Xaa is any amino acid
MFNESYSYDDVLLQPGYSEVLPKECNIQTVLCDGIHLNVPIISAAMDTVTEEKLAIAIALEGGAGVIHRNLPPEDQAHQVANVKRFLNWIIESPMTVPHDAYVRDVRILVKDHGVSGLPVVDKDGKLKGIITNRDLRFCRDDSLPV

SEQ ID NO: 48563 - DNA, 390 bp, Unknown
  Obtained from environmental sample
  misc_feature (1)..(390): n is a, c, g, or t
atgtcgaaggttatcgaaggattgggcacagaccgggaaagactgctcgccaatttacgcggcggcgggatacccggcggagtgatggcggaacccgcctacatattgttagctgaaacaggagtcagcgacgcgcacgaagttatccgcaagataacccttgcctccgaaaaagaaaatatcagttttgccgccgcgcttgcaaaagagccggaaacgctgaaaaaaatcagcggcaaattggcggaattggggctaatcacggcgcggacggacggttcaacagaagaagcgcttttcttttttgagaaccctcagcgttactccgggcttgcggcaaaaaaagcaaaaacgcttgcggaaaaatataaagcgttaatgggaggataa

SEQ ID NO: 48564 - protein, 129 aa, Unknown
  Obtained from environmental sample
  misc_feature (1)..(129): Xaa is any amino acid
MSKVIEGLGTDRERLLANLRGGGIPGGVMAEPAYILLAETGVSDAHEVIRKITLASEKENISFAAALAKEPETLKKISGKLAELGLITARTDGSTEEALFFFENPQRYSGLAAKKAKTLAEKYKALMGG

SEQ ID NO: 48565 - DNA, 372 bp, Unknown
  Obtained from environmental sample
  misc_feature (1)..(372): n is a, c, g, or t
atgcgactgggagatctgtttgacgggtttaaagtgtttgttacaggttttttggtttacttacttaaaggtatttttacagcgttatggacattactgtttatcattcccggaatagttaaaagtttaagctattccatgtccttttttattttacgagacaatcccaaattaagcgcaacagaagcaataaccagcagcaggaaaatgatgaagggttataaatggaaattgttttgcctttactttagttttataggctggggtatcctgtgcattttatcctttggcattggctttttatggcttatcccttatgtcagtttaacccttgccaatttttatgaaggtgtaaagcaaaatcaaaaataa

SEQ ID NO: 48566 - protein, 123 aa, Unknown
  Obtained from environmental sample
  DOMAIN (1)...(122): Protein of unknown function (DUF975)
  misc_feature (1)..(123): Xaa is any amino acid
MRLGDLFDGFKVFVTGFLVYLLKGIFTALWTLLFIIPGIVKSLSYSMSFFILRDNPKLSATEAITSSRKMMKGYKWKLFCLYFSFIGWGILCILSFGIGFLWLIPYVSLTLANFYEGVKQNQK

SEQ ID NO: 48567 - DNA, 1206 bp, Unknown
  Obtained from environmental sample
  misc_feature (1)..(1206): n is a, c, g, or t
atggcaaacaggaaactattaacagtaatgctggcagtcgcgctggtatcggcaatgacggcatgcaaaagcccgaaggcgggcggctggaaagtcgtaaacggcaaagggacaaaaaacgcccgcgcaattgccttcggcaacgacatgtttgttatggctcgcaagggcggcgaaatggcggtctcagtagacggcgtaacatggacggcaataaagagtaaagcactcggcaaaggaaacattaacgcaatcgcttttggcaaagacaagtttgtagccgtgggggaaaaaggcagaatagtctactcggaagacggcgaggactggacagccgcggaagacaacgcgtttgagaaaaaagacagcattaccgctgtcgcatggagcggcagcaggtttgtcgcagcgngcggaaaaggcaaaatggcgtattcgtctgacggagtaaactggacagccgtaacggacagcactttcaccagttcaggtgccgaccccgccgtcatcaggagaatcgcctggggcaataacacgtttgtcgccgttggcactagcggccaaatagcaacttcgcctgatggcgaaatttggacagaaagaacgaacgacatattaacctcatcaaacaacagcatctacgcaatcgcctttggaggcggcaagtttgtcgtaggggacaatgacggcagaatagcgacttcgtctgacggcgcaacatggacagtcatagcgaacagcatattcggcacagacagaatcgacggaatcgcttttggcaacaacatgtttatcgccaggagctccaacaaaagggcgtattcaacggacggcacaaactggacagccatcagctttaaaattgagaaactcgcctttggagtcgacaagtttgtttctgcggcgggcaaggactgggttacagcatattcgtctgacggcataacctggacaaccgtaagttcggcaaataacgcattcgcctcatctctcatctacgcaatggcatatggcaacggcaagtttctcgccgtgggagataacggcaaaatggcgtatttatctgacggcaacagtggaaacactggaaacaactcgcaaacagcaacctataccggcacagcaagcggcacaaactacacgctgaaaatcaccggagatgcatatgaactaacagccggagcgaagaaagcgcaggcacagtaa

SEQ ID NO: 48568 - protein, 401 aa, Unknown
  Obtained from environmental sample
  SIGNAL (1)...(23)
  misc_feature (1)..(401): Xaa is any amino acid
MANRKLLTVMLAVALVSAMTACKSPKAGGWKVVNGKGTKNARAIAFGNDMFVMARKGGEMAVSVDGVTWTAIKSKALGKGNINAIAFGKDKFVAVGEKGRIVYSEDGEDWTAAEDNAFEKKDSITAVAWSGSRFVAAXGKGKMAYSSDGVNWTAVTDSTFTSSGADPAVIRRIAWGNNTFVAVGTSGQIATSPDGEIWTERTNDILTSSNNSIYAIAFGGGKFVVGDNDGRIATSSDGATWTVIANSIFGTDRIDGIAFGNNMFIARSSNKRAYSTDGTNWTAISFKIEKLAFGVDKFVSAAGKDWVTAYSSDGITWTTVSSANNAFASSLIYAMAYGNGKFLAVGDNGKMAYLSDGNSGNTGNNSQTATYTGTASGTNYTLKITGDAYELTAGAKKAQAQ

SEQ ID NO: 48569 - DNA, 819 bp, Unknown
  Obtained from environmental sample
  misc_feature (1)..(819): n is a, c, g, or t
atgcagaattttcgattctctttacggagagggaaaacgaagcgcgtggaaatagcgcagattggccagatagcggaaaatgttcactttggaaaaccttgtgggttaatggatcaggcggcatgcgccacaggcggtgccgtcgcgattgattttgccgatgtttcgcgcccctcagtaaagcaaataaattttgatcctgccgccgccggatacgctctntgcgtagcgaatacgggtggcagtcacgccgatcttaccgcggattacgcatccattccggcggaaatgaaatcggttgccgcatttttcggcaagtccgtacttagcgaacttgaaaaagaaactttctttactcgcgccgcagaagtacgaaagtcattgggagacagggcgtttttacgcgccattcacttttttaacgaaaacgaaagagtagactcaattactgaagctttattggaaatggaaaaagcagccacaaccgccgacaaacagcgggtgtttagccgctatttggatttagtcaatgaatcgggtgactcctcatgggaacttttacaaaacgtattctcccctacccgtcccaaagatcaaggcataggcgcggctcttgcgctgacaaaagattttttccacaaacaaaaactgcgcggcgcatgcagggtccacggcggcggctttgccggaaccattcaaacttatatccccgtagacgcaatgaacgcctatcgcgcatatatcgaagcggtctttggtacaggttcgctgacagtactgcggataaggtccaggggcgcggttgaattggagttttaa

SEQ ID NO: 48570 - protein, 272 aa, Unknown
  Obtained from environmental sample
  misc_feature (1)..(272): Xaa is any amino acid
MQNFRFSLRRGKTKRVEIAQIGQIAENVHFGKPCGLMDQAACATGGAVAIDFADVSRPSVKQINFDPAAAGYALCVANTGGSHADLTADYASIPAEMKSVAAFFGKSVLSELEKETFFTRAAEVRKSLGDRAFLRAIHFFNENERVDSITEALLEMEKAATTADKQRVFSRYLDLVNESGDSSWELLQNVFSPTRPKDQGIGAALALTKDFFHKQKLRGACRVHGGGFAGTIQTYIPVDAMNAYRAYIEAVFGTGSLTVLRIRSRGAVELEF

SEQ ID NO: 48571 - DNA, 831 bp, Unknown
  Obtained from environmental sample
  misc_feature (1)..(831): n is a, c, g, or t
gtggaacatacggagcggatgttcccgcagcacgcgctggccgcctgtcagggcgtggagggtgcgtattcacagattgcctgtgacaggttgttctccgatcctaacatcatgtacttcacgggctttgacggtgtgttttcggcgattcgggatggtctatgccaatacggggtattgcctttggagaacagcacggccggctcggtcaacatggtgtacgaccttatgatgcgctacagtttcaagatcgtgcggagcgtgcggcttaagattgaccacaacctgctcgcgaaggcaggcgtcaaaaaggagaacatccgcgaaatcttttctcacgagcaggcgatccaacagtgcgcggggtacttaaagggacttggcaagggtgtgaaaatcaccacggtcgccaataccgccgaggccgcgaaaattgtggctgaatcggaacggaacgatattgcggcgctgtcctcacgcgcgtgctgcgacttgtacgccctgaaatgcgttgagagctctgtgcaggacaggggcaataactatacgcggtttatttgcatctccaggaatctcgaaatatatccgggcgcggatcgtaccagcatcatgctgaccactgcgcacaaacccggctcgctttacaaagtgttggggcagatattcactttaggcgtgaatgtagtaaagcttgaaagccgcccgatacccgacagggatttcgagttcatgttttattttgatcttgagacattcgttttattcaaaagaattcagccagcttatgtgcgagctggaaaatatatgcgaggaatttcactatctcggtag

SEQ ID NO: 48572 - protein, 276 aa, Unknown
  Obtained from environmental sample
  DOMAIN (14)...(193): Prephenate dehydratase
  misc_feature (1)..(276): Xaa is any amino acid
MEHTERMFPQHALAACQGVEGAYSQIACDRLFSDPNIMYFTGFDGVFSAIRDGLCQYGVLPLENSTAGSVNMVYDLMMRYSFKIVRSVRLKIDHNLLAKAGVKKENIREIFSHEQAIQQCAGYLKGLGKGVKITTVANTAEAAKIVAESERNDIAALSSRACCDLYALKCVESSVQDRGNNYTRFICISRNLEIYPGADRTSIMLTTAHKPGSLYKVLGQIFTLGVNVVKLESRPIPDRDFEFMFYFDLETFVLFKRIQPAYVRAGKYMRGISLSR

SEQ ID NO: 48573 - DNA, 630 bp, Unknown
  Obtained from environmental sample
  misc_feature (1)..(630): n is a, c, g, or t
atgacgggaacaaattattcaaaacaatcaagagaaaacggtttacagctcataatcgcctcagaaaaaggcgatattgaaactgtaaaattattacttaaaaaggatgtatatatccacacacaggacaaggaaggcaggtgcgcccttgtggctgccgcatacaggaacaatctggaaattgtcgatttgctgattgccgccggcgcggatgtcaatatgaaggacaataccctgcaaagcgcctgcctgattccatcattggaaggatatacagagctgctcaaaaaaacactaaaagccggaggagatgtccacagtacggacagtgacaacggaacgggactgatccgggcttctgaccgcggtcatgttgaaatagtcagagaacttttaaagacagatatccgtgtcaatcatgtgaacagaattggatggaccgcgttgcttgaggcaatcatattgggcgacggaggaaagcggcataccgagattgtgcgtcttttggttgattccggcgcggatgttaatctgccggataaagacggagttaccccgttgacgcatgccaggaacaagggctttaccgatattgtaaagatactggaaaattccggggcaaagagttaa

SEQ ID NO: 48574 - protein, 209 aa, Unknown
  Obtained from environmental sample
  DOMAIN (144)...(181): Ankyrin repeat
  misc_feature (1)..(209): Xaa is any amino acid
MTGTNYSKQSRENGLQLIIASEKGDIETVKLLLKKDVYIHTQDKEGRCALVAAAYRNNLEIVDLLIAAGADVNMKDNTLQSACLIPSLEGYTELLKKTLKAGGDVHSTDSDNGTGLIRASDRGHVEIVRELLKTDIRVNHVNRIGWTALLEAIILGDGGKRHTEIVRLLVDSGADVNLPDKDGVTPLTHARNKGFTDIVKILENSGAKS

SEQ ID NO: 48575 - DNA, 444 bp, Unknown
  Obtained from environmental sample
  misc_feature (1)..(444): n is a, c, g, or t
atgagaatggccaaatacctcttttcgctctgggcaggggttttgatatatgcctctctgttcctgataaccggcgctaaggggttttccacccaccggcagctcgagaatgagaaaaaaaaacaggaagcaaatatagaatcccttaaactgataaaccaggaactggaagagacaatgaattccctcctttacgataaagatacgctggctgtttacgcccgcgagcagggctatgcttcttcccgggaaagatttgtgcgcatagtcggccttggagtaaaccaaaaaaatataacttaccccggcaaaacaatagccactgccgaaccgcaatacaccccggaaaaaacaataatgatgattgccttttgtgccggcgtgagtgtttttatatgtatggtggtttttgatatattgaagctcttcagggataacacgtaa

SEQ ID NO: 48576 - protein, 147 aa, Unknown
  Obtained from environmental sample
  SIGNAL (1)...(26)
  DOMAIN (14)...(92): Septum formation initiator
  misc_feature (1)..(147): Xaa is any amino acid
MRMAKYLFSLWAGVLIYASLFLITGAKGFSTHRQLENEKKKQEANIESLKLINQELEETMNSLLYDKDTLAVYAREQGYASSRERFVRIVGLGVNQKNITYPGKTIATAEPQYTPEKTIMMIAFCAGVSVFICMVVFDILKLFRDNT

SEQ ID NO: 48577 - DNA, 663 bp, Unknown
  Obtained from environmental sample
  misc_feature (1)..(663): n is a, c, g, or t
ttgataaataaattgtatactccttatatggcaagcaccccccttaccccggtaatacggatagatgaagaaaagtgcattaactgttacgcgtgtatcgtgatatgccctgttaagtactgcatggacggatcgggagaaaaactccagataaatcacgatatctgtataggctgcgggaactgcattaacgcatgcacccacaaggcaaggatgctcatagacgacaccagtcgtttcatgaatgaccttgaacaaaagaataaaattatcgccatagccgctccggctgtcgcttcgttttttcccaatcaatttctcaacttaaacggctggttaaaatcgctgggcgtcgaagagttttttgacgtgagcttaggcgcggaacttacggtcgtgtcctaccttaactacatcaaaaataaaaatccgcgtatggtaatagcgcagccatgccccgcgattgtaacttttatcgaaattaaccaccctgaattgctgccctatcttgccccggcggacagccccatattgcacaccatcaaattaatcaaagaatattatcctcaatataagaatcataaaatagcgataatttccccctgcatcgcccaacggcgggaatatgacgaaaccggcatgggggactacacgttacgatga

SEQ ID NO: 48578 - protein, 220 aa, Unknown
  Obtained from environmental sample
  DOMAIN (19)...(42): 4Fe-4S binding domain
  misc_feature (1)..(220): Xaa is any amino acid
MINKLYTPYMASTPLTPVIRIDEEKCINCYACIVICPVKYCMDGSGEKLQINHDICIGCGNCINACTHKARMLIDDTSRFMNDLEQKNKIIAIAAPAVASFFPNQFLNLNGWLKSLGVEEFFDVSLGAELTVVSYLNYIKNKNPRMVIAQPCPAIVTFIEINHPELLPYLAPADSPILHTIKLIKEYYPQYKNHKIAIISPCIAQRREYDETGMGDYTLR

SEQ ID NO: 48579 - DNA, 1449 bp, Unknown
  Obtained from environmental sample
  misc_feature (1)..(1449): n is a, c, g, or t
atgatcgcgttaaaaagatttttggacgagaagaaaataagcctttcctcctttccgcagctggaatatacaggagacagcgcggaacgcgcggcgggcttccccattcccggtggacttttggataccgccgagcgttttgaaccgggtatcaggcggaatacagaaaagattgaaggggtatttgccatctatccttatttgaaagaaatctgcgaaatattgaataccgatgacgaattaccattgttgatagactgcctgaattgcgaaaaaggctgcatcggcggtcccggtacggggaacgccgaaaaaccgctggccgatcttaaagcccccgtgcgaaaacgcatggctaaattggaaaaagagcataattcccaaaaaggaataaaatcgttcaagaaatacaatgatgtcctgaaaaagtactggaagaaaggcctgtataaccggagctaccgcgatctttccgggaacaatacgatcaaacatccaaacgaagctgagttgactaaaatcttccatagcttaaaaaaattcaaaaaagaagatatatacaactgtacctgctgcggttacggaagctgcgcggcgatggcgacggcgatttacaacaaacttaacaaaccgganaactgcgcccattatattctcgccctgctcacggaaaaaaccaataccgaagaacttaaccgtcagcttgaggaacacattggcgaggcgtcagagcttattgagggaaataataatttttataacaaactgaatgccaccatcagttcgcaggcggaaacaatcgcccgatctacggtggcaaccgagaaaatgatcgtctcgctcaaagaaactacggaaatgtccctaaccaaacaggaatccataaaagggttaatagaagacgccgccagagggcaggaggccatgcgggggacaatacaagctgttgaggacatttccaaatcaatggaaggcatagcgcaggcaattaaaatgatcagcgcgatagcggccaacaccaacctgctctccatgaacgcggccatagaatccgctcatgccggtgaagcgggcaggggttttgcggtagttgccggtgaaatacgccgtctttcggacagcacccgggaaaattcacggaacatttcccagactctgaaaaatatcattgccggaatagccgttaccgaaaaacaatcagacaacgccggcatccggattaccgcaatgtccaaagaaatcagcagtttcgctgaaaccatatccgatctaatcaatacttttgccgaactgtcaacgcacagcggtgaaattacatccgcgctggacagccttcaaagtcaaagcgagatggtaaaaaccgactatgccgaaatactgtcaatgactgaaaaactccgcgctgcaatggttgatttgactatgctgtcgaagaaaagttcctcgtaa

SEQ ID NO: 48580 - protein, 482 aa, Unknown
  Obtained from environmental sample
  DOMAIN (233)...(476): Methyl-accepting chemotaxis protein (MCP) signaling domain
  misc_feature (1)..(482): Xaa is any amino acid
MIALKRFLDEKKISLSSFPQLEYTGDSAERAAGFPIPGGLLDTAERFEPGIRRNTEKIEGVFAIYPYLKEICEILNTDDELPLLIDCLNCEKGCIGGPGTGNAEKPLADLKAPVRKRMAKLEKEHNSQKGIKSFKKYNDVLKKYWKKGLYNRSYRDLSGNNTIKHPNEAELTKIFHSLKKFKKEDIYNCTCCGYGSCAAMATAIYNKLNKPXNCAHYILALLTEKTNTEELNRQLEEHIGEASELIEGNNNFYNKLNATISSQAETIARSTVATEKMIVSLKETTEMSLTKQESIKGLIEDAARGQEAMRGTIQAVEDISKSMEGIAQAIKMISAIAANTNLLSMNAAIESAHAGEAGRGFAVVAGEIRRLSDSTRENSRNISQTLKNIIAGIAVTEKQSDNAGIRITAMSKEISSFAETISDLINTFAELSTHSGEITSALDSLQSQSEMVKTDYAEILSMTEKLRAAMVDLTMLSKKSSS

SEQ ID NO: 48581 - DNA, 723 bp, Unknown
  Obtained from environmental sample
  misc_feature (1)..(723): n is a, c, g, or t
atgcatgtcaccgatgacggttacggaatactgctggacgaaaatttgggactaatcgcccatccggacgtgtatatgataggaaaatcgttgcggaacgtgaacagcggactggcaagccaccttgcctattatttggaaaatagcgaagagtacattcctaaaaacatggcaatcaattacaagggtatggagtctattgttttttccagaaaattaagaaccggctggtatgtcagtcttatagcgcccgttaacaagtattaccgcgaaatcaggaacatgggtctggtacttaccgttcttggcataataatggcggctgttttgagcggtatcctgcggcgtattaccaattcaaagaaaaaagtggaacaagaaaacaaacagaaaagcgattttctggcaaaaatgagtcatgaaatccgcacgccgataagcgctattctgggcattaccgaaatccagcttcaggatcgcacgcttcgggaagatataagagaggcgttaggcagaatttacaattcaggggatttactgctgggaatcataaacgacatattggacttttcaaaaatagaagccggtaaaatggaactgatgcccgtcaaatactatgtctcaagtatgattaatgatattgtacagttgaataaaataaaaaacgaaaacaagcccattgaatttcagctgcaggtggatgaattccttcgggctgaataa

SEQ ID NO: 48582 - protein, 240 aa, Unknown
  Obtained from environmental sample
  DOMAIN (130)...(196): His Kinase A (phosphoacceptor) domain
  misc_feature (1)..(240): Xaa is any amino acid
MHVTDDGYGILLDENLGLIAHPDVYMIGKSLRNVNSGLASHLAYYLENSEEYIPKNMAINYKGMESIVFSRKLRTGWYVSLIAPVNKYYREIRNMGLVLTVLGIIMAAVLSGILRRITNSKKKVEQENKQKSDFLAKMSHEIRTPISAILGITEIQLQDRTLREDIREALGRIYNSGDLLLGIINDILDFSKIEAGKMELMPVKYYVSSMINDIVQLNKIKNENKPIEFQLQVDEFLRAE

SEQ ID NO: 48583 - DNA, 1167 bp, Unknown
  Obtained from environmental sample
  misc_feature (1)..(1167): n is a, c, g, or t
gtggaatatgtagggcgcggaggaaccgtattagtttctcttgtttttcagataagcgacacaggacagggtatgtccggcgaacaaataaaaaaattgtttgatgaatatacccgctttaatatggaggccaaccgcacaaccgaaggcgcggggctgggcatgaccattacgcgaaatcttatagatttaatgtatggaaaaataaccgttaaaagcgcagttggcgaaggcacgacatttacggttacattgccgcaaaaaacagacggtaaaggcattagcggagttatcggcaaagaaactgcggataagctgagtcaatttaaacaaaacaattccgtacaggcgaataaaacaaggctcatccatgaatatatgccttacggcagtatacttatcgttgatgacgtagagaccaatttgtatgtcgcaaaagggcttatgcttccttatggacttaaaatagacattacggaaagcggatttgaagcgattcaaaaaattaaagacggcgcggattatgacatcgtatttatggatcacatgatgccgaaaatggacggcatagaaacaacgaaacaactgcgtaaaatgaattatacaaaaccaattgtcgcgttgacagctaacgcattaacgggtcaggctgaaatgtttatgaaaaacggcttcgacggttttatttccaaacccatagacatacgtcagttgaacgccgcacttaacaaaatgataagggacaaacagccgtttgaagttattgacgcggcgcgcaaggaaaaagcaacaaggaaggtagatcaaaaaacacctcagccgcagttgcagccgcaatcgctgcaactgccgcagccgcagtctgccgtctcacaggcgaaagaaatttttgcccggaatacggaaatggcggttaccaggctggaaacaatctacaaaaatgaagcgccaaaaccggaacaacagggacaggatcgagctatcaatatgataataaccgaactccccaagtttatcgaagcgttgcgggaagtaagcgaaaaattaaaagcaaacataaaaagcggcgaatcggaaaacgaagatatcgggttacttgaaaaaattcaaattcttcataaagcatacaaggaacgcgacaaacagtccgaaaaagcagaacaataa

SEQ ID NO: 48584 - protein, 388 aa, Unknown
  Obtained from environmental sample
  DOMAIN (1)...(88): Histidine kinase-, DNA gyrase B-, and HSP90-like ATPase
  misc_feature (1)..(388): Xaa is any amino acid
MEYVGRGGTVLVSLVFQISDTGQGMSGEQIKKLFDEYTRFNMEANRTTEGAGLGMTITRNLIDLMYGKITVKSAVGEGTTFTVTLPQKTDGKGISGVIGKETADKLSQFKQNNSVQANKTRLIHEYMPYGSILIVDDVETNLYVAKGLMLPYGLKIDITESGFEAIQKIKDGADYDIVFMDHMMPKMDGIETTKQLRKMNYTKPIVALTANALTGQAEMFMKNGFDGFISKPIDIRQLNAALNKMIRDKQPFEVIDAARKEKATRKVDQKTPQPQLQPQSLQLPQPQSAVSQAKEIFARNTEMAVTRLETIYKNEAPKPEQQGQDRAINMIITELPKFIEALREVSEKLKANIKSGESENEDIGLLEKIQILHKAYKERDKQSEKAEQ

SEQ ID NO: 48585 - DNA, 582 bp, Unknown
  Obtained from environmental sample
  misc_feature (1)..(582): n is a, c, g, or t
gtgcgcgtggaaggtgattggtcgaacgccgcgttctggctgggcgctggcgctattggctcaggcaatgttacctgcgccggtctggacttacaatcccggcagggcgacagggcgatcctgggtctcctggcgaaattcggcgcaaaggttgaaacgagcgattccgccgtaaccgtgtccggcggaaaactgcggggcattgaaatcaacgcgaaggatattcccgatctcgtaccgatattggccgtaatcgccgccgccgctgaaggaaccaccgttattcgcaatgccgaaaggctgcgtatcaaagaaagcgacaggctcgctgccgtaagcgcggtgttgcgagctttgggcgctgacgtaagcgaaactgaggacgggcttgccatacatgggagcacggctttcaaaagcggggaggtttcttcttacggagatcaccggatcgcgatgtctgcggcagtcgcggcaacggtatgcgctgagccagttgttattcacggcgctgaggcggtcaataaatcctatcccggattttttgatgatatgcgtttactgagcggctcggttctgtaa

SEQ ID NO: 48586 - protein, 193 aa, Unknown
  Obtained from environmental sample
  DOMAIN (1)...(185): EPSP synthase (3-phosphoshikimate 1-carboxyvinyltransferase)
  misc_feature (1)..(193): Xaa is any amino acid
MRVEGDWSNAAFWLGAGAIGSGNVTCAGLDLQSRQGDRAILGLLAKFGAKVETSDSAVTVSGGKLRGIEINAKDIPDLVPILAVIAAAAEGTTVIRNAERLRIKESDRLAAVSAVLRALGADVSETEDGLAIHGSTAFKSGEVSSYGDHRIAMSAAVAATVCAEPVVIHGAEAVNKSYPGFFDDMRLLSGSVL

SEQ ID NO: 48587 - DNA, 1455 bp, Unknown
  Obtained from environmental sample
  misc_feature (1)..(1455): n is a, c, g, or t
gtgaggagaattacgatgtttgatatgaatgcgttagaactttcggttgctataaaggaaaagaaaatcggcgtggtagaagctgttagtgcgtatattgatttaatagaaaaaacagacaagcaattcaacgcctttcttgcgatgtcaaaagacaaagcacttgccaatgcaaaagctgtgcaaacgcgaattgattctggcgaatctctctctccgctcgctggtgtgcctattgccattaaagataacatatcaacaatggggcttgctactacctgtgcatcaaaaatgcttgatggttatactccggtgttcaatgccaccgctgttgaaaaattggaaaacgcaggtatgatagttgtgggcaaactcaatatggacgagtttgcgatgggtggttcaagcgagacgggtgtgtttggccctgttcgcaacccgtgggatgtatcgcgagtttctggcggttcgtccggtggcagcgttgttgctgtgatgagccacgaaattccgctggcactcggctccgacacaggcggcagcatacgccaaccgtgttctttttgcggagctaccggcataaaacccacttatggttctgtgtccagatatgggcttatagcttacgcctcgtcccttgaccaaataggccccatagcgaaaaatacggacgattgcgccgcgctgtatcccgtattttcgggtcccgacgaaaacgacgccacaagccttataaaagagccgtttgattttagcgcgcctaccgcgaaggacgcgcttaaaataggcctgccgcgcaattatttaaccgacggcatacagcaggacgtattaaacgcggttaaaagcgccgcttgtgaatttgaaaaagcgggcttttcggtagaggaatttgatatgccgcttaccgattacgccattcccgcgtattatataatcgcctgcgcggaggcgtcctcaaacctttcccgttacgacggcttaaaatacggttacagaaacgaaaacgcgcaaaccctgcaagaggtttacagaaaatcgcgcagctatggtttcggcatagaggttaagcgccgcataatgctcggttctttcgtgttatcctctggctattacgacgcctactacaaaaaagcccgcgctttccgcgcaatgcttaaagccgcgtataacgaactgtttaagcgtttcgatatgataatcgcgcccgtagcccccacaacggcgtataaaataggcgaaaactcgcaagaccccatgacaatgtatttaggcgacatatacaccgtaagcgtaaatttggccggcattcccgccatagctctgccctgcggaaaagacgcgtctggcctgcccataggttttcagcttattggccccgcgttttcggaaccttcgctgattaacgcggcgcgggtttacgaaagtcttatttggcgggttaatatatcataa

SEQ ID NO: 48588 - protein, 484 aa, Unknown
  Obtained from environmental sample
  DOMAIN (27)...(468): Amidase
  misc_feature (1)..(484): Xaa is any amino acid
MRRITMFDMNALELSVAIKEKKIGVVEAVSAYIDLIEKTDKQFNAFLAMSKDKALANAKAVQTRIDSGESLSPLAGVPIAIKDNISTMGLATTCASKMLDGYTPVFNATAVEKLENAGMIVVGKLNMDEFAMGGSSETGVFGPVRNPWDVSRVSGGSSGGSVVAVMSHEIPLALGSDTGGSIRQPCSFCGATGIKPTYGSVSRYGLIAYASSLDQIGPIAKNTDDCAALYPVFSGPDENDATSLIKEPFDFSAPTAKDALKIGLPRNYLTDGIQQDVLNAVKSAACEFEKAGFSVEEFDMPLTDYAIPAYYIIACAEASSNLSRYDGLKYGYRNENAQTLQEVYRKSRSYGFGIEVKRRIMLGSFVLSSGYYDAYYKKARAFRAMLKAAYNELFKRFDMIIAPVAPTTAYKIGENSQDPMTMYLGDIYTVSVNLAGIPAIALPCGKDASGLPIGFQLIGPAFSEPSLINAARVYESLIWRVNIS

SEQ ID NO: 48589 - DNA, 1038 bp, Unknown
  Obtained from environmental sample
  misc_feature (1)..(1038): n is a, c, g, or t
atgacaggtggtacagtggaaggctaccgtcaggtactgtcgatgtttcgtaaggatgccgaggaacgccttcagaagttaaggttttttatttacgaaagcacggacagcggtaaatttccggaaaaacaccttgcttcgtttataactcaaattcacgcccttagaaccgcgtcagcaactatcggagcgacggaaatatctgacgcggccagtagacttgaagcctcaggcagaaacagggaattttcttttattcaggacaatctgcctgattttacggaacatcttgccgaacttcttaaaaacattcgctccgccctggagttcaagccggataaagcagcggtaaaatccggcggacaaggattcattggacaggtatttggcaaaaagaatgtgtccaatcccttgtcatcaaaggtggattcctccggttatcttccgctctttattaaactggcggaagaattaggatcaaggaatgttactgatgccggacaggttcttgatgagttggataaaaagccgcttgacccaaaaacaaaagaaatcctggaacagatctccgatcaggtattgatgactgaatttgaaagtgcgataaaaacgataaacgggtttattggtttaaacaaatcttccagcctcgaacaagcaaggataattatggaaacaaataaaaaacttatcattctggtggacgataatccgactaatttaagaattggtaaaaatgtactgtcagaaaaatacaccgtagcgacagctccgtccgcacccaagcttttcagtctcctggaaaacaatcatccgggtctgaatattttagatattgatatgccccgaatggacggatacgaagccattaagactttgaaattaaaccgtaataccaaagatattccggttatcttcctgaccggaatgaccgattcccagaacgaagaaaaagggcgtgctctcggagcggtagattacgtcacaaagccgtttgatcctcaggcgcttatcgcctgtattgaaaaatactgctga

SEQ ID NO: 48590 - protein, 345 aa, Unknown
  Obtained from environmental sample
  DOMAIN (229)...(342): Response regulator receiver domain
  misc_feature (1)..(345): Xaa is any amino acid
MTGGTVEGYRQVLSMFRKDAEERLQKLRFFIYESTDSGKFPEKHLASFITQIHALRTASATIGATEISDAASRLEASGRNREFSFIQDNLPDFTEHLAELLKNIRSALEFKPDKAAVKSGGQGFIGQVFGKKNVSNPLSSKVDSSGYLPLFIKLAEELGSRNVTDAGQVLDELDKKPLDPKTKEILEQISDQVLMTEFESAIKTINGFIGLNKSSSLEQARIIMETNKKLIILVDDNPTNLRIGKNVLSEKYTVATAPSAPKLFSLLENNHPGLNILDIDMPRMDGYEAIKTLKLNRNTKDIPVIFLTGMTDSQNEEKGRALGAVDYVTKPFDPQALIACIEKYC

SEQ ID NO: 48591 - DNA, 1128 bp, Unknown
  Obtained from environmental sample
  misc_feature (1)..(1128): n is a, c, g, or t
atgcggttaattctgaataactttcgtcttgttgatgaaaaaacagacgcatcaggcagcataattgtccaagacggaataatttccgatgtacacgccgaaggtccgctgcccgatgaaaaaatcagcggcgcggcgatgatcattgacggcaaaagcctttcagcctccggtgagcttcccgtccttatgcccgcttttgttgatctccacgcgcatttccgtgaccctggccttgacggaaacgtcgaacttccttcagaacttttagagtccgcctgcatatctgccgccgcaggaggttttggcaccgtggtctgcatggcaaatacaaagcctgtcatagatacaattgaaaaagcggcgtcgcttaaaaaacgttcggacactctcggctttatcgatctttttcctgtaatgtcccttacgaaaaggatggaaggcagggagctatcagggatcacgaccattactaanaatgacagttcttgcataccactgatgctttccgaagacggaaaagatgtggccgatgacggtttgttcctcgccgcgatgaaagaggcaaaacggcttgggattccaatttcctgccattgcgatttaggcgggcctgaagcggaagcggcaaaggctgttggcagcccgcgctcgcagtggtcgcgtattgaagaaaataacgctgtacgccgggctatagaacttggaaaagaggctggctgccgtatacatatagcccatgtttcaacaagagaagcggttgaaattatccgaaaaaccaaacaagaagcaaattcaggcggcggtttttgtcttacatgtgaagcgacacctcatcacataggcgcaactgaaacggacgcttcccgcatgggcgatgagagttttggcagggtaaatcccccgctacggacagaggctgaccgtcttgcgcttattgccgcaatcaacgacggtacaatagatgccattgccacagatcatgcgccgcaccgggaaaaggacaaggccgcaggagcgccaggttttagcggtttggaaaccgctttttcggtttgcctttcaaattttaaccctggcgcaatttccgctctgacgagcgcaaacccggcgcggattcttggctaa

SEQ ID NO: 48592 - protein, 375 aa, Unknown
  Obtained from environmental sample
  misc_feature (1)..(375): Xaa is any amino acid
MRLILNNFRLVDEKTDASGSIIVQDGIISDVHAEGPLPDEKISGAAMIIDGKSLSASGELPVLMPAFVDLHAHFRDPGLDGNVELPSELLESACISAAAGGFGTVVCMANTKPVIDTIEKAASLKKRSDTLGFIDLFPVMSLTKRMEGRELSGITTITXNDSSCIPLMLSEDGKDVADDGLFLAAMKEAKRLGIPISCHCDLGGPEAEAAKAVGSPRSQWSRIEENNAVRRAIELGKEAGCRIHIAHVSTREAVEIIRKTKQEANSGGGFCLTCEATPHHIGATETDASRMGDESFGRVNPPLRTEADRLALIAAINDGTIDAIATDHAPHREKDKAAGAPGFSGLETAFSVCLSNFNPGAISALTSANPARILG

SEQ ID NO: 48593 - DNA, 864 bp, Unknown
  Obtained from environmental sample
  misc_feature (1)..(864): n is a, c, g, or t
gtggcgaccgcggtttccggcgtctcgctggttgataccgtcaattttctctttattacggcgtttaacgctctggcgacaggcggctctgtagtcgcgagccagtacatagggcgctcggacggaaagaacgcctgctgttccgcaagacagcttgtttatgtaagcatagtcatttctcttgtaataatgatttttacaatggccgcctgccgccagttcttaaaaattgtttacggaaatatcgcggacgacgtaatgaatgctgctcaaatctacttcatggtaaccgcactttcatatccgtttctcgcgttatacaccgcagccgcggcaattttcaggagcatgggaaattcaaagattacgatgaaggtagctgttttggtaaatatattaaatgtcgcgggaaacgctctttttatttacggaatggggcttggcgtcggaggcgcggcgttatccacttttataggacgcgttatagccgcgtttatattattttactttttaatgggaaaccgtccgcaggcgataaatctgcatggaatatcgaaaattaaatttgaaccggaaatgataaaacgtatcttaaacataggcattcccagcgggcttgaaacatccatgtttcaggttgggaaaattctggttacaagaatatttacggtattcgggacggccgctattgcggctaacgctgtttcgggaacaattaattccataggatttatgcccggcagcggctacggcatgggacttttagtcatagcggggcagtatataggcgcgggcgattataacgaagccaaaaggtacacaaggaaaataatgatcattgcctatattacatatttggtataa

SEQ ID NO: 48594 - protein, 287 aa, Unknown
  Obtained from environmental sample
  SIGNAL (1)...(26)
  DOMAIN (1)...(140): MatE
  misc_feature (1)..(287): Xaa is any amino acid
MATAVSGVSLVDTVNFLFITAFNALATGGSVVASQYIGRSDGKNACCSARQLVYVSIVISLVIMIFTMAACRQFLKIVYGNIADDVMNAAQIYFMVTALSYPFLALYTAAAAIFRSMGNSKITMKVAVLVNILNVAGNALFIYGMGLGVGGAALSTFIGRVIAAFILFYFLMGNRPQAINLHGISKIKFEPEMIKRILNIGIPSGLETSMFQVGKILVTRIFTVFGTAAIAANAVSGTINSIGFMPGSGYGMGLLVIAGQYIGAGDYNEAKRYTRKIMIIAYITYLV

SEQ ID NO: 48595 - DNA, 339 bp, Unknown
  Obtained from environmental sample
  misc_feature (1)..(339): n is a, c, g, or t
atggatcaaattgcagccttttttaaactatcgccggaggcgcacgatatgtgcctgacattccttaagattcactgtattacgtcaacattattctggtgcttctcatttgtgcttcccaacgcgctgaaagccgccggagacgcccgttatgtgatgattgtagccgccagcaccatgtggcttgtcagggtatgttccgcctacatcatggcgttccctctcggcctcggccctgtgggggttatcctcgcgatgggcgcggattttctgttcagaggaatcttcttcggcgcccgctggttcagcggtaaatggatggaaaagagagtaatatag

SEQ ID NO: 48596 - protein, 112 aa, Unknown
  Obtained from environmental sample
  misc_feature (1)..(112): Xaa is any amino acid
MDQIAAFFKLSPEAHDMCLTFLKIHCITSTLFWCFSFVLPNALKAAGDARYVMIVAASTMWLVRVCSAYIMAFPLGLGPVGVILAMGADFLFRGIFFGARWFSGKWMEKRVI

SEQ ID NO: 48597 - DNA, 762 bp, Unknown
  Obtained from environmental sample
  misc_feature (1)..(762): n is a, c, g, or t
atgctgaattccatacttgatattctggaaagaaaagccgcagaggggcttgatgtcagaataatgtacgatgatttaggatgtatttttaccctgccggaaaattatcataaaacgctggagcgaatgggaattaaatgttttgtgtttaatccgttcaggcctattgttacgtcattgcagaacaacagggaccacagaaaaataatttccatagacggaaggatagtgttcacgggaggccttaatcttgcggatgaatatataaatattgtggatcgcttcggccactggaaagacgcggcgataatgcttgagggagacggagcgtgggcatttacgctgatttttctgcagatgtggaacctgaagcccggagacaaggacaattacgaggcatttttcccgtggaaagacaacattattgaacatacggaaaaaggcgtcgccgaaggttatgaaaaatggggatatgtccagccgtacgccgacagtccaattgaccatgaatttgtaggcgagcatgtatatatcaagataattaatcaggcaaaaaagtatgtttacataaatacgccgtatcttatagttgacgacaatttgctctccgccctgacaaccgccgcgaanagcggagttgacgtgcggattattactcctcacagatgggacaaatggatagtggcgattacatcccgttcatattaccgcangctcattcacgccggcgttaaagtttacgaatatacatccgggttttaa

SEQ ID NO: 48598 - protein, 253 aa, Unknown
  Obtained from environmental sample
  DOMAIN (61)...(88): Phospholipase D Active site motif
  misc_feature (1)..(253): Xaa is any amino acid
MLNSILDILERKAAEGLDVRIMYDDLGCIFTLPENYHKTLERMGIKCFVFNPFRPIVTSLQNNRDHRKIISIDGRIVFTGGLNLADEYINIVDRFGHWKDAAIMLEGDGAWAFTLIFLQMWNLKPGDKDNYEAFFPWKDNIIEHTEKGVAEGYEKWGYVQPYADSPIDHEFVGEHVYIKIINQAKKYVYINTPYLIVDDNLLSALTTAAXSGVDVRIITPHRWDKWIVAITSRSYYRXLIHAGVKVYEYTSGF

SEQ ID NO: 48599 - DNA, 510 bp, Unknown
  Obtained from environmental sample
  misc_feature (1)..(510): n is a, c, g, or t
atgaaaagcgacgaggagcttgccattctctgcctgccctccgccgtagaagcgggtcttttcggcacaaaaggggccgacccctcgccggatcagaaaaaaaccttcattagcgccatgccccttattcgcgagcgccttgtctttacccatgaagccccggaaaagctcgcctatttattcgcgcctcccgcgctgcccgcgcaggaagaatttatccccaaaaaggccaatcttaccgaagcaatcaggcttttacggctggcgcgggatatggttaaccagctttcaaacgcggttaacgacgctgcggctgaggcttacatcaaggaacaggccgaaaaagccgcggtcaagctgggcgatttgatgatgcccctgcgtgtcgccatcacaggaagccgcgtcagccccccccttttcggctcgcttcgtattttaggcgcgcaagagtcactggcgcgtgtggataaggctttggaacagttaacagtgagcagtgagcagtga

SEQ ID NO: 48600 - protein, 169 aa, Unknown
  Obtained from environmental sample
  misc_feature (1)..(169): Xaa is any amino acid
MKSDEELAILCLPSAVEAGLFGTKGADPSPDQKKTFISAMPLIRERLVFTHEAPEKLAYLFAPPALPAQEEFIPKKANLTEAIRLLRLARDMVNQLSNAVNDAAAEAYIKEQAEKAAVKLGDLMMPLRVAITGSRVSPPLFGSLRILGAQESLARVDKALEQLTVSSEQ

SEQ ID NO: 48601 - DNA, 357 bp, Unknown
  Obtained from environmental sample
  misc_feature (1)..(357): n is a, c, g, or t
ttgaaacataaaatcagacgggaaacggccaatattacgttttacagcctgattcattactttcaattcgacttcatacaaagagaaaaaaatgaaaaaaaagggaaaaagtttagacaaactttgctcactgctcactgctcactgctcactgctcactgctcactgctcactgctcactgctcactgctcactgctcactgctcactgctcactgctcactgctcactgctcactgctcactgctcactgctcactgctcactgctcactgttaactgttccaaagccttatccacacgcgccagtgactcttgcgcgcctaaaatacgaagcgagccgaaaaggggggggctga

SEQ ID NO: 48602 - protein, 118 aa, Unknown
  Obtained from environmental sample
  misc_feature (1)..(118): Xaa is any amino acid
MKHKIRRETANITFYSLIHYFQFDFIQREKNEKKGKKFRQTLLTAHCSLLTAHCSLLTAHCSLLTAHCSLLTAHCSLLTAHCSLLTAHCSLLTVPKPYPHAPVTLARLKYEASRKGGG

SEQ ID NO: 48603 - DNA, 492 bp, Unknown
  Obtained from environmental sample
  misc_feature (1)..(492): n is a, c, g, or t
gtgagcagtgagcaaagtttgtctaaactttttcccttttttttcatttttttctctttgtatgaagtcgaattgaaagtaatgaatcaggctgtaaaacgtaatattggccgtttcccgtctgattttatgtttcaattgaccgatacagaatggacaaatctaaggtcacaaattgtgacctttagcaacgacaccagaaaatacaagccttacgccttcactgaacatggaattttaatgctttcaagtgttttgaactctgaaaaagctattaaaataaatattcaagtaatgaggatatttgtgcaaatgcgtcattatgcgctttctcacaacgcgacaaacgaacaaattgccgaactgcgtaaactcctcatgctttatatcgaaaagaacgataaacgggtaaatgagattattttagtcctgaacaacctcatagaaaaaccgccagaaaccaagaggataggctttaatactgaaaattaa

SEQ ID NO: 48604 - protein, 163 aa, Unknown
  Obtained from environmental sample
  misc_feature (1)..(163): Xaa is any amino acid
MSSEQSLSKLFPFFFIFFSLYEVELKVMNQAVKRNIGRFPSDFMFQLTDTEWTNLRSQIVTFSNDTRKYKPYAFTEHGILMLSSVLNSEKAIKINIQVMRIFVQMRHYALSHNATNEQIAELRKLLMLYIEKNDKRVNEIILVLNNLIEKPPETKRIGFNTEN

SEQ ID NO: 48605 - DNA, 987 bp, Unknown
  Obtained from environmental sample
  misc_feature (1)..(987): n is a, c, g, or t
gtgattcgaaacttattccgcgatttaaggcttgagaatgtcgccgtgttcatcctttccgcggacaattcctacaccgagcttggcggaggttttgcccaggagatgtggaagggccttgtgctttccgattacctcaaggacatacagtgcgcgctcaaggcctgcgccgttgatccgaaaaaagcgcaggctgaatttgaacattcgtggcgcagggtcatgcacgcggtggagcacaatcccaaatacctgtggaaggaattaaaacatgtcgctaatgatgttaagaagattcccttaaagcgaaaagtcgttgagtgcccccgcgttcttgtcgtgggcgagatttacgtgcgccgcgatgattttgccgtgggcgagctgaccgatctgatgagcgagaggggaatagtggtaaaggtcgctggcatttccgagtggatacactacctggattttgtgcgtgaatacgcccttaacaaattgatcaaactgcaaaagcccggcaagcggcttttctccaaaccctggaaggacctgaaaaaacttcagatagaggaatggtggaagcactcggtggaaaaaaaggtgctttccattctgctgcccacgggccttatcccggaaacgccccacgacatgcgcgagatcatgaagtacacgcaggagcattttgtcaacctggagcttaattcggagatagccgtctcctcaggctccgcggccgcggcgatggacgcgggctattccggcatcgtgaacatcagccccttcgcctgccttataggccgtgtcatcgagggcctgtttaccccctgggcgcgggaacgcaactacccgatcctttcggtggaggtagacggcaacctgctgccgccgaatattgttaataagcttaacatttttatggtaaatgtgctgcggtttaaggggggaaatgacctgtcgtcgctggtggataaagcaaagaacaatgaacaataa

SEQ ID NO: 48606 - protein, 328 aa, Unknown
  Obtained from environmental sample
  misc_feature (1)..(328): Xaa is any amino acid
MIRNLFRDLRLENVAVFILSADNSYTELGGGFAQEMWKGLVLSDYLKDIQCALKACAVDPKKAQAEFEHSWRRVMHAVEHNPKYLWKELKHVANDVKKIPLKRKVVECPRVLVVGEIYVRRDDFAVGELTDLMSERGIVVKVAGISEWIHYLDFVREYALNKLIKLQKPGKRLFSKPWKDLKKLQIEEWWKHSVEKKVLSILLPTGLIPETPHDMREIMKYTQEHFVNLELNSEIAVSSGSAAAAMDAGYSGIVNISPFACLIGRVIEGLFTPWARERNYPILSVEVDGNLLPPNIVNKLNIFMVNVLRFKGGNDLSSLVDKAKNNEQ

SEQ ID NO: 48607 - DNA, 759 bp, Unknown
  Obtained from environmental sample
  misc_feature (1)..(759): n is a, c, g, or t
atgagaaaacgcagccctcatcaggaggacaggcgtttcatccaggatattgaggctcttgccctggggaagtcggcaaaaagccgtaccatgaaggaaatcggcctgggagaaacccccgaggaagcccacgccctgctccttgaatgcggtttctggaacgagcaaaacaacccccaccccgcaaggttcggcgttgttctccagcctgcggaacacaagcccgaagcgcctccgccagaagagcgacgcgacctaacccatttaggcgcctatgcgattgacagcccctggagcaatgatcccgacgatgccgtttccattgagattgaagacggcgtgccttctttcgaaggcaggcagaccctctatgtccatgtcgccgatcccgccgcctcaatcgggacggacagtcccgttgaaaaagaggcccgcgaccgcggggcgacgctttatatccccgaaggcagtatccgcatgctcgccgatgatagtctgtcgtttttcgccctcggccttgccgaaacgtcccccgcccttactttcaaaatgacgcttaacaacaccggcgaaattgaaaaaaccgaaattttcccttcaacagtaaaagttacgcgcttaacctacaaagaggcggatgagtatttaagtaatacacatggcaatacacatagcgatacacattcgactttacaatcacttaacgtattggctgacgcaacctcagcggcgtgttgcgttaggcgccatcattattga

SEQ ID NO: 48608 - protein, 252 aa, Unknown
  Obtained from environmental sample
  DOMAIN (84)...(250): RNB-like protein
  misc_feature (1)..(252): Xaa is any amino acid
MRKRSPHQEDRRFIQDIEALALGKSAKSRTMKEIGLGETPEEAHALLLECGFWNEQNNPHPARFGVVLQPAEHKPEAPPPEERRDLTHLGAYAIDSPWSNDPDDAVSIEIEDGVPSFEGRQTLYVHVADPAASIGTDSPVEKEARDRGATLYIPEGSIRMLADDSLSFFALGLAETSPALTFKMTLNNTGEIEKTEIFPSTVKVTRLTYKEADEYLSNTHGNTHSDTHSTLQSLNVLADATSAACCVRRHHY

SEQ ID NO: 48609 - DNA, 711 bp, Unknown
  Obtained from environmental sample
  misc_feature (1)..(711): n is a, c, g, or t
atggcaatacacatagcgatacacattcgactttacaatcacttaacgtattggctgacgcaacctcagcggcgtgttgcgttaggcgccatcattattgatatgccggaaacccatatcagcctgaacgatggtcaagtggaaattgaactgataacgcggtacaagtcggcggacatggtacgcgaatgtatgctccttgccggcgagggcgcgggattatggtgtttgcaccgcaatctgcccgttccctacatcatgcaggaaattggggatttgcccgatgaaacgcttgagggcatggccggctattaccagcttcgccgctgcatgaggccccgcgccctttcaacaaggcccgggcagcactcaggccttggccttgacacttatatccaggtaaccagtcccctgcgccgttataccgaccttcttgcccacttgcagatccgcgcggttttacggggcgaaccacctctaagcgccgatgaaatctccgccagaatgaacgccggggaagcggctatatccgctgtcaatcagggcggaacgcgcctcccgcggcccattggactatggtgtaccttgcaggtaagaaggactctgtctgggacgcaatcgcccttgaaaaaaaggcaatcgctgggtagtaataattccgtctctcgccctggaaacactggttcccccgagaaaagagttgtcgcctaa

SEQ ID NO: 48610 - protein, 236 aa, Unknown
  Obtained from environmental sample
  misc_feature (1)..(236): Xaa is any amino acid
MAIHIAIHIRLYNHLTYWLTQPQRRVALGAIIIDMPETHISLNDGQVEIELITRYKSADMVRECMLLAGEGAGLWCLHRNLPVPYIMQEIGDLPDETLEGMAGYYQLRRCMRPRALSTRPGQHSGLGLDTYIQVTSPLRRYTDLLAHLQIRAVLRGEPPLSADEISARMNAGEAAISAVNQGGTRLPRPIGLWCTLQVRRTLSGTQSPLKKRQSLGSNNSVSRPGNTGSPEKRVVA

SEQ ID NO: 48611 - DNA, 543 bp, Unknown
  Obtained from environmental sample
  misc_feature (1)..(543): n is a, c, g, or t
gtggattctaaattcccgctggagagttttcaaaggcttattgaggcgaacaacgacgaggataaaaaacgttttaaaagagaatttatttccaccgtcaagaagcgtatagatgaaatccagaccaaatacatcaaccccgcggaaaaaacctttgacttcgccttgatgtatatcccagcggaaaatgttttttatgagataattattaatgattcgctgaccaacaaggaatacgagcttttgaattacgcgatggaaaagcacgttatacctgtttcgcccaacagtttctacgcctatctcaaggctctggtttttggtttacaggggcttcagatagagcaggaagccaaagccatacgcggcgaactgggccaggtacaaaacatgctgggtaaattcagcgtcgaatacggccaggtagggaagcacctctccaacgccatcggcaaatacaacgattccgaaaaaagcgtcgaaaaattaaacgatcgcctgaacagaatcacgaggcagaaagcagagctactcggcggctga

SEQ ID NO: 48612 - protein, 180 aa, Unknown
  Obtained from environmental sample
  DOMAIN (1)...(180): RmuC family
  misc_feature (1)..(180): Xaa is any amino acid
MDSKFPLESFQRLIEANNDEDKKRFKREFISTVKKRIDEIQTKYINPAEKTFDFALMYIPAENVFYEIIINDSLTNKEYELLNYAMEKHVIPVSPNSFYAYLKALVFGLQGLQIEQEAKAIRGELGQVQNMLGKFSVEYGQVGKHLSNAIGKYNDSEKSVEKLNDRLNRITRQKAELLGG

SEQ ID NO: 48613 - DNA, 924 bp, Unknown
  Obtained from environmental sample
  misc_feature (1)..(924): n is a, c, g, or t
atggacagcggcacgagcggattggcattcgacgacaacggcaagggcggcggtatcggcggcggcggggggcagaagcctcctttgcggcgtcctgacggcggtaacgctgataagcgggcgccggcgggggggcggtctgttttggtgtggttgctcatcatcgcggcggtgtttttcgggctgcgctcaatggagactttcgggtcgcagcgcgaggtgcggctgacctacacgcagtttttggagcttttgggctccgccgggggcggggcgggggtcgtggaggcggtggtgatgcagcgcagcgacgggcgcgcggtgctgcggggcagggtgggcaatccggctgcgctcgcggtggcggcgtccgcctctcgcggggcggcggggtcgggggcgcccagttcgcacttcgtcgtgaatttgccgtttctggactcggagatgctgcgcgtttgggacgcggcggggttcccgtatacgtttgagcaggagaagatctgggggaacgtgctcgtccagatagcgattatcgtggcggtgtcgatctttttctacttcctcttcatacgcaacatgcagtcggcgcagcgcgggatgttctctttcggcaagagccgcgccaagctgcacaacatcgacaggccgcaggtgaccttcaacgacgcggcgggggtggaagaggcgaaggcggagctggcggaagttatagactttcttaaggatcctaaaaagttcaaaaagctgggcgggaagataccaaaaggggtgctgctcttggggcctccgggggaccggaaagacgcttttggcgcgttccgtcgccggagaggcgggggtggctttctttcatatgtccggctcggactttgtggaaatgtttgtaggcgtcggggcaagccgcgtaagggatctttttga

SEQ ID NO: 48614 - protein, 307 aa, Unknown
  Obtained from environmental sample
  DOMAIN (74)...(231): FtsH Extracellular
  misc_feature (1)..(307): Xaa is any amino acid
MDSGTSGLAFDDNGKGGGIGGGGGQKPPLRRPDGGNADKRAPAGGRSVLVWLLIIAAVFFGLRSMETFGSQREVRLTYTQFLELLGSAGGGAGVVEAVVMQRSDGRAVLRGRVGNPAALAVAASASRGAAGSGAPSSHFVVNLPFLDSEMLRVWDAAGFPYTFEQEKIWGNVLVQIAIIVAVSIFFYFLFIRNMQSAQRGMFSFGKSRAKLHNIDRPQVTFNDAAGVEEAKAELAEVIDFLKDPKKFKKLGGKIPKGVLLLGPPGDRKDAFGAFRRRRGGGGFLSYVRLGLCGNVCRRRGKPRKGSF

SEQ ID NO: 48615 - DNA, 390 bp, Unknown
  Obtained from environmental sample
  misc_feature (1)..(390): n is a, c, g, or t
atggggcgttttttcttccctgttcaaaaagatcccttacgcggcttgccccgacgcctacaaacatttccacaaagtccgagccggacatatgaaagaaagccacccccgcctctccggcgacggaacgcgccaaaagcgtctttccggtcccccggaggccccaagagcagcaccccttttggtatcttcccgcccagctttttgaactttttaggatccttaagaaagtctataacttccgccagctccgccttcgcctcttccacccccgccgcgtcgttgaaggtcacctgcggcctgtcgatgttgtgcagcttggcgcggctcttgccgaaagagaacatcccgcgctgcgccgactgcatgttgcgtatgaagaggaagtag

SEQ ID NO: 48616 - protein, 129 aa, Unknown
  Obtained from environmental sample
  misc_feature (1)..(129): Xaa is any amino acid
MGRFFFPVQKDPLRGLPRRLQTFPQSPSRTYERKPPPPLRRRNAPKASFRSPGGPKSSTPFGIFPPSFLNFLGSLRKSITSASSAFASSTPAASLKVTCGLSMLCSLARLLPKENIPRCADCMLRMKRK

SEQ ID NO: 48617 - DNA, 1290 bp, Unknown
  Obtained from environmental sample
  misc_feature (1)..(1290): n is a, c, g, or t
gtgccaagagaggaaggaccgatagaaagaccgatagaaacttacaacctgaacgccaaagatataaacagagttttgcagaacgttgcaggcttgcaaaccagtggtaaaaccgaacttggcggccgacgtggctctgcagacggcggcttcaacgatggctacgcagaaggcggttctggaggccttgacggtatgctcggcggtttaatgggtggcagtggagcaagaagagaagcaccgtcacgtagtggtaataggaagaaggagggtgcgggcggaaaaccaagaggaaaggggcaatatatgccagaaggggaacgaggtgagttacgtatgctcactgccagaactaaggaaggtgaacaacctactattactattaaatccattaaaaaagataatgagtatttgagtaaattgacaggagatgtaacggaagattatcaaatatatttgaaattgagaactgattatgccaattcgccaactttttattttgatatggcagactggttttacaaaaacaacgacagagaaaccgctcttcgcatactcacgtccattgccgatttggagttagagaacgcttcgctttataaattgctcggctataggtttaaagaataccgcgaacacgtgcttgaaaaatttgtttaccaaaaggtaattcagtggcggccaatggaaccgcaaagctaccgcgactacgctttagcccttgccgaaaacggagagatgcaggcggcactggattcgctatattcattgctcctaaggccatattcggaaagcatcgctaggagtagcagaggaatagaggaagttgtggttatggaaataaacaatttgattgccaaaaacgcaaaactgaatacatcaaatatagacaaacgcctgataatgaacattcccattgatattcgcgtggttataaactggaatatgaacaacaccgatattgacctgtacgttaaagacccaaacggcgaaatatgctcttacagccgccgcaaaacgggcataggtgggcgcataagcacagataatacaggtggctacggacctgagcaattccttttgaaaagggcgataaagggaaaatatcagatttatgtggattactatggcgaccgccaatttaccgcggctggcccatctaccattatggcggaaattttcacaaaatactccgacaaaaccgagcaacgccaaattgtatctctgcaaatgtctaaggcgactaaaaaagaagataaaaaagttgaggtagctgaatttgcgttttaa

SEQ ID NO: 48618 - protein, 429 aa, Unknown
  Obtained from environmental sample
  misc_feature (1)..(429): Xaa is any amino acid
MPREEGPIERPIETYNLNAKDINRVLQNVAGLQTSGKTELGGRRGSADGGFNDGYAEGGSGGLDGMLGGLMGGSGARREAPSRSGNRKKEGAGGKPRGKGQYMPEGERGELRMLTARTKEGEQPTITIKSIKKDNEYLSKLTGDVTEDYQIYLKLRTDYANSPTFYFDMADWFYKNNDRETALRILTSIADLELENASLYKLLGYRFKEYREHVLEKFVYQKVIQWRPMEPQSYRDYALALAENGEMQAALDSLYSLLLRPYSESIARSSRGIEEVVVMEINNLIAKNAKLNTSNIDKRLIMNIPIDIRVVINWNMNNTDIDLYVKDPNGEICSYSRRKTGIGGRISTDNTGGYGPEQFLLKRAIKGKYQIYVDYYGDRQFTAAGPSTIMAEIFTKYSDKTEQRQIVSLQMSKATKKEDKKVEVAEFAF

SEQ ID NO: 48619 - DNA, 591 bp, Unknown
  Obtained from environmental sample
  misc_feature (1)..(591): n is a, c, g, or t
ttggcggaatactcaggcgttcccgtttataacggactgacagacctgtaccacccgactcaagtattggcggattttttaactttgcaggaaaatttcggcgaggtaaaagggcggactctttgctatgcaggcgacgggcgcaacaatgtcgcaagatcattaatgataatctgcgccaaactgggaacaaattttacgattattacgccgcctgagcttaacgccgacagcgagcttttgaaaaagtgcaatacattagccgaaacatcgggtgctgttataaaagttacttccgatatttccgctgttctgggagcggacgctttatacaccgatgtatgggcgtctatgggcgaagaagctcaaaaagaagaacgggtaaagcttttaagtccgtatcaggtaaatcaaaaattgatgaatatgacgggcaagagttctacgattttccttcactgtctgcccgctgttaagggcgaagaagttacggctgaggtaatcgaaggaccgcaaagcaaagcgtgggatcaggctgaaaaccgcaaacatacaataaaagcggtaatgcttgcgactctggtaaaataa

SEQ ID NO: 48620 - protein, 196 aa, Unknown
  Obtained from environmental sample
  DOMAIN (36)...(193): Aspartate/ornithine carbamoyltransferase, Asp/Orn binding domain
  misc_feature (1)..(196): Xaa is any amino acid
MAEYSGVPVYNGLTDLYHPTQVLADFLTLQENFGEVKGRTLCYAGDGRNNVARSLMIICAKLGTNFTIITPPELNADSELLKKCNTLAETSGAVIKVTSDISAVLGADALYTDVWASMGEEAQKEERVKLLSPYQVNQKLMNMTGKSSTIFLHCLPAVKGEEVTAEVIEGPQSKAWDQAENRKHTIKAVMLATLVK

SEQ ID NO: 48621 - DNA, 465 bp, Unknown
  Obtained from environmental sample
  misc_feature (1)..(465): n is a, c, g, or t
atgacagaagcgtctttgagaatttatactgacggcggatgttcgggcaaccccggtcccggaggctgggcgtatgttatggtacagcaaacttttcagggcggacaggtgctcgcaaaaaacaaaggttctgaaaaagacactaccaacaacagaatggaattaacagccgttatcatggcgttacgcgcacttaaaaccatgaaagacgcgccgcatcaggcggcggtaattacagactctcagtatgtgcaaaaaggcattacagattggatacgcaactggaaacgcaacgcatggagaaccgccgacaaaaaacccgtaaaaaatcaggacttatggatggaacttgattctctagccggcgaatttcctcttaaatgggaatgggtaaaggggcacgcaggcaacgaatataatgaaatgtgcgacgctatgactcaggaagcgattgcgcttgtttaa

SEQ ID NO: 48622 - protein, 154 aa, Unknown
  Obtained from environmental sample
  DOMAIN (3)...(152): RNase H
  misc_feature (1)..(154): Xaa is any amino acid
MTEASLRIYTDGGCSGNPGPGGWAYVMVQQTFQGGQVLAKNKGSEKDTTNNRMELTAVIMALRALKTMKDAPHQAAVITDSQYVQKGITDWIRNWKRNAWRTADKKPVKNQDLWMELDSLAGEFPLKWEWVKGHAGNEYNEMCDAMTQEAIALV

SEQ ID NO: 48623 - DNA, 900 bp, Unknown
  Obtained from environmental sample
  misc_feature (1)..(900): n is a, c, g, or t
atgttcctctacccagtcctccatgtacataagcggcgcctcgccgcctataaggtacgcacagagcatccgtctgctcgacggctatcgccgtctgttcctcaagctcgcgggtacgttcctttaccgtcgtttccaatacggcgttggactgttccaactgcccgtacattgttgaatgaagaaaattaccgcaaagtacaggaacggctgacaggtaacggaatgaggaaaggttttgcctgccttttctccggcgcaccgggaaccggtaaaacggagactgcctatcagattgcccgcgaaaccggacgcaacataatgatggtggacatagccgatacaaaaagctgctggtttggcgaaagcgaaaaaaagataaaggaagttttcaatacttacaggtatgcggttgagaattcggaaatcgctccaattctgctgctaaatgaggcagacgcggtaataggaaagcggaaagagtttaacagctcaagccgggcgatagatcaaaccgaaaataccatccagaacatcatcctgcaagaaatggaaaatctttcgggcattctgatagccaccaccaacctgacccaaaacatggacaaagcctttgaacggcgctttctttacaagatagagtttacaaggccaagccttgccgcccggcaatccatctggcagagcatgattcagtcgcttcccgctgccgaagccgagaccctcgcttcccgctttgacttatccggcggccagattgaaaacatcgcccgcaaagccgaagtagacacgataattaacggaagggagccttcgatggatattttggcgcaatactgcaaagatgaaaaccagaacaaccataacagtgaaaaaaggatagggtttgaaaatgcatga

SEQ ID NO: 48624 - protein, 299 aa, Unknown
  Obtained from environmental sample
  DOMAIN (81)...(266): ATPase family associated with various cellular activities (AAA)
  misc_feature (1)..(299): Xaa is any amino acid
MFLYPVLHVHKRRLAAYKVRTEHPSARRLSPSVPQARGYVPLPSFPIRRWTVPTARTLLNEENYRKVQERLTGNGMRKGFACLFSGAPGTGKTETAYQIARETGRNIMMVDIADTKSCWFGESEKKIKEVFNTYRYAVENSEIAPILLLNEADAVIGKRKEFNSSSRAIDQTENTIQNIILQEMENLSGILIATTNLTQNMDKAFERRFLYKIEFTRPSLAARQSIWQSMIQSLPAAEAETLASRFDLSGGQIENIARKAEVDTIINGREPSMDILAQYCKDENQNNHNSEKRIGFENA

SEQ ID NO: 48625 - DNA, 591 bp, Unknown
  Obtained from environmental sample
  misc_feature (1)..(591): n is a, c, g, or t
atgaagatccggatctggcggccagccgctttcgacaaggctcctgcgaacgatgccgtcgcccagatgggcaagggcattctggccgcccggcgcaaccgcgtgccggaagcggaggatgcgttcaataaagccctggctctcgcgccccatgacgccctgatctggcgcgaaacaggccggttctattacgccacgggcgacaagcgggcggcccagacactgcgcgcggcgctcgatcgcgattccagggacatcatgacccaatttttctacgcacgcacgctcgacgcctccggcaacaaaggcgaagcgcaggagtactacgccaaaatgctgcaagccgtgccggaagacagtgaagttcactacgtatacggccgctctctcggggaatcgggccggaattttccggcctatctgcatctgacctacagcgcggtgtacgaaaacaatgcgcgcaaggccaggggcatgctcaagcaggcgcgcgccgccgcgcgtacgccggaggacaaggccgccctcgcgcgccttgaaggcgtcatcagggagcgcagcgaatactggtctgataaagaaatgctgtga

SEQ ID NO: 48626 - protein, 196 aa, Unknown
  Obtained from environmental sample
  DOMAIN (19)...(52): Tetratricopeptide repeat
  misc_feature (1)..(196): Xaa is any amino acid
MKIRIWRPAAFDKAPANDAVAQMGKGILAARRNRVPEAEDAFNKALALAPHDALIWRETGRFYYATGDKRAAQTLRAALDRDSRDIMTQFFYARTLDASGNKGEAQEYYAKMLQAVPEDSEVHYVYGRSLGESGRNFPAYLHLTYSAVYENNARKARGMLKQARAAARTPEDKAALARLEGVIRERSEYWSDKEML

SEQ ID NO: 48627 - DNA, 1545 bp, Unknown
  Obtained from environmental sample
  misc_feature (1)..(1545): n is a, c, g, or t
atggacgaggataaatatttcatcgctcaggcttcggcaaaggtaaatgacaacggctccttcgccgaagatcaaatttcctgtcgaaaacagggcgactacattacccgcgcacctgaagatattcaatacatggacgtttcccccaaacagatcatttccgtttccgcctcgcttattccgttccttgaacacgatgacgcaaaccgcgcgttaatgggctccaatatgcagcgtcaggccgtgccgctggttttcccggaagcgccgagggtaggtacgggaatggaagggaagtgcgcctacgattcgggcgttcttgtaaaagcgcggaggggcggcacaattattcgcgtaacatcgcaggaagtaatcgtaaaaccggacagggcgggaaatgtaaaacccgcggctcaagtttcgttagacgataacggcaacgatgtttatcagcttattaaattccaaagaaccaatcaggatacttgttacaaccagcgccccattgttaaattgggcgataaaattgtcagcggacaggtaatcgcggacggacctgctacccataacggggagcttgcacttggaagaaatattcttgtaggttttatgccgtggaacggctacaactatgaagactcgatccttatctcacagcgcgtggtaaaggacgatatgttcacttccattcacatcaaggaatttattgtcgaaataagggaaacaaaactggggcctgaaaaaattactcgcgacattcccaatacttcggaaaaaagtcttgacaatcttgacgaggagggaattatccgcgtcggcgccaaggtgcgctcgggagatatactggttggtaaagttacgccgaagagcgagactgataccactcctgaatttaaattgctcaattcaatcttcggtgagaaagcaaaagaagtgcgcgatacttcgcttaaagttccgcatggaaacgacggaaccgttatcgacattcagaggctcaaaagaaccgatcatgactctttaagtcccggcgttgatgaagtggtaaaagtgttaatcgccacaaagcgcaaactgcgcgagggcgacaaaatggccggccgccacggtaacaaaggcgttgtcgcccgtatcttacccgaggaagatatgccgtttatggaagacggaaccccgttggatatttgcctaacgccacttggcgttccttcgcgtatgaatatcggacagcttttggagactgagcttggttgggcgggttctactttagacgaatggtattcaacacccgttttccagtcgccgtctaccgatcaaatagaggtaaaacttaaagaagccgatcttcctataaccagtaaagcggtcttaaaagacggaaaaacaggcgaagaatttgttaaccctattttctgcggaataatctacttccttaactgcaccaccttgtcgatgacaagatgcacgcgcgttccacaggtccgtactcgcttgttacgcagcagccgttgggcggaaaagcgcagtttggcggacagcggttag

SEQ ID NO: 48628 - protein, 514 aa, Unknown
  Obtained from environmental sample
  DOMAIN (107)...(478): RNA polymerase Rpb2, domain 6
  misc_feature (1)..(514): Xaa is any amino acid
MDEDKYFIAQASAKVNDNGSFAEDQISCRKQGDYITRAPEDIQYMDVSPKQIISVSASLIPFLEHDDANRALMGSNMQRQAVPLVFPEAPRVGTGMEGKCAYDSGVLVKARRGGTIIRVTSQEVIVKPDRAGNVKPAAQVSLDDNGNDVYQLIKFQRTNQDTCYNQRPIVKLGDKIVSGQVIADGPATHNGELALGRNILVGFMPWNGYNYEDSILISQRVVKDDMFTSIHIKEFIVEIRETKLGPEKITRDIPNTSEKSLDNLDEEGIIRVGAKVRSGDILVGKVTPKSETDTTPEFKLLNSIFGEKAKEVRDTSLKVPHGNDGTVIDIQRLKRTDHDSLSPGVDEVVKVLIATKRKLREGDKMAGRHGNKGVVARILPEEDMPFMEDGTPLDICLTPLGVPSRMNIGQLLETELGWAGSTLDEWYSTPVFQSPSTDQIEVKLKEADLPITSKAVLKDGKTGEEFVNPIFCGIIYFLNCTTLSMTRCTRVPQVRTRLLRSSRWAEKRSLADSG

SEQ ID NO: 48629 - DNA, 300 bp, Unknown
  Obtained from environmental sample
  misc_feature (1)..(300): n is a, c, g, or t
atgtcgataacggttccgtcgtttccatgcggaactttaagcgaagtatcgcgcacttcttttgctttctcaccgaagattgaattgagcaatttaaattcaggagtggtatcagtctcgctcttcggcgtaactttaccaaccagtatatctcccgagcgcaccttggcgccgacgcggataattccctcctcgtcaagattgtcaagacttttttccgaagtattgggaatgtcgcgagtaattttttcaggccccagttttgtttcccttatttcgacaataaattccttgatgtga

SEQ ID NO: 48630 - protein, 99 aa, Unknown
  Obtained from environmental sample
  misc_feature (1)..(99): Xaa is any amino acid
MSITVPSFPCGTLSEVSRTSFAFSPKIELSNLNSGVVSVSLFGVTLPTSISPERTLAPTRIIPSSSRLSRLFSEVLGMSRVIFSGPSFVSLISTINSLM

SEQ ID NO: 48631 - DNA, 369 bp, Unknown
  Obtained from environmental sample
  misc_feature (1)..(369): n is a, c, g, or t
atgcacgcgcgttccacaggtccgtactcgcttgttacgcagcagccgttgggcggaaaagcgcagtttggcggacagcggttaggtgaaatggaagtatgggcgcttgaagcttacggggcggcaaatacgcttcaggaacttttaacgattaaatcggacgatatgaccgggcgttcaaaaatttacgaggcgattgtaaagggagagccttcgacaacggcgggtattccagaatcatttaacgtacttgttcaggaattgcgcggtcttgcgttggatctgtcaatctttgacgtaaaaggaacacaaatagggctcaccgaaaaagatgaggacttgataaacaagtcaaagagtaatttctaa

SEQ ID NO: 48632 - protein, 122 aa, Unknown
  Obtained from environmental sample
  DOMAIN (24)...(100): RNA polymerase Rpb2, domain 7
  misc_feature (1)..(122): Xaa is any amino acid
MHARSTGPYSLVTQQPLGGKAQFGGQRLGEMEVWALEAYGAANTLQELLTIKSDDMTGRSKIYEAIVKGEPSTTAGIPESFNVLVQELRGLALDLSIFDVKGTQIGLTEKDEDLINKSKSNF

SEQ ID NO: 48633 - DNA, 438 bp, Unknown
  Obtained from environmental sample
  misc_feature (1)..(438): n is a, c, g, or t
gtggtggagaatacccgcgtcggccagcgtacggatttcgacaagattatctttgacatttggactgacggcagtatctctgtagaagacgcggtcggctacgcggccaagttgctgtacgaccacatcgcggtgctaatcaacatcgagggcgatttcctgcccgttgaggagaaagtgcgcgacgagaagacggagaagctgcggcagctactcaagatgaaggtcgacgagttggagttgtcggtgcgctcgaacaactgcctgcgcgcggcgaacatcgtctatctggcggatctggtgaagaatcaggaatccgatatgctcaagtacaaaaacttcggcagaaagtcgctggtagagctcaacgccgtgctcacgaatatgggtttgacgtttggaatggatgtggacaaggtcatggggggcggagattag

SEQ ID NO: 48634 - protein, 145 aa, Unknown
  Obtained from environmental sample
  DOMAIN (61)...(128): Bacterial RNA polymerase, alpha chain C terminal domain
  misc_feature (1)..(145): Xaa is any amino acid
MVENTRVGQRTDFDKIIFDIWTDGSISVEDAVGYAAKLLYDHIAVLINIEGDFLPVEEKVRDEKTEKLRQLLKMKVDELELSVRSNNCLRAANIVYLADLVKNQESDMLKYKNFGRKSLVELNAVLTNMGLTFGMDVDKVMGGGD

SEQ ID NO: 48635 - DNA, 474 bp, Unknown
  Obtained from environmental sample
  misc_feature (1)..(474): n is a, c, g, or t
atgcgtcacttagtgtcagggcgaaagcttaatcgcagtgcttcccaccgcagggctatgctctccaatttggccatgtccatcttggacaaggagcgggtcaccactacgcttgccaaagccaaggaggtgcgcggcgtggtagagcgtatgatcacctacggcaagaagggcgacctgcacgcaaggcgccttgccgcttgccggatcaacgacgacgccgtgctcaaaaagctcttcgacgacattgcgccgggctacaaagagcgcaacggcgggtacacgcgtgtcctcaaaacagaagaccgcaaaggcgactgcgcccccatggcgatcatagagcttgtaggccgcggtcacaacgacgcggtcaggaaaaaaggcggcgccaagaaaaagtccgcgaagcccaaagccgcaacgcatcaggccgcggaatcgcaagagtcggaagccggcgagacgaatagttaa

SEQ ID NO: 48636 - protein, 157 aa, Unknown
  Obtained from environmental sample
  DOMAIN (20)...(116): Ribosomal protein L17
  misc_feature (1)..(157): Xaa is any amino acid
MRHLVSGRKLNRSASHRRAMLSNLAMSILDKERVTTTLAKAKEVRGVVERMITYGKKGDLHARRLAACRINDDAVLKKLFDDIAPGYKERNGGYTRVLKTEDRKGDCAPMAIIELVGRGHNDAVRKKGGAKKKSAKPKAATHQAAESQESEAGETNS

SEQ ID NO: 48637 - DNA, 441 bp, Unknown
  Obtained from environmental sample
  misc_feature (1)..(441): n is a, c, g, or t
atgagcgtactcaacaactttcttcgtcaattcgacattctngtcgtaaggatggtgcgacccgtcgatcatcacgnaggagaagccgctttcgatgcactggacgcagagctcaaaagtatcgccgtgatcgaggtgcaacgctatgggtatattgaagccctgctcgcgtgccatagctacggcgccttggcccatgtagcgcagaagcgtcgcgtcggcgtacttacgagcgccgctcgacacctgcataatcacgggggatttggatttcccgcaggccgtgactatcgcctgtatctgctccatgttgttgaagttgtaggcaggaatagcgtagccgcctttgaacgccttcgcgaacatgtcctttgtgttgacaagaccgaggtctttgtagcttacggccatgatattggtcctttcggttggatatgttaa

SEQ ID NO: 48638 - protein, 146 aa, Unknown
  Obtained from environmental sample
  misc_feature (1)..(146): Xaa is any amino acid
MSVLNNFLRQFDILVVRMVRPVDHHXGEAAFDALDAELKSIAVIEVQRYGYIEALLACHSYGALAHVAQKRRVGVLTSAARHLHNHGGFGFPAGRDYRLYLLHVVEVVGRNSVAAFERLREHVLCVDKTEVFVAYGHDIGPFGWIC

SEQ ID NO: 48639 - DNA, 1338 bp, Unknown
  Obtained from environmental sample
  misc_feature (1)..(1338): n is a, c, g, or t
ttgtgtaagggctgggtcagaaccaagcgcgagatgaagaaccttgtctttgtggaagtaaacgacggttcatgcttcaggggtatccagtgtactttcgatacggccgccggattggacggcaatacaaaggccgccctggcggagttaagcacaggggcggcggtggaagtttccggcaggctcgttccatcgccggcggaagggcaggcggtggaagcggcggcatcttcgcttttgattgtaggcactgccccgaccgagacctacccgcttcaaaaaaagcgtcactcgctggagttcctgcgtgaaatagcgcacctaagggcaaggacgaacactttcggcgcggttgccagggtaagaaaccggctcgcaatcgcgacccacgaattttttcagagcaaccattttcaatacgttcacacgccaatcatcacaggcagcgacgccgaaggggcaggcgccttgtttcaggttacgacacttgatcttgcggctctggcaaaatccggcaaggccccggattactcgaaagattttttcggcaaatggacagggcttgccgtaacaggccagctcgaagttgagtcctacgccgaagccctttcaagggtctacactttcggccccacctttcgggctgagaattcaaacaccacccggcacctggccgagttctggatgatcgagccggaagcggctttcttccgcctggaagacaacatggcgctggctgaggatttcctcanattccttttctcagcggttttaaaggactgcgccgaagacctggaattttttgatgcccatatcgaaaaaggaattatagaaaccctgcagtctgttgtctcttcaaagttttcgcatataacctacaccgacgcaattgtggaattggagaaaggcggcccctttgaattcaagccttattggggctgcgatattcaaaccgagcatgaaaggtttctttcggaaaaggtcgcgggcgggcctgtgattgttacggactaccctaaagaaatcaaagcgttttacatgaagcaaaacagcgacggcaaaactgtccgggcaatggatgtcctggttccccgcctgggtgaaattatcggcggctccgagcgcgaagaaaattacgataagctggaaaagcgtatgcaggaactgaagttcaacattgccgattaccagtggtatctggatcttcgtcgttatggcagtgttccccactcgggtttcggtctgggctttgagcggcttattcaatacgttacagggatggtaaatatccgcgacgttattcccttcccccgcgctccaggccaggcggaattctag

SEQ ID NO: 48640 - protein, 445 aa, Unknown
  Obtained from environmental sample
  DOMAIN (3)...(82): OB-fold nucleic acid binding domain
  misc_feature (1)..(445): Xaa is any amino acid
MCKGWVRTKREMKNLVFVEVNDGSCFRGIQCTFDTAAGLDGNTKAALAELSTGAAVEVSGRLVPSPAEGQAVEAAASSLLIVGTAPTETYPLQKKRHSLEFLREIAHLRARTNTFGAVARVRNRLAIATHEFFQSNHFQYVHTPIITGSDAEGAGALFQVTTLDLAALAKSGKAPDYSKDFFGKWTGLAVTGQLEVESYAEALSRVYTFGPTFRAENSNTTRHLAEFWMIEPEAAFFRLEDNMALAEDFLXFLFSAVLKDCAEDLEFFDAHIEKGIIETLQSVVSSKFSHITYTDAIVELEKGGPFEFKPYWGCDIQTEHERFLSEKVAGGPVIVTDYPKEIKAFYMKQNSDGKTVRAMDVLVPRLGEIIGGSEREENYDKLEKRMQELKFNIADYQWYLDLRRYGSVPHSGFGLGFERLIQYVTGMVNIRDVIPFPRAPGQAEF

SEQ ID NO: 48641 - DNA, 579 bp, Unknown
  Obtained from environmental sample
  misc_feature (1)..(579): n is a, c, g, or t
atgttaaaactgttttacgctttcaagcgccgttttccccttctttcttatatcttaaacaggcttttaaccatggctgtaatgctcttcctgcttggacttgcggttttcggtttaatggctcttgcccccggcgacattgtagaccagattatgatgcagcagcttttcagtgaaaatcagggcaaagcggggcagaatacgcaaagcatgagcgcggatcagcttgcaacccgaagaacggaacttgggcttgaccagccgttttatgtgcagtatttccgctggcttaaccgcgtaatcgttcacaaagacctcggggtaagccttatttcgcgcgctccggtctctttccttatcgcctcgcgcattttaaattcgcttcttcttaacataatatcccttgtactgattaccttcttttctttcgccgcgggtatctatttttccaccaaggcgggaacaaaagccgacatagcggtaacatttttcgcccttgtgcttcacgccttccccgggcttttgctccttatccttcttcagtgttcgcgtccgaacctcggccgatctgatcaatga

SEQ ID NO: 48642 - protein, 192 aa, Unknown
  Obtained from environmental sample
  misc_feature (1)..(192): Xaa is any amino acid
MLKLFYAFKRRFPLLSYILNRLLTMAVMLFLLGLAVFGLMALAPGDIVDQIMMQQLFSENQGKAGQNTQSMSADQLATRRTELGLDQPFYVQYFRWLNRVIVHKDLGVSLISRAPVSFLIASRILNSLLLNIISLVLITFFSFAAGIYFSTKAGTKADIAVTFFALVLHAFPGLLLLILLQCSRPNLGRSDQ

SEQ ID NO: 48643 - DNA, 1383 bp, Unknown
  Obtained from environmental sample
  misc_feature (1)..(1383): n is a, c, g, or t
atggactatattattgagatgaacggaattacaaaaatattcccgggtgtcatcgccaacgataatattactcttcaattaaaaaggggagaaattcacgccttgttaggtgaaaacggcgccggcaaatctacgcttatgagcgtgcttttcggcctttatcangcggaaaagggcataattaaaaaaaacggtataaaggttaatattacagggccaaacgacgccagaaagctcggaatagggatggttcaccagcacttcaaactggtgcacaattttaccgttcttgaaaatattattcttggcgaggagaccgtaaaaaacggcgttttaaattttgaaaagccccgaaatcaggtaatggaattgtccaaacgctataaactcgatatagatcccgacgcgttaatttccgatatcaccgtaggaatgcagcaacgggttgaaatccttaaaatgctctaccgcgaaaacgagattttaatttttgacgagccgaccgcggttcttacccctcaggagattgaggagttaatgaacataatgaaaaatcttgcggcggaaggcaagtcgattctgttcattactcacaaacttgatgagatcaaagcggtcgcggggcgctgtaccgttctgcgtaaaggtaaatccacgggaacagttgatgtcgcgtccgtttccaaagaagaactttcagagatgatggtaggcagaaaggtaaatcttatggttgaaaaaaccgaaaaaaaaccgggagaagttattctaaaggcgaagaatcttaccgttacgggcaatacttcaggtatacctcttgttaacaacgcgagttttgaagtgcgggaaggcgagattgtctgcattgccggaattgacgggaacggccagcaggaacttgtatacgctcttgccggcatggtgggaattgactccgggcgtattgtgtataacggaaaggaaatttcacataacgacataaggtcgagaggtttggcgcatattcccgaagacaggcataaacacgggcttgtgctggactacaattttagctttaacctggttttacagagttattttaccgaccgttntcagaaaaacggatttttaaaatttaatgagatttacaaatatgccgacgaattgattgaaaaatttgacattcgctcggggcagggggcgcactcaataacgcgaagcatgtcaggcggcaaccagcagaaagcgattgtcgcaagggaaatatcgcgcgattcgcgcctgcttatcgccgttcagccgacaagagggcttgatgtcggcgcaattgagtatattcacaaacagcttgttgccgagcgcgacaagggaaagggcgtgcttttggtttcgcttgaannctga

SEQ ID NO: 48644 - protein, 460 aa, Unknown
  Obtained from environmental sample
  DOMAIN (30)...(216): ABC transporter
  misc_feature (1)..(460): Xaa is any amino acid
MDYIIEMNGITKIFPGVIANDNITLQLKRGEIHALLGENGAGKSTLMSVLFGLYXAEKGIIKKNGIKVNITGPNDARKLGIGMVHQHFKLVHNFTVLENIILGEETVKNGVLNFEKPRNQVMELSKRYKLDIDPDALISDITVGMQQRVEILKMLYRENEILIFDEPTAVLTPQEIEELMNIMKNLAAEGKSILFITHKLDEIKAVAGRCTVLRKGKSTGTVDVASVSKEELSEMMVGRKVNLMVEKTEKKPGEVILKAKNLTVTGNTSGIPLVNNASFEVREGEIVCIAGIDGNGQQELVYALAGMVGIDSGRIVYNGKEISHNDIRSRGLAHIPEDRHKHGLVLDYNFSFNLVLQSYFTDRXQKNGFLKFNEIYKYADELIEKFDIRSGQGAHSITRSMSGGNQQKAIVAREISRDSRLLIAVQPTRGLDVGAIEYIHKQLVAERDKGKGVLLVSLEX

SEQ ID NO: 48645 - DNA, 390 bp, Unknown
  Obtained from environmental sample
  misc_feature (1)..(390): n is a, c, g, or t
atgtcgttatgtgaaatttcctttccgttatacacaatacgcccggagtcaattcccaccatgccggcaagagcgtatacaagttcctgctggccgttcccgtcaattccggcaatgcagacaatctcgccttcccgcacttcaaaactcgcgttgttaacaagaggtatacctgaagtattgcccgtaacggtaagattcttcgcctttagaataacttctcccggttttttttcggttttttcaaccataagatttacctttctgcctaccatcatctctgaaagttcttctttggaaacggacgcgacatcaactgttcccgtggatttacctttacgcagaacggtacagcgccccgcgaccgctttgatctcatcaagtttgtga

SEQ ID NO: 48646 - protein, 129 aa, Unknown
  Obtained from environmental sample
  misc_feature (1)..(129): Xaa is any amino acid
MSLCEISFPLYTIRPESIPTMPARAYTSSCWPFPSIPAMQTISPSRTSKLALLTRGIPEVLPVTVRFFAFRITSPGFFSVFSTIRFTFLPTIISESSSLETDATSTVPVDLPLRRTVQRPATALISSSL

SEQ ID NO: 48647 - DNA, 717 bp, Unknown
  Obtained from environmental sample
  misc_feature (1)..(717): n is a, c, g, or t
atgacactccgccaccggcgcggcaggcccagcctgaacgccgcttggggcaacacgctttcggtgctgttcggcgacttcctgtatctccaggccgtccacagtgcgctggcaagccgcagttggcggatgatggagatactggccgaagtggcgacgcggatgatagagggcgaactggtgcaaaacgagtgcctctacagcctagacacgtccagaaagacctacttcgacatactggagcgcaagaccgccctgctgttcgccgcctgcgccgagtgcggggccgtcctttcgggcagggacgacggtgcctgccggatgctcaatgtgtttggcctggagatgggcagggcattccaactgatggacgacctgctggactacacggccaccagcgaccagatgggcaagccggtgctttccgacctgcgcgagggcaagctgacgctgcccatgctggcgctgctggagcgcgcgccaaacgaggcgaagcccataatcgcgcacgtatgggagagcgacgccccgatttcaaaggacgactcgcaggagttgctcgcgctgctggagcggcacggctgcctggacgagccccgcgagatggcggcgcgggccagccgcatcgccactgcctcgctccctgacgacggtgacccagagataaccaagctgctgcgggagattccggagatgctgctggagcggacgaattga

SEQ ID NO: 48648 - protein, 238 aa, Unknown
  Obtained from environmental sample
  DOMAIN (1)...(194): Polyprenyl synthetase
  misc_feature (1)..(238): Xaa is any amino acid
MTLRHRRGRPSLNAAWGNTLSVLFGDFLYLQAVHSALASRSWRMMEILAEVATRMIEGELVQNECLYSLDTSRKTYFDILERKTALLFAACAECGAVLSGRDDGACRMLNVFGLEMGRAFQLMDDLLDYTATSDQMGKPVLSDLREGKLTLPMLALLERAPNEAKPIIAHVWESDAPISKDDSQELLALLERHGCLDEPREMAARASRIATASLPDDGDPEITKLLREIPEMLLERTN

SEQ ID NO: 48649 - DNA, 603 bp, Unknown
  Obtained from environmental sample
  misc_feature (1)..(603): n is a, c, g, or t
ttggggcaacacgctttcggtgctgttcggcgacttcctgtatctccaggccgtccacagtgcgctggcaagccgcagttggcggatgatggagatactggccgaagtggcgacgcggatgatagagggcgaactggtgcaaaacgagtgcctctacagcctagacacgtccagaaagacctacttcgacatactggagcgcaagaccgccctgctgttcgccgcctgcgccgagtgcggggccgtcctttcgggcagggacgacggtgcctgccggatgctcaatgtgtttggcctggagatgggcagggcattccaactgatggacgacctgctggactacacggccaccagcgaccagatgggcaagccggtgctttccgacctgcgcgagggcaagctgacgctgcccatgctggcgctgctggagcgcgcgccaaacgaggcgaagcccataatcgcgcacgtatgggagagcgacgccccgatttcaaaggacgactcgcaggagttgctcgcgctgctggagcggcacggctgcctggacgagccccgcgagatggcggcgcgggccagccgcatcgccactgcctcgctccctga

SEQ ID NO: 48650 - protein, 200 aa, Unknown
  Obtained from environmental sample
  misc_feature (1)..(200): Xaa is any amino acid
MGQHAFGAVRRLPVSPGRPQCAGKPQLADDGDTGRSGDADDRGRTGAKRVPLQPRHVQKDLLRHTGAQDRPAVRRLRRVRGRPFGQGRRCLPDAQCVWPGDGQGIPTDGRPAGLHGHQRPDGQAGAFRPARGQADAAHAGAAGARAKRGEAHNRARMGERRPDFKGRLAGVARAAGAARLPGRAPRDGGAGQPHRHCLAP

SEQ ID NO: 48651 - DNA, 399 bp, Unknown
  Obtained from environmental sample
  misc_feature (1)..(399): n is a, c, g, or t
atgccgctcaattcgtccgctccagcagcatctccggaatctcccgcagcagcttggttatctctgggtcaccgtcgtcagggagcgaggcagtggcgatgcggctggcccgcgccgccatctcgcggggctcgtccaggcagccgtgccgctccagcagcgcgagcaactcctgcgagtcgtcctttgaaatcggggcgtcgctctcccatacgtgcgcgattatgggcttcgcctcgtttggcgcgcgctccagcagcgccagcatgggcagcgtcagcttgccctcgcgcaggtcggaaagcaccggcttgcccatctggtcgctggtggccgtgtagtccagcaggtcgtccatcagttggaatgccctgcccatctccaggccaaacacattga

SEQ ID NO: 48652 - protein, 132 aa, Unknown
  Obtained from environmental sample
  misc_feature (1)..(132): Xaa is any amino acid
MPLNSSAPAASPESPAAAWLSLGHRRQGARQWRCGWPAPPSRGARPGSRAAPAARATPASRPLKSGRRSPIRARLWASPRLARAPAAPAWAASACPRAGRKAPACPSGRWWPCSPAGRPSVGMPCPSPGQTH

SEQ ID NO: 48653 - DNA, 855 bp, Unknown
  Obtained from environmental sample
  misc_feature (1)..(855): n is a, c, g, or t
ttgagcggcataacccctgcccacctagaccacagccgcgattggcgcgacttcgattactgctatcccgtcataagccgccgcagcaggggcctgagcctaggcgtgaacatcaacatggacaagacatgcaacttcgactgcgtctattgcgaggtttgccgcagacatcccccaaggcgtgacgacatcgacctggaccagttggagcgtgaaatgagggcactactggacatggccctttctggcgaacttttcgctgcgaacagagagcggccgaggctcaacgacatggccttcagcggggacggcgagccaacgaccgcaaagaagtttccagcggtggtctccagactggcgggtctgcggaaaaactatggcctagaagacctcaagttggtgctgataaccaactccaccatgttgcaggcgcctagcgtagtcggtgccttggatgagctgatggaaaacggcggcgagatatgggcgaagctggattcagggctggaggaccgctatcgcgccatcaaccgctctagtgtccccttgggcgacatcattgcaaacttggtcttcgctggcagaaggtggccgctggtgatacagacaatgtttttggagtggcgcggctgtgcgccgctcgacgacgaactgaccgcctacgccgacacaatcaagcggctactggatgccggcataaatctgcgggggctgcacctctacacagttgcgaggcccacgccggaacccagcgcgaggcccctgcctagcgccgcgattgaccaaatagcgggatacgtcatgggtcgtctgcccagcgtcagcgtggatgtcttctatggccctgttgcgtag

SEQ ID NO: 48654 - protein, 284 aa, Unknown
  Obtained from environmental sample
  misc_feature (1)..(284): Xaa is any amino acid
MSGITPAHLDHSRDWRDFDYCYPVISRRSRGLSLGVNINMDKTCNFDCVYCEVCRRHPPRRDDIDLDQLEREMRALLDMALSGELFAANRERPRLNDMAFSGDGEPTTAKKFPAVVSRLAGLRKNYGLEDLKLVLITNSTMLQAPSVVGALDELMENGGEIWAKLDSGLEDRYRAINRSSVPLGDIIANLVFAGRRWPLVIQTMFLEWRGCAPLDDELTAYADTIKRLLDAGINLRGLHLYTVARPTPEPSARPLPSAAIDQIAGYVMGRLPSVSVDVFYGPVA

SEQ ID NO: 48655 - DNA, 591 bp, Unknown
  Obtained from environmental sample
  misc_feature (1)..(591): n is a, c, g, or t
atgattgccgacgctaacaaaagaacagccaacacttcgctgggagcggtgcgtaccaaacttgggcgcgatctcggtctttgcgatccgtcccattttgaatttgtgtggataatagatttcccgatgtttgaatacaacgaagacgaaaaaaaatgggaagcggctcaccacctttttaccttgccgcaggaaaaataccacgcgacattggagagcgatcccggttccgtaaaaggcgacctttacgaccttgtgttaaacggttatgagttagcgtcaggttctattcgtattcatgactcgtcaatgcaaaaaagagtttttgagatagtgggaattgatcctgcacaagtggaaaaaaagttcggctttttaacggaagcttttagatacggagcgccgccgcacggaggcatcgcccccgggcttgataggcttgtaatgatcatggcgggggtttcatcgttaaaggacgttatagcgttcccgaaaaattcgtttgcggtaagcccaatggacgattgcccgtcggaagtggatcaaaagcagttagatgaattgcgtataaagatacttccgccgaagtga

SEQ ID NO: 48656 - protein, 196 aa, Unknown
  Obtained from environmental sample
  DOMAIN (1)...(168): tRNA synthetases class II (D, K and N)
  misc_feature (1)..(196): Xaa is any amino acid
MIADANKRTANTSLGAVRTKLGRDLGLCDPSHFEFVWIIDFPMFEYNEDEKKWEAAHHLFTLPQEKYHATLESDPGSVKGDLYDLVLNGYELASGSIRIHDSSMQKRVFEIVGIDPAQVEKKFGFLTEAFRYGAPPHGGIAPGLDRLVMIMAGVSSLKDVIAFPKNSFAVSPMDDCPSEVDQKQLDELRIKILPPK

SEQ ID NO: 48657 - DNA, 1473 bp, Unknown
  Obtained from environmental sample
  misc_feature (1)..(1473): n is a, c, g, or t
gtgatgctggcagtgcaaatctgggacacaatgaccgcggcgtgggtagttgacgccgagcgaaacaattattctttggactctcttgtcgcctacacttttgactgcacccccacaaaatatatggacatagtgccgaaaggcgcggcgtttgacgttgtctctctggagaccgccacccgctattcgggggaagacgccgatttttgcatcaggctgaaacatcaccttgaaccaatgttgaaaaaaaccgaatccatcgcgctttttgaaaatcttgaaatgccactgctccccattcttgcggaaatggaaggagagggaataaaaatcgagccgaaagcgctgacaagttacggcaaggaactcgccgtcgagttagataaaattcaatccgacacatggaaaattgtaggacacgaatttaatcttgcatcgacaaaacagcttcaggaagtgctttacgttgagcgcaaactcacacccggcaagaaaacaaaaaccggcttctccacagacgcggcggctcttgaagaacttgcccgcgaagaccccgtacccgcccttattctgcgtcatcgcacattatcaaaattaaaatcaacgtatgtagacacattggctgatatggcggacagcgaagggcggttgcacacaaactttgtgcagacgggaaccgctacaggcagactttccagcagagaacccaatctgcaaaacatacccgtccgcgccgaagaaggcaggcgtatccgagaagcgtttatcgcaaaaagcggctgtgtccttatttccgccgactacagtcagatagagttggtagtgctggcgcatctttcgcaggatgaaaatcttatttccgcattcaaagaggatcgtgatgttcacgccagaacagcttcgttaatcttcggcattgatgaaaacgaagtaaagaacgaacaaaggcgcatggcaaagacaattaacttcggcgtaatttacggcatgagcgccttccgtcttgccaacgaattgaacataagccgcacggaagcgcagaattttataaatgcgtatttcagcacatattctggcgtgcgtcagtttatagaaaacacaattagaaagacggaacagacgggctacgttacgacaatttcaggccgccgccgctatgttcccacaattaattcgcataacaagacggaaaaatccgccgccgaacgcatagccgtaaacacccccattcaaggttcggcggcagacattgtaaaaatggcaatgctcaacttggacaaaaaactagccgccgaaaaaagcaaagcccgcctgttactgcaagtccacgatgaattaatcctggagtgcccgaaagaagacgccgaaaaaacatcggcattgattaaaacggaaatggaacaagcggcggcgttaagcattcctttgagagtgagcgttgagacagggagtaggtggggcgattttcattga

SEQ ID NO: 48658 - protein, 490 aa, Unknown
  Obtained from environmental sample
  DOMAIN (111)...(489): DNA polymerase family A
  misc_feature (1)..(490): Xaa is any amino acid
MMLAVQIWDTMTAAWVVDAERNNYSLDSLVAYTFDCTPTKYMDIVPKGAAFDVVSLETATRYSGEDADFCIRLKHHLEPMLKKTESIALFENLEMPLLPILAEMEGEGIKIEPKALTSYGKELAVELDKIQSDTWKIVGHEFNLASTKQLQEVLYVERKLTPGKKTKTGFSTDAAALEELAREDPVPALILRHRTLSKLKSTYVDTLADMADSEGRLHTNFVQTGTATGRLSSREPNLQNIPVRAEEGRRIREAFIAKSGCVLISADYSQIELVVLAHLSQDENLISAFKEDRDVHARTASLIFGIDENEVKNEQRRMAKTINFGVIYGMSAFRLANELNISRTEAQNFINAYFSTYSGVRQFIENTIRKTEQTGYVTTISGRRRYVPTINSHNKTEKSAAERIAVNTPIQGSAADIVKMAMLNLDKKLAAEKSKARLLLQVHDELILECPKEDAEKTSALIKTEMEQAAALSIPLRVSVETGSRWGDFH

SEQ ID NO: 48659 - DNA, 1494 bp, Unknown
  Obtained from environmental sample
  misc_feature (1)..(1494): n is a, c, g, or t
atggcgaataccaataaacagtttcgggtcgtgcttcgcaactgcggcgtaattgatcccgaacgtatcgacgaatacatcgcccgcgacggctatatcggtcttgaaaaagttctctttgaatggacgcctgaccaaataatcgaagaaatgaaaaaatctggtcttcgcggaaggggcggcgcgggcttcccgacttggctaaaatgggatttggcgcgtaaagcggtaggggaccaaaagttcgttatctgtaacgccgacgagggggatcctggcgcgtacatggatcgttctacaatagaaggcgacccccactcggtcatcgaaggcatgataaccgccggtaaggcaatcggctcaagtcagggatttgtttacatccgcgccgagtatccgcttgcgattgaacgcctaaaaatcgcgcttgatcaggcgcgcgattacggactggtaggaaaaaacatcctcggttccggttttgattttgacatagagatccgcctaggcgcgggcgcgtttgtctgcggcgaagaaaccgcgctaattaaatccgtagaaggcaaccgcggaatgccggtcccaaaaccgccgttcccggcaaacaagggcttgtggcagaaacccaccattattaacaatgttgaatcatttgctaacgtgcctgtcattaccgcaatgggcggcgactggcttgcaaaaataggaacagaaaaatccaagggaacaaaagtgtttgcgcttacgggaaaagtaaaatattcaggacttgtcgaagttccaatgggaaccacgttacgcgaacttgtctatgacgtgggcggcggaataaaagacgataaaaaatttaaaggagtgcagtcgggcggaccgtcgggcggcattcttaccgaaaaatcacttgacgttccaatcgactttgaatcattgttggctaacggctccatgatgggctcgggcggcatgatagtaatggacgaagacgactgcgtagttgacgtatcgcgcttctacatggacttctgcgtcgatgaaagctgcggtaaatgctctccctgccggattggtactacgcaaatacttaaaatcttagaaaaaatagcaaagggcaatggcgaggacgaagaccttgtaaaacttgaggctatcggacacgcgatgacgaaggcctcgctttgcatgctcggctgtaccgccgcaagtcccgtaatgtccactcttaaaaatttccgcgaagaatacatggaacatatacacgataaaaaatgccgagccggcaaatgcagaaaaatggtcaactttaccattgacgttgagaagtgcataggctgcggagtgtgcgcgaaaaaatgtcccggcgactgcattgtcgtggaagacgcgtcaaggtatccgaataaaaaacgtccgccttacagaattatcaatgataattgcgtaaagtgcggcgagtgcttggttgcatgtaaatttaaagcggtgataaaggcttaa

SEQ ID NO: 48660 - protein, 497 aa, Unknown
  Obtained from environmental sample
  DOMAIN (472)...(495): 4Fe-4S binding domain
  misc_feature (1)..(497): Xaa is any amino acid
MANTNKQFRVVLRNCGVIDPERIDEYIARDGYIGLEKVLFEWTPDQIIEEMKKSGLRGRGGAGFPTWLKWDLARKAVGDQKFVICNADEGDPGAYMDRSTIEGDPHSVIEGMITAGKAIGSSQGFVYIRAEYPLAIERLKIALDQARDYGLVGKNILGSGFDFDIEIRLGAGAFVCGEETALIKSVEGNRGMPVPKPPFPANKGLWQKPTIINNVESFANVPVITAMGGDWLAKIGTEKSKGTKVFALTGKVKYSGLVEVPMGTTLRELVYDVGGGIKDDKKFKGVQSGGPSGGILTEKSLDVPIDFESLLANGSMMGSGGMIVMDEDDCVVDVSRFYMDFCVDESCGKCSPCRIGTTQILKILEKIAKGNGEDEDLVKLEAIGHAMTKASLCMLGCTAASPVMSTLKNFREEYMEHIHDKKCRAGKCRKMVNFTIDVEKCIGCGVCAKKCPGDCIVVEDASRYPNKKRPPYRIINDNCVKCGECLVACKFKAVIKA

SEQ ID NO: 48661 - DNA, 393 bp, Unknown
  Obtained from environmental sample
  misc_feature (1)..(393): n is a, c, g, or t
atggcaaaattgagtcttgacgacttaagaaaactaagagaagaaaaaaaagccgagtttaaaaaacgcgacgcggacggcgttgaaacacggattattatcggtatgggaacctgcggtatagccgccggcgcgaaacaaacatgggacgcttttatcgccggaataaaagataaaaatcttaaaaattgcgtcgtaaagcagaccggctgtatggggctgtgccattccgagcctaccgtagaggttattgtccccggtatgccgcccgttatttacggcatggtggatcctgaattgacgaaatcgatcattcagaaacatattattggcagggaattgttaggtgaaaatatccttgagcgcccggccgccgatattttagcttcataa

SEQ ID NO: 48662 - protein, 130 aa, Unknown
  Obtained from environmental sample
  misc_feature (1)..(130): Xaa is any amino acid
MAKLSLDDLRKLREEKKAEFKKRDADGVETRIIIGMGTCGIAAGAKQTWDAFIAGIKDKNLKNCVVKQTGCMGLCHSEPTVEVIVPGMPPVIYGMVDPELTKSIIQKHIIGRELLGENILERPAADILAS

SEQ ID NO: 48663 - DNA, 630 bp, Unknown
  Obtained from environmental sample
  misc_feature (1)..(630): n is a, c, g, or t
atgccggacatggacggcatacaactggtgcgcgaacttaaagcgcgcgcatccgaactgtccgttgtggtaatgaactcagccgccgactggagcaccgttgagaacgaggcgaaaagcgtgggcgtagacaagtttctctcaaaaccgctgttcccatccaccgtagcggatatcataaacgagtgcataggcgtgagcaaaccgcaaacggaagaagaacagacggacattaccggcatcttcgccggttaccgcatactgttggtagaagacgtggaaatcaaccgcgaaattataatcgccctgctggaaccgacgcagctccaaatagacagcgctgaaaacggcgtggaagccgtgcgaatgttcagcgccgcccccgacaagtacaacctgattttcatggacatccaaatgcccgagatggacggctacgaggctacaaaaagcatcagagcgctaaacgtcccgtcggcaaagaatatcccaatcgtcgcgatgacggctaacgtcttcaaagaagacatagagagatgcacggaagccggcatgaacagccacatcggaaaaccggtggacatcgccgaggtgctggagaagctgaatacgttttttaaggtaaagtga

SEQ ID NO: 48664 - protein, 209 aa, Unknown
  Obtained from environmental sample
  DOMAIN (85)...(203): Response regulator receiver domain
  misc_feature (1)..(209): Xaa is any amino acid
MPDMDGIQLVRELKARASELSVVVMNSAADWSTVENEAKSVGVDKFLSKPLFPSTVADIINECIGVSKPQTEEEQTDITGIFAGYRILLVEDVEINREIIIALLEPTQLQIDSAENGVEAVRMFSAAPDKYNLIFMDIQMPEMDGYEATKSIRALNVPSAKNIPIVAMTANVFKEDIERCTEAGMNSHIGKPVDIAEVLEKLNTFFKVK

SEQ ID NO: 48665 - DNA, 918 bp, Unknown
  Obtained from environmental sample
  misc_feature (1)..(918): n is a, c, g, or t
atgagccatgaaatgcggacgccgatgaacgcgataatcggcatgacggcaatcggtaaaaacgcgaaagacattgaacgtaaagattacgctctggacaagatatcggacgcctcaacacatctgctcggcgtcattaacgacgtgctggatatgtcaaaaatcgaagcgaatatgctggagctgtcgcccgttgaatttaattttgaaaagatgctgcaaaaggtagtcacggtaatcactttccgcacagacgaaaaacagcaaaaacttaccatacacattgacaaaaaaatcccccaaaccctgattggtgatgaccagcggctggcccaggtcatcaccaacctgctgggaaacgccgtcaaattcacgccggaaaaaggctccattacacttgacgcattttttgtggaggaggaaaacggcctttgtaccatacaggtctcggtaaaagacacggggattggcataagcggcgaacagcaaaaacgcctcttcacttcttttcagcaggcggagaccagcaccacgcgcaagtacgggggtacggggctgggactggcgatttccaaaaccattgttgaaatgatgggcggtaaaatatggattgattcagaaatcggaaagggctcaacttttgcctttaccatccaggcgcagcgcggagccgcagacaaacagggacttttggccgcggacgtaaactggagcaatgtccgtgtcatggtagtggatgacgatcctgatatattaacgtatttccgcgaaatgacgcaggatttcggtctgttatgcgaaactgctctcagcgggaaagaggcgctcgccctggtggaacaaaaggccgctgcacatctacttcgtagactggaaaatgccggacatggacggcatacaactggtgcgcgaacttaa

SEQ ID NO: 48666 - protein, 305 aa, Unknown
  Obtained from environmental sample
  DOMAIN (1)...(58): His Kinase A (phosphoacceptor) domain
  misc_feature (1)..(305): Xaa is any amino acid
MSHEMRTPMNAIIGMTAIGKNAKDIERKDYALDKISDASTHLLGVINDVLDMSKIEANMLELSPVEFNFEKMLQKVVTVITFRTDEKQQKLTIHIDKKIPQTLIGDDQRLAQVITNLLGNAVKFTPEKGSITLDAFFVEEENGLCTIQVSVKDTGIGISGEQQKRLFTSFQQAETSTTRKYGGTGLGLAISKTIVEMMGGKIWIDSEIGKGSTFAFTIQAQRGAADKQGLLAADVNWSNVRVMVVDDDPDILTYFREMTQDFGLLCETALSGKEALALVEQKAAAHLLRRLENAGHGRHTTGART

SEQ ID NO: 48667 - DNA, 318 bp, Unknown
  Obtained from environmental sample
  misc_feature (1)..(318): n is a, c, g, or t
atgcagtattttgatactcacgcccatttggggcttattgttgatgaccccattgagcaactcattgttattcaggaagcccgccaggcttctgtgaaccgaattgtctctatttgcaacagcctgaatgactttggcagagtctatgagaatcttaaatncacaaccgaatgtttaccatgctgtcggagtaagcccttccgaagtgcaaaaccccggcagaaactggctgcagaccatagagcaaagcgtccaactcccgcgggtagtggcaataggcgagatcggcctggactattaccggaaattcggcgataa

SEQ ID NO: 48668 - protein, 105 aa, Unknown
  Obtained from environmental sample
  misc_feature (1)..(105): Xaa is any amino acid
MQYFDTHAHLGLIVDDPIEQLIVIQEARQASVNRIVSICNSLNDFGRVYENLKXTTECLPCCRSKPFRSAKPRQKLAADHRAKRPTPAGSGNRRDRPGLLPEIRR

SEQ ID NO: 48669 - DNA, 450 bp, Unknown
  Obtained from environmental sample
  misc_feature (1)..(450): n is a, c, g, or t
atgactttggcagagtctatgagaatcttaaatncacaaccgaatgtttaccatgctgtcggagtaagcccttccgaagtgcaaaaccccggcagaaactggctgcagaccatagagcaaagcgtccaactcccgcgggtagtggcaataggcgagatcggcctggactattaccggaaattcggcgataaaaagtcccaaatcgaattgtttattacacagcttgatctggccgccaagctaaatatgcctgtaatcatccataacagggacgncggccacgatgtgctgganatttctcgcgatcgtctgccgccnaggggggtgtgctttcatgctattccgaggatgccgcttacgccaaagagcccgaaagctgaacctgtacttttcctttgccggaaaccttacctacaagaacgcccgcaacctccacgagacggttcctga

SEQ ID NO: 48670 - protein, 149 aa, Unknown
  Obtained from environmental sample
  DOMAIN (1)...(141): TatD related DNase
  misc_feature (1)..(149): Xaa is any amino acid
MTLAESMRILNXQPNVYHAVGVSPSEVQNPGRNWLQTIEQSVQLPRVVAIGEIGLDYYRKFGDKKSQIELFITQLDLAAKLNMPVIIHNRDXGHDVLXISRDRLPPRGVCFHAIPRMPLTPKSPKAEPVLFLCRKPYLQERPQPPRDGS

SEQ ID NO: 48671 - DNA, 366 bp, Unknown
  Obtained from environmental sample
  misc_feature (1)..(366): n is a, c, g, or t
atgtgctgganatttctcgcgatcgtctgccgccnaggggggtgtgctttcatgctattccgaggatgccgcttacgccaaagagcccgaaagctgaacctgtacttttcctttgccggaaaccttacctacaagaacgcccgcaacctccacgagacggttcctgaactgcccgttgaccgcatccttatcgaatcggaaagcccgtttatggtgccgaccggacaaaagggcaaacgcaatatacccaaattcctgcccgagacctgtctgtgcatggcaaaaatgctggacatggatcccgaagcggccgccgcgcagctctgggaaaacgccaacaggttttttggcctcccgaatgaatag

SEQ ID NO: 48672 - protein, 121 aa, Unknown
  Obtained from environmental sample
  DOMAIN (1)...(117): TatD related DNase
  misc_feature (1)..(121): Xaa is any amino acid
MCWXFLAIVCRXGGCAFMLFRGCRLRQRARKLNLYFSFAGNLTYKNARNLHETVPELPVDRILIESESPFMVPTGQKGKRNIPKFLPETCLCMAKMLDMDPEAAAAQLWENANRFFGLPNE

SEQ ID NO: 48673 - DNA, 1110 bp, Unknown
  Obtained from environmental sample
  misc_feature (1)..(1110): n is a, c, g, or t
gtggtcaacgctgcgaattttatcgttaccgatgaagacgggaacgtgttagacgcaatgcgccgccagccgaaaaaaggagaggtgacaggcggacattacgtcccacctgcggaacaaacagaaaaagaaaaccgtgagtacatgattcgggaattgccggacaatgactcggggggcaacaattctttcaatgccaaaatcgacgctttttacgcggagaagggcggcgctctttccctggaagcgctgaaggaacaggcgcggcggaactgcgaaggaagtatcgggcgcttacaggcggcactggaaaaactgaaggcaaaagaggcggactatgcttcggcggacaggttgcgagaatacggcgacattatcctcgcaaatatcgcgtcgataaaccccggcgatgaatggcttgaggcggataatttttatgctaatgccgtaggcaatggcgccgccggcgggaaaatcaggataaaacttgatccccatgcgcgaccctccgcacaggctgaaatttattacgagcaatacacaaaagcgaaaagcggtcttgacaatattcgcgcggaaataacagccggccggcatgagcttgacgaagtcgaaatgaaactggcaacgcttcttgccgaggacaacccgctggtgctggcgaggctgctaaagacaggaacggcaaaaccccatcccgcggcgacgcaggataaaaaaagacccggcctgagttttcggcgcggtgaatggctgataatcgtaggcagagacgcaacggaaaacgatactttgcttcgccgtcatgtaaaaggcggtgacctgtggcttcacgccagagattttccaggctcttatgtgttcatcaaacagcggcctggcaagagtttccctttggaaatacttttggatgcggggaatttagctattttctattcaaaaggaagaaacagcgccgaaggggatttgttttatacccctgtaaagtatttacgccgcgccaaaaacggccccaagggtctggtaattcctacgcaagagaaaaaccttcacatcaagcttgatgaaaaacggctaaaggaactggaagcctgtagggttgaaaaatag

SEQ ID NO: 48674 - protein, 369 aa, Unknown
  Obtained from environmental sample
  DOMAIN (244)...(333): Domain of unknown function (DUF814)
  misc_feature (1)..(369): Xaa is any amino acid
MVNAANFIVTDEDGNVLDAMRRQPKKGEVTGGHYVPPAEQTEKENREYMIRELPDNDSGGNNSFNAKIDAFYAEKGGALSLEALKEQARRNCEGSIGRLQAALEKLKAKEADYASADRLREYGDIILANIASINPGDEWLEADNFYANAVGNGAAGGKIRIKLDPHARPSAQAEIYYEQYTKAKSGLDNIRAEITAGRHELDEVEMKLATLLAEDNPLVLARLLKTGTAKPHPAATQDKKRPGLSFRRGEWLIIVGRDATENDTLLRRHVKGGDLWLHARDFPGSYVFIKQRPGKSFPLEILLDAGNLAIFYSKGRNSAEGDLFYTPVKYLRRAKNGPKGLVIPTQEKNLHIKLDEKRLKELEACRVEK

SEQ ID NO: 48675 - DNA, 519 bp, Unknown
  Obtained from environmental sample
  misc_feature (1)..(519): n is a, c, g, or t
ttgggcaactataccgtgattctgctgattgtttttttccttggcttttttgccattttcgcggagccggggctggctgttaccgccgttaccattgaagaaatgaccatcggcacattcaagcgaaaaaaattgataatgctcgccgctataggcgtgggcgggggaatgttccttggttttgccagaatattgttcagcaatatgctgccttccggcggtatccatctttcctggatattgaccccctgttattgcctggctttgatcctgacgattttcgcgccggatgatttttcctcaatagcgtgggacacggcgggcatcgccacaggccccatttcggttcccataatgcttaccgctggccttggcctgggcaacgattccctgcgggctgacggcgcctttggcattgtggcgatatccagcgttttccccattatcgcgattctcgtgtccgggatcatcgacaaggcaaaatcggaaagggcgatacggagcgggcatgaaaactga

SEQ ID NO: 48676 - protein, 172 aa, Unknown
  Obtained from environmental sample
  SIGNAL (1)...(21)
  DOMAIN (1)...(159): Protein of unknown function (DUF1538)
  misc_feature (1)..(172): Xaa is any amino acid
MGNYTVILLIVFFLGFFAIFAEPGLAVTAVTIEEMTIGTFKRKKLIMLAAIGVGGGMFLGFARILFSNMLPSGGIHLSWILTPCYCLALILTIFAPDDFSSIAWDTAGIATGPISVPIMLTAGLGLGNDSLRADGAFGIVAISSVFPIIAILVSGIIDKAKSERAIRSGHEN

SEQ ID NO: 48677 - DNA, 1494 bp, Unknown
  Obtained from environmental sample
  misc_feature (1)..(1494): n is a, c, g, or t
atgcaaggaaactatggtgttgcgctgttaaaactgcgccctgccttgtctggcggcgggagccttttttttcgctgccctgatttattggcggatttaggcagagcctaccagtatactccctcattgcgggaggaaggggcaaagcttttcaggaactgggcggctcttcttgacgggcaaagcatagatgagtacaaggaattgggaatttatcttgacactctggacggtgaatccctaaaagagcgaaagtaccttgttcatttttatgcgggaagaattgagcgtgcaaggacacaatatgccgaatcgacggaatattttaagcgggcactggaattcgcgcctgacgaattgcagtccgatgcatgccattggtacatactgatgaatgtcctggccggaagccccgcagctgcaatgcggcaggccttggcaaccatgaaccaatggaacgatgtaaattatttttccgatattttggatcgcctgtcctgttattttgtcggtaagcggcagtggggaaatgtgctggaattattctctggccttgaaatgattggtgccagtaaggcccttgcccagtacgcctggatactgggcagggcagtgcaggaaggctatgtcaaaacggagcgtgaagcagaaaattttttcagaattgcttttgagaagggtaaaggttctatttactaccagactatgcgggcttccgccctgggagtttcttttgcttttgaggaaggcagatctaccgcggaaacaccggaagattccgagctggaattccttttgggcttttttgaatatggcgcgtcttcgttcgcgcttccgtacatacaggcggtcgagaaagatctttcccctacagaactcagaaaggttgccgaagccctcgccgcttcaggccgctggaaagacacccttgattttgtttccaggtatacaagccggaaagattttgaaatggcccggcaggactttctactgtttcatccccagccttttaaggagctgatagaaagatacgcaggcgaagctggatttggggcagaaacgctctacggccttgtccgcacggagagttattttgtaagcgacgcagtttcccgttccggcgctgtcggccttgtccagctcatggctcccactgccgaagaaatggccgaccggatagcccgaagcggcgggccggattaccgcaatccggcgatgaacctgaaagacccggagacaagtattcacatcggttcatattaccttcgttaccttatcgggcaaatgggaaaccccatgctggcccttctggcatataacgggggcatgggcagggtacggcgctggctgaccgcggacaggcagaaggcaggcggcgctcttccctacgatctttttcttgagagcatagaaatcagcgaaaccagggattacggacgcccagttttgtctgccgcctctgtctacggctatcttattacgggatgggcatga

SEQ ID NO: 48678 - protein, 497 aa, Unknown
  Obtained from environmental sample
  DOMAIN (86)...(119): Tetratricopeptide repeat
  misc_feature (1)..(497): Xaa is any amino acid
MQGNYGVALLKLRPALSGGGSLFFRCPDLLADLGRAYQYTPSLREEGAKLFRNWAALLDGQSIDEYKELGIYLDTLDGESLKERKYLVHFYAGRIERARTQYAESTEYFKRALEFAPDELQSDACHWYILMNVLAGSPAAAMRQALATMNQWNDVNYFSDILDRLSCYFVGKRQWGNVLELFSGLEMIGASKALAQYAWILGRAVQEGYVKTEREAENFFRIAFEKGKGSIYYQTMRASALGVSFAFEEGRSTAETPEDSELEFLLGFFEYGASSFALPYIQAVEKDLSPTELRKVAEALAASGRWKDTLDFVSRYTSRKDFEMARQDFLLFHPQPFKELIERYAGEAGFGAETLYGLVRTESYFVSDAVSRSGAVGLVQLMAPTAEEMADRIARSGGPDYRNPAMNLKDPETSIHIGSYYLRYLIGQMGNPMLALLAYNGGMGRVRRWLTADRQKAGGALPYDLFLESIEISETRDYGRPVLSAASVYGYLITGWA

SEQ ID NO: 48679 - DNA, 768 bp, Unknown
  Obtained from environmental sample
  misc_feature (1)..(768): n is a, c, g, or t
atggcggcggtactggccgcaggtgaaaccattctgaccaacgccgcaagcgaaccccatgtgcaggatctttgccatatgcttcgcgctatgggagcgggcattgaagggatcggttccaacatcctcacaatacgaggggtagaaaaacttcgcggttgcgactttacaataggcgccgactttatggaagtgggttcctttatcggcctcgcggccgccacaaagggagagctttttatcgagggcacaaagccttccgatctgaggcccgcaaaaacggccttcggcaagcttgggatagtgtgggagcaggaaggcaatacgatccacgtaccttccaaccagactcttgaagtgaactgcgatctgggaggaatgatccctaaaattgacgatgctccatggcccgggtttccgcctgacttgaccagcatcattaccgttgttgccacgcaagttaagggaacagttcttatccatgaaaaaatgtttgaatcccggatgttctttgtagataaactaatcggcatgggcgcccgcattgtgctctgcgatccccaccgggcggtggtatccggccctacccgcttgacaggttcagaacttcaaagcccggatgtgcgggccggtatggccatggtaatagccgccatgaccgccgaaggcaaaagccaaatcgacaacgtgtaccaaatagagcgaggttatgagaatatcgtggcaaggctttcgtcgctgggcgggagaatatgcgcggtcccctaa

SEQ ID NO: 48680 - protein, 255 aa, Unknown
  Obtained from environmental sample
  DOMAIN (1)...(244): EPSP synthase (3-phosphoshikimate 1-carboxyvinyltransferase)
  misc_feature (1)..(255): Xaa is any amino acid
MAAVLAAGETILTNAASEPHVQDLCHMLRAMGAGIEGIGSNILTIRGVEKLRGCDFTIGADFMEVGSFIGLAAATKGELFIEGTKPSDLRPAKTAFGKLGIVWEQEGNTIHVPSNQTLEVNCDLGGMIPKIDDAPWPGFPPDLTSIITVVATQVKGTVLIHEKMFESRMFFVDKLIGMGARIVLCDPHRAVVSGPTRLTGSELQSPDVRAGMAMVIAAMTAEGKSQIDNVYQIERGYENIVARLSSLGGRICAVP

SEQ ID NO: 48681 - DNA, 1521 bp, Unknown
  Obtained from environmental sample
  misc_feature (1)..(1521): n is a, c, g, or t
ttgatggcgaggacggccttcttttcgcttttttcatgctgggggtctgtgccttacagagagctaagccggctttcgccggtgtttggggagaggacaaaggtattaagtgaactggcgcaagggacacgggatatttcgataccaagtatcgtcataatcccgcagagggcgttgcttaatcttttgccaccgcctgattatataaaaagcctgttgatacaggttttggtcggaggaaaaatagacacttccggccttgcgaaaacgcttgtcatttacggatatactcgcgttccccgcgttcaggcttcgggcgagtttgccctacgcggcgaagtcctcgatattttcatgggcggcgatgattgggcgtaccgtattctttttgattttgacaaggttgaatccatcaagaaatttgatcctgtaaaccagactacggaacaaaatactcccggcggaaaactgcgggaaatgaaaatccgcccgatgcgcgaggttgtatggacggatgagcgtatagaagcgctggaaaaaaaacttgcctcttttaaggaattttccaacggcggcagggaaattatcgaagagttgatctcgcgccggaacataaggggcgaagagatattttttccctttgcgtttgaaaaaggcgcaagccttatggattaccttggcgacggtacgcttcttttgttcgacagggaacggctggataacacaaaagaaactattttccgcgagtatcaggggatgtactcgcagtccgtaagggaaaaaaaatgcgagtatcctctgccggagcgcctgcttcttgattttggggaattaatcaaaaacaaaaaaaagaccgtttcttttatgacaataaaaagcgcgccgaaagacggcgtttgtcatattgaacttccctgcgaaccttcgcgcagtttcttcggcaatatcgactatatgaaggatgaattcgcgtctttgcttgccaatggctggcatataaccgttgccgccgaatcggaagtgcaggcgcagcgtattaaaatgatctttatgccgcgcgctgatacggggacagaacagtctgtatcaaagtggccgggcgacggttctccgctgttaaaagaattttcgataatggcgaatccccttaccgccggtttttctctgccggatatcaaacttatgctgatacaggaaaacgagattttcggcagaaggaaacggccggtacgttcattgcataccgcgcgttcaaaacctattgatacgtttatagaactgaatcccggcgactatatcgttcatgttaattacggtatcggacttttcaagggaatagagagaattacggctctaggtcttgaaagggattatatccgacttgaatacgcggacgaggagaccgtctttgttcccgtcgaacaggttaaccttgtccaacggtatatcggaagcgagggaaatccgccgcggcttgacgttatgggttcaaaagctgggagagccgcaagaacagggtaa

SEQ ID NO: 48682 - protein, 506 aa, Unknown
  Obtained from environmental sample
  DOMAIN (426)...(505): CarD-like/TRCF domain
  misc_feature (1)..(506): Xaa is any amino acid
MMARTAFFSLFSCWGSVPYRELSRLSPVFGERTKVLSELAQGTRDISIPSIVIIPQRALLNLLPPPDYIKSLLIQVLVGGKIDTSGLAKTLVIYGYTRVPRVQASGEFALRGEVLDIFMGGDDWAYRILFDFDKVESIKKFDPVNQTTEQNTPGGKLREMKIRPMREVVWTDERIEALEKKLASFKEFSNGGREIIEELISRRNIRGEEIFFPFAFEKGASLMDYLGDGTLLLFDRERLDNTKETIFREYQGMYSQSVREKKCEYPLPERLLLDFGELIKNKKKTVSFMTIKSAPKDGVCHIELPCEPSRSFFGNIDYMKDEFASLLANGWHITVAAESEVQAQRIKMIFMPRADTGTEQSVSKWPGDGSPLLKEFSIMANPLTAGFSLPDIKLMLIQENEIFGRRKRPVRSLHTARSKPIDTFIELNPGDYIVHVNYGIGLFKGIERITALGLERDYIRLEYADEETVFVPVEQVNLVQRYIGSEGNPPRLDVMGSKAGRAARTG

SEQ ID NO: 48683 - DNA, 693 bp, Unknown
  Obtained from environmental sample
  misc_feature (1)..(693): n is a, c, g, or t
ttgatggccgagagggagagccggcgtctccctctacttcgaggcctccgtcggcggcgggatgcccgtcatcaaatccatacgcgaggggctgataggcaacgagattctgagcattcggacgataatcaacggcacctgcaactacatactcacgcagatggcggcgcacgggctgcccttcgccgacgccctcgcggcggcgcaggagaacgggtacgcggaggccgacccgaccctcgacgtaggcggcggcgactccggccacaaggccgcgatactcgcctccctcgccggcggcggctacgtcccctacggcgatttttcggtggaggggatcaccggcattgccggcgaggacatcaagttcgccgcggaactcggctacgtcgtaaaactcttaggcatcatcaagagatgcgccgacgggttcgacgtgcgcgtgcacccggccatgctccccaaaggccacatcctggcctcggtctccgacgtgttcaacgcggtgctgctcgagggcgacgccgtcgggcagatactcatctacggcaggggcgccggcgagatgcccaccgcatccgccgtagtgggcgacatcatagacgccgcgaggaacatagcagacggatgcccgaagcgggtgccaatggactactaccggacgggcaaaaaggtgacgctcgttcccattga

SEQ ID NO: 48684 - protein, 230 aa, Unknown
  Obtained from environmental sample
  misc_feature (1)..(230): Xaa is any amino acid
MMAERESRRLPLLRGLRRRRDARHQIHTRGADRQRDSEHSDDNQRHLQLHTHADGGARAALRRRPRGGAGERVRGGRPDPRRRRRRLRPQGRDTRLPRRRRLRPLRRFFGGGDHRHCRRGHQVRRGTRLRRKTLRHHQEMRRRVRRARAPGHAPQRPHPGLGLRRVQRGAARGRRRRADTHLRQGRRRDAHRIRRSGRHHRRREEHSRRMPEAGANGLLPDGQKGDARSH

SEQ ID NO: 48685 - DNA, 876 bp, Unknown
  Obtained from environmental sample
  misc_feature (1)..(876): n is a, c, g, or t
atgcccgtcatcaaatccatacgcgaggggctgataggcaacgagattctgagcattcggacgataatcaacggcacctgcaactacatactcacgcagatggcggcgcacgggctgcccttcgccgacgccctcgcggcggcgcaggagaacgggtacgcggaggccgacccgaccctcgacgtaggcggcggcgactccggccacaaggccgcgatactcgcctccctcgccggcggcggctacgtcccctacggcgatttttcggtggaggggatcaccggcattgccggcgaggacatcaagttcgccgcggaactcggctacgtcgtaaaactcttaggcatcatcaagagatgcgccgacgggttcgacgtgcgcgtgcacccggccatgctccccaaaggccacatcctggcctcggtctccgacgtgttcaacgcggtgctgctcgagggcgacgccgtcgggcagatactcatctacggcaggggcgccggcgagatgcccaccgcatccgccgtagtgggcgacatcatagacgccgcgaggaacatagcagacggatgcccgaagcgggtgccaatggactactaccggacgggcaaaaaggtgacgctcgttcccattgagcggatagagagccggtattatttgcgcttcaacgtgagcgacaatccgggggtgctggcgtctataacgagccgtttgggctccgaagggatatccatcgcctccgtcatgcagaaagagagggcgggcgaatcatgggtgccggtgatcatcatcacccatagggcgctggagcggggggtcaggagggcgattccggagatgagaagngagcgttcgttaggatgcctacgcagattataa

SEQ ID NO: 48686 - protein, 291 aa, Unknown
  Obtained from environmental sample
  DOMAIN (217)...(285): ACT domain
  misc_feature (1)..(291): Xaa is any amino acid
MPVIKSIREGLIGNEILSIRTIINGTCNYILTQMAAHGLPFADALAAAQENGYAEADPTLDVGGGDSGHKAAILASLAGGGYVPYGDFSVEGITGIAGEDIKFAAELGYVVKLLGIIKRCADGFDVRVHPAMLPKGHILASVSDVFNAVLLEGDAVGQILIYGRGAGEMPTASAVVGDIIDAARNIADGCPKRVPMDYYRTGKKVTLVPIERIESRYYLRFNVSDNPGVLASITSRLGSEGISIASVMQKERAGESWVPVIIITHRALERGVRRAIPEMRXERSLGCLRRL

SEQ ID NO: 48687 - DNA, 552 bp, Unknown
  Obtained from environmental sample
  misc_feature (1)..(552): n is a, c, g, or t
atgaacgatatgcgatacatcagcacgaggggcaactcggaaccgctgtcgtttgccggggcggtgatggaggggatggtctcttcgggggggctgtttgtccctgaaaagattccgtgtgtggacttttcaaagttgaccgggttgtcatatcgagagatcgccgttgccgtattgactccgtttatgggcgggtttgacggcggggagatcgcgggttgcgtgaacgaggcctacacgttcgagagtttcgatattccagaagtggtaaagacggttcccattgggaataatcgttatatattagaattgtggcacggaccgactgcggcgtttaaagacgttgcgttgcagatcatgccgcagtttatgcggttttcaaaggttaagtgcgcggataattcccgtacgttgatactcgtggcgacctccggcgataccggcaaggcggcgctggaggggttcaagaacagggaggggatatcgatcgctgtcttctaccctcacggcggcgtcagcaaaatacagcggtgcagatgctcggccatctga

SEQ ID NO: 48688 - protein, 183 aa, Unknown
  Obtained from environmental sample
  misc_feature (1)..(183): Xaa is any amino acid
MNDMRYISTRGNSEPLSFAGAVMEGMVSSGGLFVPEKIPCVDFSKLTGLSYREIAVAVLTPFMGGFDGGEIAGCVNEAYTFESFDIPEVVKTVPIGNNRYILELWHGPTAAFKDVALQIMPQFMRFSKVKCADNSRTLILVATSGDTGKAALEGFKNREGISIAVFYPHGGVSKIQRCRCSAI

SEQ ID NO: 48689 - DNA, 624 bp, Unknown
  Obtained from environmental sample
  misc_feature (1)..(624): n is a, c, g, or t
gtgttaggtgtaattgactacggcgcgggaaatcttggctccgttatgaacgcgctcaagcggctttccgttccggcgcggtttgcggcgggaccgcaggagctttcactttcaaattcgccatttgagaaaataatttttcccggagacggtcattttgcgaccgcaatggcgtcgctgactcaatcaggttacgcgcaggcgttatgtgaatggataaaagcggacaagccatttctgggaatctgtataggcttacagttgttatttgaaacttccgaagaagccccgcctgttgatggcagggaagtacgcggtctttccgtaattccgggaacagtgcggcgttttcccgggcgaaaggttccgcaaattggctggaatcagactacagcgcgaaaagagtcaaaaatcttccgtggcttaaacgataacagttttttctactatatacattcgtactatgccgaccctgctgacgattcggtatgcgccgcccagactgagtactatgtccgctactgttgcgcagttgaacgcggcgcgttagcagcggtgcaatttcaccctgaaaaatcaggtgcggcagggcttgcccttctgcaaaattgggtggagggatag

SEQ ID NO: 48690 - protein, 207 aa, Unknown
  Obtained from environmental sample
  DOMAIN (40)...(160): CobB/CobQ-like glutamine amidotransferase domain
  misc_feature (1)..(207): Xaa is any amino acid
MLGVIDYGAGNLGSVMNALKRLSVPARFAAGPQELSLSNSPFEKIIFPGDGHFATAMASLTQSGYAQALCEWIKADKPFLGICIGLQLLFETSEEAPPVDGREVRGLSVIPGTVRRFPGRKVPQIGWNQTTARKESKIFRGLNDNSFFYYIHSYYADPADDSVCAAQTEYYVRYCCAVERGALAAVQFHPEKSGAAGLALLQNWVEG

SEQ ID NO: 48691 - DNA, 1347 bp, Unknown
  Obtained from environmental sample
  misc_feature (1)..(1347): n is a, c, g, or t
gtgaacgaagaaattaccgaagatatcgcggcggccattgacgcagccggcgttgagaccgtgcggataaggacggttcttacctgtgaggcgaagtatggcgtttgcagaaaatgttacgggcgtaatcttgccacaaaccgcgcggtggatatcggggaggccgtcggaacaatagcggcgcagtccatagggcaacctggtacccagcttacaatgcgtaccttccacatcggcggcgtcgctacgaaggtcagcgaagagagccgtataactttaaaatatcccgtgtatatcagggatgttgttggaacgcatatacggcttgataacggacatttacttttttcaagaagaggccacgcgattgtcaacaaagttatgaaagagtataaacttgaacacggtgataagctgatgacggctgacggaaagagaatcaacaggggcgatgtaataattaaacgcggtggggaagatattatttctcctgaaatcgcgtatgcgcttatattgaagaaaaatgaagtagaaacactttaccttatcggtcaggatcaaaaaatagaaatcaggaacggttccgactttgaggcgcaaaaaggcacggttgtagaagccgataaaaacatcgcgacgtttgacccgttctccgacccgattatcgcggaagcgagcggaattgttaaatatgaggatattattcttggcaccacccttaaagaagaagttgacgaagacacgggcaacattgaaaaacgcataacagaattccagcatgaaagcaaacaaccgcgcgtctttattgtagatgatcatgaaaatcaaattgcgtcataccacctgccctccggcgcttatattcaggttgacgaaggggagcgaattaaagcggggcgcacaatagcgaaaaccttaaaagaatcggcgaaagccatggatattacgtcaggtcttccgcgcgtcagcgaactttttgaagcgcgtaaaccaaagagcccggcggttctcgcgcaggtttccggaaccgtgtatttcaaagacccggtgaaaggcaagcgaaaaatttctattgttgataattttggcagggaatttacgcatttaataccgatgaacaaacggctcttggtgcgtgacggcgacactgtggaagcgggagaactgctctgtcagggagccatcaatccgcatgatgttctgtatatcctcggtgagggaaaattacagcgttatctgatggatgaaatacaaaacgtataccgcttgcagggcgtgtcaataaatgacaaacatatcggtgtaatcatcaggcagatgatgcgtaaagtggaaataagattttag

SEQ ID NO: 48692 - protein, 448 aa, Unknown
  Obtained from environmental sample
  DOMAIN (5)...(447): RNA polymerase Rpb1, domain 5
  misc_feature (1)..(448): Xaa is any amino acid
MNEEITEDIAAAIDAAGVETVRIRTVLTCEAKYGVCRKCYGRNLATNRAVDIGEAVGTIAAQSIGQPGTQLTMRTFHIGGVATKVSEESRITLKYPVYIRDVVGTHIRLDNGHLLFSRRGHAIVNKVMKEYKLEHGDKLMTADGKRINRGDVIIKRGGEDIISPEIAYALILKKNEVETLYLIGQDQKIEIRNGSDFEAQKGTVVEADKNIATFDPFSDPIIAEASGIVKYEDIILGTTLKEEVDEDTGNIEKRITEFQHESKQPRVFIVDDHENQIASYHLPSGAYIQVDEGERIKAGRTIAKTLKESAKAMDITSGLPRVSELFEARKPKSPAVLAQVSGTVYFKDPVKGKRKISIVDNFGREFTHLIPMNKRLLVRDGDTVEAGELLCQGAINPHDVLYILGEGKLQRYLMDEIQNVYRLQGVSINDKHIGVIIRQMMRKVEIRF

SEQ ID NO: 48693 - DNA, 582 bp, Unknown
  Obtained from environmental sample
  misc_feature (1)..(582): n is a, c, g, or t
atgcgcattacccctcttgacattaggaagcagccgttcccccgcgccttacgcgggtgcgattcgcacgccgtctacagtttccttgagcttgtggccggggagtacgaggtgctaatccgccagaacaacgagttcgccacgcagataaagtgtctggaggagcagctcggaaagtacacggggatagagcgcgtgctgaacgagacgctgatgagcgcccagcggtcgagcgacgaggcccgggtgaacgcgcagaaagaggcggagcttatcataaaggacgctcagatacgcgccgaccgctacgaggccgaggcacgtcagcgggtcaacgcgcttgagagtgagatcatctccatccgcaaccagcgcgacagcttcctcgcccgcttcaaggcgatgctttcgacgcagctgaatctgctggaggtgataagcggcgacctgcgcagcgacgaccaaggcgaacaggcggcaaccgaaccgccgcgcgggcggcaacagacgcagccgcagtccgccccgtcgttccccccgccgcagaggggggtgccgccgcaaccgatcatcacaggttaa

SEQ ID NO: 48694 - protein, 193 aa, Unknown
  Obtained from environmental sample
  DOMAIN (1)...(161): DivIVA protein
  misc_feature (1)..(193): Xaa is any amino acid
MRITPLDIRKQPFPRALRGCDSHAVYSFLELVAGEYEVLIRQNNEFATQIKCLEEQLGKYTGIERVLNETLMSAQRSSDEARVNAQKEAELIIKDAQIRADRYEAEARQRVNALESEIISIRNQRDSFLARFKAMLSTQLNLLEVISGDLRSDDQGEQAATEPPRGRQQTQPQSAPSFPPPQRGVPPQPIITG

SEQ ID NO: 48695 - DNA, 1002 bp, Unknown
  Obtained from environmental sample
  misc_feature (1)..(1002): n is a, c, g, or t
atgagttatcgcgacaacgatgtgggtggaaactacctcggcaatcctaacgttggtggttctattcgttgcatcctagacgaaaagaaaatagaagcgaaacaaaggattgaaaaatcatctacttatttcacggattcgcggaacggtcagaaatatcgggctgtgaaaatagatgggaagacgtggatggcggagaatctcaattataagacggatagctcttggtgttacggaaatgatgaatcaaagtgtaagcaatacggtagactgtatgattggaatacggcgaagacggtgtgtcctaccggatggcatctgccgacacaaggggagtggaacgatttggtaacggcggcaggtgaagaaagagtggttggcaaagtgcttaaatcggcgacggtgtggaatggtgtagatggttggggattttcggctctgcccggtggattcaggtactccgatggtagcttcgcctacatcggtggtgtcggtggcgtcggaaactggtggacagctacgaaaagcgggagtaaagccttctgctatactgtgatctccaacgccgattacgtgcaggtgaaccccagtgacaagagagaaggttattctgttcgttgtattgagggtgatacgaaagtggaagagaatcaaagggttgagaatatatctagttatttcacggattcgcggaacggtcagaaatatcgagccgtgaaaataggcgtgaatacatggatggcagagaatcttaattataagacgggtaattctttgtgttacgaaaatgatgaatcaaggtgtaagcaatacggtagactatatgattggaatacagcgaagacggcatgtccagacggatggcatctgtcgacaaaagaggagtgggaggggttggtaattgtggcgggtgcaaaagatgttgctggtcgtgtgctaaaatccgagacagagtggaatggtgtgtacagtttgggattttctagctttgccgggcggtag

SEQ ID NO: 48696 - protein, 333 aa, Unknown
  Obtained from environmental sample
  misc_feature (1)..(333): Xaa is any amino acid
MSYRDNDVGGNYLGNPNVGGSIRCILDEKKIEAKQRIEKSSTYFTDSRNGQKYRAVKIDGKTWMAENLNYKTDSSWCYGNDESKCKQYGRLYDWNTAKTVCPTGWHLPTQGEWNDLVTAAGEERVVGKVLKSATVWNGVDGWGFSALPGGFRYSDGSFAYIGGVGGVGNWWTATKSGSKAFCYTVISNADYVQVNPSDKREGYSVRCIEGDTKVEENQRVENISSYFTDSRNGQKYRAVKIGVNTWMAENLNYKTGNSLCYENDESRCKQYGRLYDWNTAKTACPDGWHLSTKEEWEGLVIVAGAKDVAGRVLKSETEWNGVYSLGFSSFAGR

SEQ ID NO: 48697 - DNA, 1149 bp, Unknown
  Obtained from environmental sample
  misc_feature (1)..(1149): n is a, c, g, or t
atgagcaagtcgcaaaaaaattataccgatcccgtggatgttattaacacttacggttccgacgccgtaaggctctttctggttcattccgcgctgatcaaagccgacgatctgcgttacagcgacgacggcgtgcgtgaggtgctaaaaagcatcataatccccctgtggaacgcgtacagcttttttgttacctacgcgaatatcgataaaattaccgcttccggcgcgcccgaaaaacccgccaatcctctggaccaatggatactttcagaggcgcagactttaatcgaaaaagttggcggcgcgcttgacgtttacgacttaagccgcgccgtagacccaatcntgcgtttcatagaccttttgaacaactggtacatccgccgctcccgccggcgtttctggcgtcccatcgcaagcgatgggcgcggaaccgacagcgacaagctggaagcttacggagtcctctacgaagcccttaaaacattaataacagtcgcttctcccttcatgccctttaccacggacgctatctggcagaatctgcgtctgcaaaacgatcccgaatccgtgcatttaacggactatcctgcgccaaacgaaaaacgccgcgacagcgcgcttgaattccgtatggcctgcgttatgtccgccgtttcaatcgggcgttcgctgcgctcccagtacaatatcaaaatgcgccagccgctgggaaaggcggaagttgttacgcgcaatgaagacgagaaaaacgcacttataggcatggcggacataatccgcgaggaactgaatgtaaaagaagttgttttttcggataaagaggaagatttggtagagtacgaagtaaaagccaacttccgcgtattgggaaaagagctcggaaaggacatgaaatccgccgccgcaaaaatagaggctcttaagcacgcccagattcaaagcgtaatagaaggcgcgccgctttcgatagacattccgggcgaaggcggcggcacaagagcgattgtaataactgcggacaaactcgacatccgcagaatagaaaaagcgaacctgcgcgtgcttaacgagggcaccatcacagtcggtctgatacagaaattacccgcgaactttcgatggaaggcgacatccgcgacttga

SEQ ID NO: 48698 - protein, 382 aa, Unknown
  Obtained from environmental sample
  DOMAIN (86)...(243): Anticodon-binding domain
  misc_feature (1)..(382): Xaa is any amino acid
MSKSQKNYTDPVDVINTYGSDAVRLFLVHSALIKADDLRYSDDGVREVLKSIIIPLWNAYSFFVTYANIDKITASGAPEKPANPLDQWILSEAQTLIEKVGGALDVYDLSRAVDPIXRFIDLLNNWYIRRSRRRFWRPIASDGRGTDSDKLEAYGVLYEALKTLITVASPFMPFTTDAIWQNLRLQNDPESVHLTDYPAPNEKRRDSALEFRMACVMSAVSIGRSLRSQYNIKMRQPLGKAEVVTRNEDEKNALIGMADIIREELNVKEVVFSDKEEDLVEYEVKANFRVLGKELGKDMKSAAAKIEALKHAQIQSVIEGAPLSIDIPGEGGGTRAIVITADKLDIRRIEKANLRVLNEGTITVGLIQKLPANFRWKATSAT

SEQ ID NO: 48699 - DNA, 975 bp, Unknown
  Obtained from environmental sample
  misc_feature (1)..(975): n is a, c, g, or t
atggccgagttgtcggctccccgtcacggtttctacaatatgatgatggggtttatgaactacctgaccaaaaagacgggaaaatccaacggcaaaacggcggttttccccggctgggtaaaccccggcgatatccgggagttgaagcgtatcgccgggctctttggccttgcgacaacgtttttcccggatcagagcggggtgatggacgcgccgatgaccggcaagtacctgatgtacccggaaggcggaacgactattgatgaaattcgaggcctgggcgacagcgattccctgattgcgttaggtgaaattataagccttgagccggccgaactcttaaagaaaaagtggaaggtggactttaccctcctgccgctgcctgtgggcgtgacgtttaccgaccaatatgtgcttgccctgcggaagcaggcgaaaatagcggtttccccggaattggaacgcgagcgcgggcagttggtggacttgctgctggattcccaccagtacacctatcaaaagaaggccgcgatattcggcgacccggacccggtaatcgcccttacctcgcttgccctggaaatgggcatgacgccgaaatacgtcatcacgggaacgccgaaagaagagtttaccggcagggttaattccctgctcgcaaggtacggcgtaagcggctgcacggtaaaggcgaacgcggatttgttcgaactgcaccagtggattaagaacgagcctgtggatttgctgatcggcacgacctacggcaagcagatagcgaaagccgaggatatcccctttatccgcgccggcttccctgtgcttgaccgctacggcggaccgttacagccgatcgtgggctacaccggggcatacgccttgttgaacaaattacaaacgctttgcttgacaggttcgaccgcgacgccgcggacgaagactttgaaattgttttataagtttgcaaaggtgtaa

SEQ ID NO: 48700 - protein, 324 aa, Unknown
  Obtained from environmental sample
  DOMAIN (1)...(304): Nitrogenase component 1 type Oxidoreductase
  misc_feature (1)..(324): Xaa is any amino acid
MAELSAPRHGFYNMMMGFMNYLTKKTGKSNGKTAVFPGWVNPGDIRELKRIAGLFGLATTFFPDQSGVMDAPMTGKYLMYPEGGTTIDEIRGLGDSDSLIALGEIISLEPAELLKKKWKVDFTLLPLPVGVTFTDQYVLALRKQAKIAVSPELERERGQLVDLLLDSHQYTYQKKAAIFGDPDPVIALTSLALEMGMTPKYVITGTPKEEFTGRVNSLLARYGVSGCTVKANADLFELHQWIKNEPVDLLIGTTYGKQIAKAEDIPFIRAGFPVLDRYGGPLQPIVGYTGAYALLNKLQTLCLTGSTATPRTKTLKLFYKFAKV

SEQ ID NO: 48701 - DNA, 825 bp, Unknown
  Obtained from environmental sample
  misc_feature (1)..(825): n is a, c, g, or t
ttgcaaaggtgtaaggcagctgtgaacacaagcatactggaagaacgcaagtcatcaatatcacaaaaacgcggaaccggattgttctgtgagcgcgaaagtgtctcaggcgcggtaagccagcgcgcatgcgtatactgcggcgcgagggtagtgcttaatcccattaccgacgcttaccatatcgttcacggaccaatcgggtgcgccagttatacttgggacattcgcggctctcttacatccggcgcggacactttccgcaacagcttttccaccgacttgcgcgagaccgacattgtgttcggcggcgtgaaaaaacttaccgccgccattgacgagctaatggaaaaagcgcagcccgtaccgaaactgatctttgtgtacgctacctgcattgtcggcgttatcggcgatgatgtggaagcggtgtgccgcgcggcgcaggcgaagtacggtatccgcgttattgcggtaaaggctcccggcttttctggaaccaagtctcaaggctacaagctcgcctgcgaagcgatcatgacgttgattacgccgcacaaaaaccagaccaaaaaattcggcgtaaatattttgggcgattacaatcttgccggagagatgtggatcatcaaaggttatctggagcagataggcatacccgtcatctcaacaatcacaggcgattcatcttacgaaaagctgattaacgctcccggtgctacgcttaacattgtgcagtgcgccggttcttcggcgtatctcgcagagcggatgagcgaagagatgtgtataccctatgttaaagtaagttttttcggaaattga

SEQ ID NO: 48702 - protein, 274 aa, Unknown
  Obtained from environmental sample
  DOMAIN (36)...(274): Nitrogenase component 1 type Oxidoreductase
  misc_feature (1)..(274): Xaa is any amino acid
MQRCKAAVNTSILEERKSSISQKRGTGLFCERESVSGAVSQRACVYCGARVVLNPITDAYHIVHGPIGCASYTWDIRGSLTSGADTFRNSFSTDLRETDIVFGGVKKLTAAIDELMEKAQPVPKLIFVYATCIVGVIGDDVEAVCRAAQAKYGIRVIAVKAPGFSGTKSQGYKLACEAIMTLITPHKNQTKKFGVNILGDYNLAGEMWIIKGYLEQIGIPVISTITGDSSYEKLINAPGATLNIVQCAGSSAYLAERMSEEMCIPYVKVSFFGN

SEQ ID NO: 48703 - DNA, 873 bp, Unknown
  Obtained from environmental sample
  misc_feature (1)..(873): n is a, c, g, or t
atgaatcaagtgtttgtcaacgaacgttttttcctttcacggggaatagagacgtctcttgcggacgcataccgcgccgcccgcggaacggcgctggaaaacgccgcgatggggcaaacaacgctcctgaacgcctcgcctcagtttaacagcacgcaggtttcaacgtccctggcggccctgtttttccccatacagggcggaggtggctgcgtcctgttttcgagcgacaacctgaacgagagcttcggcatgggagttaacacgtcataccttatcaacgccgacggcgacgttatcgcggactctgacatagaaagggtcaggaaccgggtgaatgtggcggaacaggacattatcaggcggatatttaacagcgccgaccgcaacaaacagatgttggttgaacttgacaatctacgccactaccttgcctacacgcggctgaataccgccggaagcgtcgtaatcaccacaatcgaatacgacaaggtttttgaaggaataaacgcgacgacgcggcgcaatttgtacctgaccgcggcggttttatttctttcaataatgtgcgtctggtttttcgcaaaaaccatatccgtgccgttaaagatgctggcagccgcggcgcggagcatagaaggcggggtgtttaacgtggaattacagcccgcgggcggagatgaaatcggcatgttaacgtccagcttcgggaagatgagcgcggcgctggggatattcgggaagtttaccaaccgcgacatagcgattcaggccatgcggggccagataaagccgggcggccagccgaaacacgcgaccatctttttctcggacatccgggggctttaccgagaagtcggaaaacttccgtga

SEQ ID NO: 48704 - protein, 290 aa, Unknown
  Obtained from environmental sample
  DOMAIN (176)...(245): HAMP domain
  misc_feature (1)..(290): Xaa is any amino acid
MNQVFVNERFFLSRGIETSLADAYRAARGTALENAAMGQTTLLNASPQFNSTQVSTSLAALFFPIQGGGGCVLFSSDNLNESFGMGVNTSYLINADGDVIADSDIERVRNRVNVAEQDIIRRIFNSADRNKQMLVELDNLRHYLAYTRLNTAGSVVITTIEYDKVFEGINATTRRNLYLTAAVLFLSIMCVWFFAKTISVPLKMLAAAARSIEGGVFNVELQPAGGDEIGMLTSSFGKMSAALGIFGKFTNRDIAIQAMRGQIKPGGQPKHATIFFSDIRGLYREVGKLP

SEQ ID NO: 48705 - DNA, 591 bp, Unknown
  Obtained from environmental sample
  misc_feature (1)..(591): n is a, c, g, or t
atggttgaatgtgtcgaaaaaaccaacggtattatcgataaatttatcggcgacgctgtgatggcgcattggggaaccgcttataccacgggaagcccgcaggcggacgcgctcaactgcgtcaaggcggcgatgatgatgagaatcgctctgtataaattaaatatgaaccgcaaaaaagaaaacatgggaaacccgcccattacaatcggctgcggcataaacacaggcgtagttaccgccggacagattggctccgatctccgcatggagtacaccgtcataggcgaccctgtgaatctcgcctcgcgtgttgaggcgcttaacaaaccgcttggcacggacattctgattaccgaagatacatggaaccttgtaaaggatcaatttatcgttgaagaaatgccgtctgtaaccgtaaagggaaaagaaaaacccgtgcggctttttgcggttgtaaatcatatctccgttcaatcgggaccaaaaactttggcggaagtacggaaaatattaggtataaaaccgcctgatatttcaaaggctgatgtaaacgcagaagaagttaaatacaagattggcggcaaataa

SEQ ID NO: 48706 - protein, 196 aa, Unknown
  Obtained from environmental sample
  DOMAIN (1)...(154): Adenylate and Guanylate cyclase catalytic domain
  misc_feature (1)..(196): Xaa is any amino acid
MVECVEKTNGIIDKFIGDAVMAHWGTAYTTGSPQADALNCVKAAMMMRIALYKLNMNRKKENMGNPPITIGCGINTGVVTAGQIGSDLRMEYTVIGDPVNLASRVEALNKPLGTDILITEDTWNLVKDQFIVEEMPSVTVKGKEKPVRLFAVVNHISVQSGPKTLAEVRKILGIKPPDISKADVNAEEVKYKIGGK

SEQ ID NO: 48707 - DNA, 777 bp, Unknown
  Obtained from environmental sample
  misc_feature (1)..(777): n is a, c, g, or t
atggcgtactttgacgctcttaaagaagtggaacgcgaagacgccgaagtcccaaaccatntgcgggacgcgagccgcgacaaggaaagtttcggccacggagagggatatgtctatcctcacgcctaccgcgatcactgggcggcccagcagtacctgcccggcgcgcttaagggcagaactttttacattccgtcccaaatcggctacgagggaagaattcgccaggatgttttacaaaagcgcgaactgcaggcggccattgttttcggcgacaatcaggaacaggctggggaactgctttcatggtcgcaggcggcaaagggacgcgaaggctggtacaagcgccttgaatcaggaagaagcgccctgctcttgtgcaacagggatacaattttttcaacagcgtcccccggccgtcaggggcgtgtcttaatacctaacgccaacgacggccttctgctctgggagagtctccgccgctgtcccgaaggactgacagccgcgcttgtaaacacatccgccgccaaagacgctctcctgcgttacgcgcaaacgctggacgaggcagaaaagccgctgattgccgttacggaagatttactgccgtcccgaaaacagtgcgaagaatggttttcctgctccgtttttgaccacattttattaaaatgcccgcgttttaatacggagccgtctcaaaccgcttgtaacgcaaagccattattggcaaaaaacggcaattcttgtcctgtttttctccccgccacgttacggtga

SEQ ID NO: 48708 - protein, 258 aa, Unknown
  Obtained from environmental sample
  misc_feature (1)..(258): Xaa is any amino acid
MAYFDALKEVEREDAEVPNHXRDASRDKESFGHGEGYVYPHAYRDHWAAQQYLPGALKGRTFYIPSQIGYEGRIRQDVLQKRELQAAIVFGDNQEQAGELLSWSQAAKGREGWYKRLESGRSALLLCNRDTIFSTASPGRQGRVLIPNANDGLLLWESLRRCPEGLTAALVNTSAAKDALLRYAQTLDEAEKPLIAVTEDLLPSRKQCEEWFSCSVFDHILLKCPRFNTEPSQTACNAKPLLAKNGNSCPVFLPATLR

SEQ ID NO: 48709 - DNA, 1488 bp, Unknown
  Obtained from environmental sample
  misc_feature (1)..(1488): n is a, c, g, or t
atgcgccctcgagtccttgaggagattatcgggcaggatcacattgtcggcccgggaaggctgctgaggcgggcaatacaggctgacaggctttcatcactgatattctacgggccgcccggcacgggcaagaccagccttgctaaagtaatagcgaataccacaagggccgcttttgaaagccttaacgcggtgctgtcaggcgtaaaaaacatacgcgaggccatagaccgcgccgacgaaaggttcaggctctacggcaagcgcaccatcttatttgttgacgaagtgcaccgctggaacaaggcccagcaggacgccctactgccctgggtggaaaacggcacggtaatcctcgtgggagcgaccacggaaaaccctttctttgaagtgaaccgggcgcttgtcagccgcagccggattttccagttgaagccgctggacgccgaggggctcatgaagacggcccgcaacgccataacggacgcccagcggggttacggcaaatggaagatcagctttgaaccgggcgcgcttgaacatcttgtcgaggtttcaagcggcgacgcgcgcagcctcttaaacgccctcgaattagccatagagactagttcatggagtttacccgaaggggaaactcctaagcgaaccgtcgaagacggttcgcactggcctccagagccgggcgccttaatccacatttccatggaagcggctgaggaaagcatacaacgccgcgccgttctgtacgaccgcgacggcgactatcattttgacacgataagcgccttcatcaaaagcgtaaggggcagcgatcccgacgcggcgctgtactggatggctaanatgctccgcgcgggcgaggaccccagctttattttcaggcgcatgataatccttgccagcgaagacgtgggccttgccgacccttcggcgctttccgtagttatctcctgcgcgcaggcctttgaacgtatagttttccggaaggaaactttcctttatcccacgcctgcctgtacctcgcgacatgtcccaaatccaacacgacaatggcgtactttgacgctcttaaagaagtggaacgcgaagacgccgaagtcccaaaccatntgcgggacgcgagccgcgacaaggaaagtttcggccacggagagggatatgtctatcctcacgcctaccgcgatcactgggcggcccagcagtacctgcccggcgcgcttaagggcagaactttttacattccgtcccaaatcggctacgagggaagaattcgccaggatgttttacaaaagcgcgaactgcaggcggccattgttttcggcgacaatcaggaacaggctggggaactgctttcatggtcgcaggcggcaaagggacgcgaaggctggtacaagcgccttgaatcaggaagaagcgccctgctcttgtgcaacagggatacaattttttcaacagcgtcccccggccgtcaggggcgtgtcttaa

SEQ ID NO: 48710 - protein, 495 aa, Unknown
  Obtained from environmental sample
  DOMAIN (33)...(192): ATPase family associated with various cellular activities (AAA)
  misc_feature (1)..(495): Xaa is any amino acid
MRPRVLEEIIGQDHIVGPGRLLRRAIQADRLSSLIFYGPPGTGKTSLAKVIANTTRAAFESLNAVLSGVKNIREAIDRADERFRLYGKRTILFVDEVHRWNKAQQDALLPWVENGTVILVGATTENPFFEVNRALVSRSRIFQLKPLDAEGLMKTARNAITDAQRGYGKWKISFEPGALEHLVEVSSGDARSLLNALELAIETSSWSLPEGETPKRTVEDGSHWPPEPGALIHISMEAAEESIQRRAVLYDRDGDYHFDTISAFIKSVRGSDPDAALYWMAXMLRAGEDPSFIFRRMIILASEDVGLADPSALSVVISCAQAFERIVFRKETFLYPTPACTSRHVPNPTRQWRTLTLLKKWNAKTPKSQTXCGTRAATRKVSATERDMSILTPTAITGRPSSTCPARLRAELFTFRPKSATREEFARMFYKSANCRRPLFSATIRNRLGNCFHGRRRQRDAKAGTSALNQEEAPCSCATGIQFFQQRPPAVRGVS

SEQ ID NO: 48711 - DNA, 864 bp, Unknown
  Obtained from environmental sample
  misc_feature (1)..(864): n is a, c, g, or t
atgaggcgcatagataaggccaacgaatattttactgatgcggtcaacgtagatccacttaaccccaaggtatggatcgcgtatttacgtttcgggctcaacgatgctcatttgcaggttccaaacatcttttatcgcgccatggaacaggatacaaatatgttccgcgacgaatatatcctttatctggcgggagcgcaaagcacgaatttatttaacaatgaaaagcaattgcaatacctggataagttcgcggaattttatatcaatgataaagacccggatgaagagatatatttggaagtgatgaacttaatgccgcattttataaaaaatagcgatttaaccccgtttgtagaaaaaatactgcccacgcttgaaaaaagtaaacaccgcgatgatgatgccgaaaaaagttttaaatatatacgtgcaatcatcgtaatacataagctccattcggataaacgaatacacgacgtacttgttgatttaacgggatgcctgatgaaagatgaaatagacaaggatgatcggttacagatggaggtttttattgtctttcatatttcagatttacgcccgtcaataaaagtgctgaaaaacgaatatcctgattgtttcaaactaaaccaggcattttaccttgatgttcttaatgaaagaaaagaggaatttcttactgataaatacaccggaatatacaaaaaaattaggccaaaaaatgccgtatttcgcgatgatgaatactatgaccaccacaatgatgaagaaccttataaacgtgaatctcccaaagtcggacgaaacgatccatgcccgtgcgggagtggaaagaaatacaagaaatgctgcggggcttga

SEQ ID NO: 48712 - protein, 287 aa, Unknown
  Obtained from environmental sample
  DOMAIN (269)...(287): SEC-C motif
  misc_feature (1)..(287): Xaa is any amino acid
MRRIDKANEYFTDAVNVDPLNPKVWIAYLRFGLNDAHLQVPNIFYRAMEQDTNMFRDEYILYLAGAQSTNLFNNEKQLQYLDKFAEFYINDKDPDEEIYLEVMNLMPHFIKNSDLTPFVEKILPTLEKSKHRDDDAEKSFKYIRAIIVIHKLHSDKRIHDVLVDLTGCLMKDEIDKDDRLQMEVFIVFHISDLRPSIKVLKNEYPDCFKLNQAFYLDVLNERKEEFLTDKYTGIYKKIRPKNAVFRDDEYYDHHNDEEPYKRESPKVGRNDPCPCGSGKKYKKCCGA

SEQ ID NO: 48713 - DNA, 606 bp, Unknown
  Obtained from environmental sample
  misc_feature (1)..(606): n is a, c, g, or t
atgtttagggctattgccgaaacctcaggcggcctggatctctgcgtcagcaacgccggggtgctaaaagccggcagcgttctggaacagcctctggatgactttaaatttgtaacggatataaactacacaggcttttttataatatgcaaacacgccggacggttcctgcgaacccagcattatacagcgcctgactggaaaacagacatagtgcagataaactcaaaatccggcctggaaggctccaataaaaacggcgcttacgctggaggaaaattcggcggccttggcctcgtggagagctttgcccttgaattggtcgaatacaatatcaaagtaaacgccatctgccctggtaattttttggacggccccctctggtcggatcctgaaaaagggctttttgtccaataccttaaaacaggcaaagtgaaaggggcacaaacaattgccgatgtccgcgctttttacgagtccagggttccgatgaaaaggggctgtacagggaaagacctggcccgagctcttttttacatcgtggagcaggaatacgaaacagggcaagccattcctgtaaccggcgggcaggtaatgctgcactaa

SEQ ID NO: 48714 - protein, 201 aa, Unknown
  Obtained from environmental sample
  misc_feature (1)..(201): Xaa is any amino acid
MFRAIAETSGGLDLCVSNAGVLKAGSVLEQPLDDFKFVTDINYTGFFIICKHAGRFLRTQHYTAPDWKTDIVQINSKSGLEGSNKNGAYAGGKFGGLGLVESFALELVEYNIKVNAICPGNFLDGPLWSDPEKGLFVQYLKTGKVKGAQTIADVRAFYESRVPMKRGCTGKDLARALFYIVEQEYETGQAIPVTGGQVMLH

SEQ ID NO: 48715 - DNA, 546 bp, Unknown
  Obtained from environmental sample
  misc_feature (1)..(546): n is a, c, g, or t
gtgctgaaggccggcagcgttctggaacagccgctctctgattttaagtttgttacggatataaactactccggcttttttattatctgcaagtacgccggccggctcctgcgaacgcagcattttaccgcgccggactggaagaccgacattgtgcagatcaactcaaagtccggcctggaaggttctaacaagaacggtgcttacgctggaggaaaattcggcggcctgggcctggtagctagctttgccctagaattggttgaatacaatattaaggtaaacgccatttgcccgggcaactttcttgacggccccctctggtcggatcctgaaaaagggctttttgtccaataccttaaaacaggcaaagtgcagggagcaaagaccgttgccgatgtccgcgccttttacgagtcaaaggttcccatgaaaaggggctgtaccgggaaagatttggcccgcgcccttttttacatcgtggagcagaaatacgaaaccggacaggctattcctgtaaccggcggccaggtaatgctgcactaa

SEQ ID NO: 48716 - protein, 181 aa, Unknown
  Obtained from environmental sample
  misc_feature (1)..(181): Xaa is any amino acid
MLKAGSVLEQPLSDFKFVTDINYSGFFIICKYAGRLLRTQHFTAPDWKTDIVQINSKSGLEGSNKNGAYAGGKFGGLGLVASFALELVEYNIKVNAICPGNFLDGPLWSDPEKGLFVQYLKTGKVQGAKTVADVRAFYESKVPMKRGCTGKDLARALFYIVEQKYETGQAIPVTGGQVMLH

SEQ ID NO: 48717 - DNA, 621 bp, Unknown
  Obtained from environmental sample
  misc_feature (1)..(621): n is a, c, g, or t
atggatgaaaaaatatttattcggcgggcggtgttatccgatcttccctatttatatgaaatatgtcttaaaaccggggacgaaagcaaagatgccacctctctcttttcagatccatacacaataggccaatactatgtcgcgccgtatttggtatacccatacggaatttgttttgtggctgattatgaataccgccctcaaggttacattgtggcggttcctgatactatcgcctttgataaatggatggaagataagtggctgcctccgttaagaaaacgctgccccgagccttttcctccgtcccgttccgagaaagaaaaccgcataatcaagcttttttacaaacgccattttcctgtagatgcccaaccatatcttgaggattatccggcgcaccttcatattgatatgcttccctgcatacagcaaaagggagtagggcgtaatttaatgaacagccttttcgcggaactggcacggttaaaggtaaccggtctgcatcttggtgttggctcatcaaataccggcgcggttgctttttacaaaaaaacaggttttgccgtgctggaagagcatgaatggggtttcacattggggaagctctgtagtgtttag

SEQ ID NO: 48718 - protein, 206 aa, Unknown
  Obtained from environmental sample
  DOMAIN (59)...(189): Acetyltransferase (GNAT) family
  misc_feature (1)..(206): Xaa is any amino acid
MDEKIFIRRAVLSDLPYLYEICLKTGDESKDATSLFSDPYTIGQYYVAPYLVYPYGICFVADYEYRPQGYIVAVPDTIAFDKWMEDKWLPPLRKRCPEPFPPSRSEKENRIIKLFYKRHFPVDAQPYLEDYPAHLHIDMLPCIQQKGVGRNLMNSLFAELARLKVTGLHLGVGSSNTGAVAFYKKTGFAVLEEHEWGFTLGKLCSV

SEQ ID NO: 48719 - DNA, 357 bp, Unknown
  Obtained from environmental sample
  misc_feature (1)..(357): n is a, c, g, or t
atggaagatgaaatagacaaagatgatcggctgcagatggaggtttttattgtctttcatatttctgatttacgcccgtcaataaaagtgctgaaaaacgaatatcctgaatgtttcaaactaaaccaggctttttaccttgatgttcttaatgaaagaaaagaggaatttcttactgataaatacaccggaatgtacaaaaaaatcaggccaaaagatactgtatttcacgatgatgaattctatgatgacgacgatgatgataaaccttataaacgtgaatctcccaaagtcggacgaaacgatccatgtccttgcgggagcggaaaaaaatacaaaaagtgctgcggggcttga

SEQ ID NO: 48720 - protein, 118 aa, Unknown
  Obtained from environmental sample
  DOMAIN (100)...(118): SEC-C motif
  misc_feature (1)..(118): Xaa is any amino acid
MEDEIDKDDRLQMEVFIVFHISDLRPSIKVLKNEYPECFKLNQAFYLDVLNERKEEFLTDKYTGMYKKIRPKDTVFHDDEFYDDDDDDKPYKRESPKVGRNDPCPCGSGKKYKKCCGA

SEQ ID NO: 48721 - DNA, 384 bp, Unknown
  Obtained from environmental sample
  misc_feature (1)..(384): n is a, c, g, or t
ttggtcgatgataaaatgcacgcccgttccaccggtccttattcgctggtaacccagcagccgctgggcggtaaggcccagttcggcgggcagcgtttgggcgaaatggaagtgtgggctttggaagcctacggcgcggcgcataccttgcaggaacttttgacaattaagtcggatgatatgaccgggcgttccaaaatttacgaggccattgtaaaaggagagccttccactacggcgggcataccggaatcgtttaatgtactggtgcaggaactgagggggcttgctctggacttggctatttttgataacaagaataagcaaattccccttactgaaaaagatgaagaactgattgcaaaatcaggaagtaacttctag

SEQ ID NO: 48722 - protein, 127 aa, Unknown
  Obtained from environmental sample
  DOMAIN (29)...(105): RNA polymerase Rpb2, domain 7
  misc_feature (1)..(127): Xaa is any amino acid
MVDDKMHARSTGPYSLVTQQPLGGKAQFGGQRLGEMEVWALEAYGAAHTLQELLTIKSDDMTGRSKIYEAIVKGEPSTTAGIPESFNVLVQELRGLALDLAIFDNKNKQIPLTEKDEELIAKSGSNF

SEQ ID NO: 48723 - DNA, 888 bp, Unknown
  Obtained from environmental sample
  misc_feature (1)..(888): n is a, c, g, or t
atgcgggatatacaggaatttgattcaataatgattcggctcgcttctccggagatgatcagaaactggtcatacggggaagtgaaaaaaccggaaacgatcaattaccggactctccgccccgaaaaagacggcctcttctgcgagagaatttttggtacgaccaaagaatgggaatgttactgcggaaagttcaagtcgattcgttacaagggcgtaatctgcgaccgctgcggcgttgaagttacccactttaaagtgcgccgtgagcgcatgggccacattgagctggccgaccccgtcgtgcatatatggttcnttaagaccgtgccctcccacatcagttacttcctcggcatatcgaacagcaatttggagaggatcatctactacgaatcttacgtggtgatcgatccgggcgacacgaatctgcgcaaagaccagctcctcaccgaggagcagtattcagagttgatggagcagggcaaaaagttcgacgccaagatgggcgggcaggcggttttggagttgctcggcaaggtggaggtggagaaattggtgatcgagttgcgccacttggtcaagcgcgagacgtccgagcagcgccggctggagcatttaaagcgtcttcgcgtggcggaggcttttaacaggtcgaagaacgatccgcagaatatggtgctcaaggtgctgccggttctgccgccggatctgcgtccgcttgttccgctggagggcgggcgtttcgcgacttcggatttgaacgatctttaccggcgggtgataaataggaataataggctgaagaagcttttggagataaaggcgccggaggtcattctccgcaacgagaagaggatgctgcaggaggcggtcgacacctgttga

SEQ ID NO: 48724 - protein, 295 aa, Unknown
  Obtained from environmental sample
  DOMAIN (4)...(294): RNA polymerase Rpb1, domain 1
  misc_feature (1)..(295): Xaa is any amino acid
MRDIQEFDSIMIRLASPEMIRNWSYGEVKKPETINYRTLRPEKDGLFCERIFGTTKEWECYCGKFKSIRYKGVICDRCGVEVTHFKVRRERMGHIELADPVVHIWFXKTVPSHISYFLGISNSNLERIIYYESYVVIDPGDTNLRKDQLLTEEQYSELMEQGKKFDAKMGGQAVLELLGKVEVEKLVIELRHLVKRETSEQRRLEHLKRLRVAEAFNRSKNDPQNMVLKVLPVLPPDLRPLVPLEGGRFATSDLNDLYRRVINRNNRLKKLLEIKAPEVILRNEKRMLQEAVDTC

SEQ ID NO: 48725 - DNA, 480 bp, Unknown
  Obtained from environmental sample
  misc_feature (1)..(480): n is a, c, g, or t
gtgaagcccggggaaaaggaaaacaaatttttttttttgggcaatggaggcagctccgcaaccgcctttcatttttgcaatgacttaaacaaaggggccagctacgaatatcaatcccaaaagcgttttaaatttatatgtctaaatgacaatgtttccagcatgacggcttacgccaatgatgtttcctacggcgatgtatttgtagaacagcttaaaaatttttacaattccggtgatgttgtaattggtatctccggcagcggtaattcagaaaatgtaattaaagcgctggagtatgccaacgccaatgggggaattaccgtagcccttaccggatataatggcggcaaattaaaaaagattgccgggtattctgttcatgtaaacattgatgatatgcagattgtggaagatctgcatatgatgatggatcacctttccatgaaggttatttcaaacatgacgggtaaagcatga

SEQ ID NO: 48726 - protein, 159 aa, Unknown
  Obtained from environmental sample
  misc_feature (1)..(159): Xaa is any amino acid
MKPGEKENKFFFLGNGGSSATAFHFCNDLNKGASYEYQSQKRFKFICLNDNVSSMTAYANDVSYGDVFVEQLKNFYNSGDVVIGISGSGNSENVIKALEYANANGGITVALTGYNGGKLKKIAGYSVHVNIDDMQIVEDLHMMMDHLSMKVISNMTGKA

SEQ ID NO: 48727 - DNA, 378 bp, Unknown
  Obtained from environmental sample
  misc_feature (1)..(378): n is a, c, g, or t
ttgaattatggatatgcccttcttagagcaagcgctgccagagctatttgtgcggcagggttaaatcccatcttcggaattcaccatgaaaacagcactaaccccttccctttggcggatgatattatggaaccttaccgacccttggttgatttttttgctaaaaaaattaccgcatcggacattaaggaaatgaatccaacagctaaacaaatgataagcgctttcttatgggcggatttgcattttgagaacgaaaccacgcccttttatgcggctatggaaagactggctttttccctggtcaattcattcaaaactaaaaaacctcaaattgagatcgccgaattacggttacaaaaagatgacgaatcttag

SEQ ID NO: 48728 - protein, 125 aa, Unknown
  Obtained from environmental sample
  misc_feature (1)..(125): Xaa is any amino acid
MNYGYALLRASAARAICAAGLNPIFGIHHENSTNPFPLADDIMEPYRPLVDFFAKKITASDIKEMNPTAKQMISAFLWADLHFENETTPFYAAMERLAFSLVNSFKTKKPQIEIAELRLQKDDES

SEQ ID NO: 48729 - DNA, 450 bp, Unknown
  Obtained from environmental sample
  misc_feature (1)..(450): n is a, c, g, or t
ttgagaacgaaaccacgcccttttatgcggctatggaaagactggctttttccctggtcaattcattcaaaactaaaaaacctcaaattgagatcgccgaattacggttacaaaaagatgacgaatcttagctcatataaacttatgtggatgatagttctttttgatttgcctgttattactccattggagcgaaaaacagcttcccttttcagaaaatccttactggatcagggttttcatatgagccaattttcggtatattataggttattgtctgggaaagaagctctggatggttatattagcgatattcaagcccaacttccgccaaaaggcaaagtagacattattacgattacggacaagcaatatgaaggaattatttcattttcaggtaaaaagaaagaaaaaaacaagcaaaaaccctcacaattactgctattttga

SEQ ID NO: 48730 - protein, 149 aa, Unknown
  Obtained from environmental sample
  misc_feature (1)..(149): Xaa is any amino acid
MRTKPRPFMRLWKDWLFPWSIHSKLKNLKLRSPNYGYKKMTNLSSYKLMWMIVLFDLPVITPLERKTASLFRKSLLDQGFHMSQFSVYYRLLSGKEALDGYISDIQAQLPPKGKVDIITITDKQYEGIISFSGKKKEKNKQKPSQLLLF

SEQ ID NO: 48731 - DNA, 1023 bp, Unknown
  Obtained from environmental sample
  misc_feature (1)..(1023): n is a, c, g, or t
gtgcaggtaagggcggcaacctgccgcccgtccccgtcgaaagaaataaagaaagcgagacgcgttaacggattaatgaccatgaacgaatcaagaaggatagacaccgagcgtataaagaaggtggcccaaggcgtgggggacttgcccacgctgcctaccgtcgtctccaagatgatcggtatgattgacgatcagcatacctccgccgacacgctggcccgcctcatctccaccgacgcggcgctgaccgctcgcctgctcaagcgtgcgaacgcctcctactacgggtaccagcgggagatatccaccgtcaacatggccatcgcggtgctggggttcggcgccgtgaaggacatgggcctgtggctctccgtcttcgacacgttcaagggcgccggtccggcggcgacgggctttgacgccgtaaaattttgggagcacagcgcagcctgcggcgtcgccgcccgcatgctctccaaaaacagcggctcgcgctacgccggagaggccttcgtggccggtctgctgcacgacatggggaagatgatgctgaaccgatacttcggcaccgaactggtcgaagtcctaaaaaccgcgcaaaacgaaaactacgacttagacagggcggagagcgagatattgggcgtggggcacgggtacgtgggcgcgtggctggccgaaaactggaacctcccgcccatcatctgcgacgcagtaaagtaccaccacacaccgtgggaggccaaggtagagcccgccttcgtggccacggtcaccgtggccgacaccctatgccacctcacaaagataggcgactcaggcagaaaagtctgccccaagtacgacgaacgcctgtggcaaatcttcgacagcgccggtatcccgatagacgagagcgacatgaagcggctgcaggcggatttcttgatagagtacggggagtcggaagcctacgcggtttcggtcgacggtaataacaataatggtaggcccggccatgtagaacctcggccgatctga

SEQ ID NO: 48732 - protein, 340 aa, Unknown
  Obtained from environmental sample
  DOMAIN (145)...(268): HD domain
  misc_feature (1)..(340): Xaa is any amino acid
MQVRAATCRPSPSKEIKKARRVNGLMTMNESRRIDTERIKKVAQGVGDLPTLPTVVSKMIGMIDDQHTSADTLARLISTDAALTARLLKRANASYYGYQREISTVNMAIAVLGFGAVKDMGLWLSVFDTFKGAGPAATGFDAVKFWEHSAACGVAARMLSKNSGSRYAGEAFVAGLLHDMGKMMLNRYFGTELVEVLKTAQNENYDLDRAESEILGVGHGYVGAWLAENWNLPPIICDAVKYHHTPWEAKVEPAFVATVTVADTLCHLTKIGDSGRKVCPKYDERLWQIFDSAGIPIDESDMKRLQADFLIEYGESEAYAVSVDGNNNNGRPGHVEPRPI

SEQ ID NO: 48733 - DNA, 543 bp, Unknown
  Obtained from environmental sample
  misc_feature (1)..(543): n is a, c, g, or t
ttgggagcacagcgcagcctgcggcgtcgccgcccgcatgctctccaaaaacagcggctcgcgctacgccggagaggccttcgtggccggtctgctgcacgacatggggaagatgatgctgaaccgatacttcggcaccgaactggtcgaagtcctaaaaaccgcgcaaaacgaaaactacgacttagacagggcggagagcgagatattgggcgtggggcacgggtacgtgggcgcgtggctggccgaaaactggaacctcccgcccatcatctgcgacgcagtaaagtaccaccacacaccgtgggaggccaaggtagagcccgccttcgtggccacggtcaccgtggccgacaccctatgccacctcacaaagataggcgactcaggcagaaaagtctgccccaagtacgacgaacgcctgtggcaaatcttcgacagcgccggtatcccgatagacgagagcgacatgaagcggctgcaggcggatttcttgatagagtacggggagtcggaagcctacgcggtttcggtcgacggtaa

SEQ ID NO: 48734 - protein, 180 aa, Unknown
  Obtained from environmental sample
  misc_feature (1)..(180): Xaa is any amino acid
MGAQRSLRRRRPHALQKQRLALRRRGLRGRSAARHGEDDAEPILRHRTGRSPKNRAKRKLRLRQGGERDIGRGARVRGRVAGRKLEPPAHHLRRSKVPPHTVGGQGRARLRGHGHRGRHPMPPHKDRRLRQKSLPQVRRTPVANLRQRRYPDRRERHEAAAGGFLDRVRGVGSLRGFGRR

SEQ ID NO: 48735 - DNA, 303 bp, Unknown
  Obtained from environmental sample
  misc_feature (1)..(303): n is a, c, g, or t
ttgtttgaatatcaaagcattccaaataaaatttattccataggcttccgacaggaggttgttgaaaataattacgcttacttgattgcaactccagaaaaggcactttgcgatttgttgctcgtcaccgctaatttaaaattcttttcaaaaaaatctatgcttaactttttggagcgggatttgcgggttgatttatccgccgtaaaatgggatacagatattattcaagaatgtataaatgcaggcaaaaaaagcagggatttgctttatttgaaagaggtgctgaatgaatgtatttga

SEQ ID NO: 48736 - protein, 100 aa, Unknown
  Obtained from environmental sample
  misc_feature (1)..(100): Xaa is any amino acid
MFEYQSIPNKIYSIGFRQEVVENNYAYLIATPEKALCDLLLVTANLKFFSKKSMLNFLERDLRVDLSAVKWDTDIIQECINAGKKSRDLLYLKEVLNECI

SEQ ID NO: 48737 - DNA, 828 bp, Unknown
  Obtained from environmental sample
  misc_feature (1)..(828): n is a, c, g, or t
atgaatgtatttgataatatgctgtctcagcacaaagctataaccaaggaacaaaaaaacaatgcgtttcgcgaagtgatgcagcagattgtgctttccgggctttcccgtagcaatttttttgaatatgccgcattttacggtggaacctgtttaaggttatttcacgatatgccgagattttcagaagacatggatttttctctattgagagccgataaagattttgacttgcaaaattatttcccattcataagggaagaatttttatctgtgggaaagaatattgagattactaaaaaagggaaactgcaaaacacgaatattgaatcggcttttttgaaagatacttctctgttttacgatgttaaatttcaaacggaacggcaggtgaaaatcaaaattgaagtggatactttgccgccgctggattttaaaacagaaaataaactgcttttgcagcctttttcttttaacactcgttgtttcacgttaccgtgtttgttcgcgggcaaggttcatgcgtttttgttcagaaactggaaaatgagggttaaggggcgagattggtttgattttgaatggtatgttcaaaataaaattccaatggatttaaaacattttatggcaagggcaaagcaatttggcgaccccaatggaaaaataaaagatgaaaaaagtttaaaactttctcttgtaaaaagaataaaatctgttgatataaactccgttaaaagcgatgttatgccttttttgaaaaatcctcaatatacagaaatttggagcgagaactattttttagagttagcaaagcgaatttgcatctaa

SEQ ID NO: 48738 - protein, 275 aa, Unknown
  Obtained from environmental sample
  misc_feature (1)..(275): Xaa is any amino acid
MNVFDNMLSQHKAITKEQKNNAFREVMQQIVLSGLSRSNFFEYAAFYGGTCLRLFHDMPRFSEDMDFSLLRADKDFDLQNYFPFIREEFLSVGKNIEITKKGKLQNTNIESAFLKDTSLFYDVKFQTERQVKIKIEVDTLPPLDFKTENKLLLQPFSFNTRCFTLPCLFAGKVHAFLFRNWKMRVKGRDWFDFEWYVQNKIPMDLKHFMARAKQFGDPNGKIKDEKSLKLSLVKRIKSVDINSVKSDVMPFLKNPQYTEIWSENYFLELAKRICI

SEQ ID NO: 48739 - DNA, 393 bp, Unknown
  Obtained from environmental sample
  misc_feature (1)..(393): n is a, c, g, or t
ttgttatattcactccatactcaatggcaggagttttttatgggattacttaaagcagcaatgggtgccgctggtggcgttttggcagaccagtggctggagttttttatctgcgaaagtttggacgccaacgtgttggccaccaaagggcaaaaaaaaacgagcaaaagaagcagcaacaccagcggagaagacaatatcatctccaatggttctggcgttgtggtgaacaaagggcaagccgcaataattgtggataatggccgcatcgcagaattctgcgcagaagaaggacactatacctacgataattcttccgaacctagcatttttcacggaggtttggggncagggcttataggctccatcaaaaatatggcggagcgtttttaa

SEQ ID NO: 48740 - protein, 130 aa, Unknown
  Obtained from environmental sample
  misc_feature (1)..(130): Xaa is any amino acid
MLYSLHTQWQEFFMGLLKAAMGAAGGVLADQWLEFFICESLDANVLATKGQKKTSKRSSNTSGEDNIISNGSGVVVNKGQAAIIVDNGRIAEFCAEEGHYTYDNSSEPSIFHGGLGXGLIGSIKNMAERF

SEQ ID NO: 48741 - DNA, 795 bp, Unknown
  Obtained from environmental sample
  misc_feature (1)..(795): n is a, c, g, or t
gtgtggcaaaccaagggcttagggaatgcaatggatataaaagaatacaaatgcccaaactgcggcggaacagtcaactttgacagctccagccaaaaaatgaagtgcccctattgcgacactgaatttgaaattgccgcgttggaagaataccaagcgcaaatcaaagccgcaaaggataattttggctgggcaaaagaagaagctgggcaagagtgggaagcgggcgaacttgaggacttgagttccggttcctgcccttcttgcggagcggaactattgggcgatgcgaacaccgttgcgatggtttgcccgtgctgcggcaatgctcaaattgtgagcaaaaggctctccggctttttaaaacccgattatgttattccgtttaaacttgaaaaagaaaacgcggtgaaagcgttgaaaaatttttgcacgggaaaaaaactccttccggatttttttgtaaaagagaaccatataaacaacattcagggagtttatgtccctttttggctttttgatgcagaagcgagcgggcaagtatgctacaaagcgactaaggttaaaagaacagcggactttataaaaactgaattctattccgtggttagaggcggcaacataacattccagaaaataccagttgacggctcagaaaaaatggacgataaatatatggatgccatagagccatttgattatgcggatatgaaagattttcaaacaacttatttggcaggttatgttgccgagaaatatgacgttgatgcagaaaaaagcctcggccgattctga

SEQ ID NO: 48742 - protein, 264 aa, Unknown
  Obtained from environmental sample
  misc_feature (1)..(264): Xaa is any amino acid
MWQTKGLGNAMDIKEYKCPNCGGTVNFDSSSQKMKCPYCDTEFEIAALEEYQAQIKAAKDNFGWAKEEAGQEWEAGELEDLSSGSCPSCGAELLGDANTVAMVCPCCGNAQIVSKRLSGFLKPDYVIPFKLEKENAVKALKNFCTGKKLLPDFFVKENHINNIQGVYVPFWLFDAEASGQVCYKATKVKRTADFIKTEFYSVVRGGNITFQKIPVDGSEKMDDKYMDAIEPFDYADMKDFQTTYLAGYVAEKYDVDAEKSLGRF

SEQ ID NO: 48743 - DNA, 768 bp, Unknown
  Obtained from environmental sample
  misc_feature (1)..(768): n is a, c, g, or t
gtggttgacccgaatattaatttgcgtctcactataagtttaagggcaaatggcgaatactcctaccgcatggtaaaccccgcgttgttctatgccaatgtttgcggcaatgtggatgagcaatataccagagataaaatagacagccagctcaagtccgaaataatcaccgttttagggccatcgcttggaaagctcggcacgggtttggaatatcacgagatttccttccatacagataaattagcggatattctcaacgaggctctcagcgcaaagtggagagaaggcagagggctagagatagtaaattttggaataacttgcaccgcttcgccagaagatgataaccgaataaaacagttgcaaaccgcagccgtaatgcgagacccaactatggcggcggcttctttggttggcgctcaaagcgatgctatgcgcgccgctgcggagaataaggctggggcaatgaccggatttctcggtatgggaatggcggctcaggcaggcggaatgaacccacaggctctctttcagatggggcagcaacaatcagctcaacaagcggcaccagctgcgccagcggcacctccagcggctccagcaggcgactctgctaattgggtctgctcgtgcgggcactcaaacacgggtaagttctgtgctgaatgtggaaaaccttcccctaactcaccttggacttgttcttgcggcaaggcgggtaacactggcaaattctgcggcgagtgtggcaaaccaagggcttag

SEQ ID NO: 48744 - protein, 255 aa, Unknown
  Obtained from environmental sample
  misc_feature (1)..(255): Xaa is any amino acid
MVDPNINLRLTISLRANGEYSYRMVNPALFYANVCGNVDEQYTRDKIDSQLKSEIITVLGPSLGKLGTGLEYHEISFHTDKLADILNEALSAKWREGRGLEIVNFGITCTASPEDDNRIKQLQTAAVMRDPTMAAASLVGAQSDAMRAAAENKAGAMTGFLGMGMAAQAGGMNPQALFQMGQQQSAQQAAPAAPAAPPAAPAGDSANWVCSCGHSNTGKFCAECGKPSPNSPWTCSCGKAGNTGKFCGECGKPRA

SEQ ID NO: 48745 - DNA, 585 bp, Unknown
  Obtained from environmental sample
  misc_feature (1)..(585): n is a, c, g, or t
atgggggcattgccaaaagaagagggggcttttacttacgccgattataaggaatgggaactaaaagaatgcgagcgttacgagcttatctacggagaggcttatgccatggcggcgccaaacgcgcggcatcaggagatattatcttttctcaattttaaattttatgaatttttactgggaaagccctgtaaggtgtatcccgctccctatgatgtcaggctgttttacgaggaagacgaaagcgacgacacagtagtgcagccggatattgttattgtctgtgatgagaaaaagcgcggaaaagaaggctgcaggggcgctcctgatttggcggtagagatattatcgccttcaaataccgcgatagaaatggaacgaaagcttaatctgtacagggaagcgggggtcagggaatactgggttgtagaccccgaaaaccttagcctcacggtctattgtttcagggaaacgggaagtatatacaattacaaaaacaccgcaaaagttcccgtcgcaatccttcccggattaaacatcgagcttgagagagtattcaaaaaagcaatgagcaatgagcaatga

SEQ ID NO: 48746 - protein, 194 aa, Unknown
  Obtained from environmental sample
  DOMAIN (44)...(154): Protein of unknown function (DUF820)
  misc_feature (1)..(194): Xaa is any amino acid
MGALPKEEGAFTYADYKEWELKECERYELIYGEAYAMAAPNARHQEILSFLNFKFYEFLLGKPCKVYPAPYDVRLFYEEDESDDTVVQPDIVIVCDEKKRGKEGCRGAPDLAVEILSPSNTAIEMERKLNLYREAGVREYWVVDPENLSLTVYCFRETGSIYNYKNTAKVPVAILPGLNIELERVFKKAMSNEQ

SEQ ID NO: 48747 - DNA, 405 bp, Unknown
  Obtained from environmental sample
  misc_feature (1)..(405): n is a, c, g, or t
atggtaattaaacgagctttagaattgggagatggcatcagggaaagactcggtgaaatatacgttaacgcgttttatgatgacgtattaaaatatttctcaagagataaaaccaagctaaaaaaagtatttgcctgcgggtttttgcttgagtatttccatgtagcagtacaggatgatgaaattgtcggaatggtcgcctgtatggataagaataaaatttgttttaaatttaatttaaaaacacttataaaatgtttaggtatattcagcggattaataacaagttttggcattaatcagtttataaaaggatttccaaagcttgatgaaaaaatggcgttaattgaatatctggcaactgatacaaaacatctgagaaaaggcgtgcttcaacgctgttaa

SEQ ID NO: 48748 - protein, 134 aa, Unknown
  Obtained from environmental sample
  misc_feature (1)..(134): Xaa is any amino acid
MVIKRALELGDGIRERLGEIYVNAFYDDVLKYFSRDKTKLKKVFACGFLLEYFHVAVQDDEIVGMVACMDKNKICFKFNLKTLIKCLGIFSGLITSFGINQFIKGFPKLDEKMALIEYLATDTKHLRKGVLQRC

SEQ ID NO: 48749 - DNA, 504 bp, Unknown
  Obtained from environmental sample
  misc_feature (1)..(504): n is a, c, g, or t
ttggaaaaattaggtgcatacacagatgatttagactacgtattctacgacgttcttggagacgttgtgtgcggtggtttcgcaatgccaatccgcgaaggcaaagcacgggaaatttacatcgtttgctccggcgaaatgatggcactgtatgccgcgaacaacataacaaaaggcatatcaaaatacgccaccacaggcggtgtccgtttgggcgggcttatttgcaattcacgtaaagttgacggcgaagcagaccttgtttctgcagttgcaaaagaacttggcacacaaatgatccactttgtacctcgcgataacgctgtgcacagagcagagattaacaaaaaaacagtaattgatttttcaccgcaagaaccgcaggcagatgaataccgcgcactagcacgcaaaattgatgccaacgatatgtttgttgtaccaaaaccgatgtccatcgatcgtttagagtcaattcttcaagaacacggtattatggattaa

SEQ ID NO: 48750 - protein, 167 aa, Unknown; identical to SEQ ID NO: 48540
  Obtained from environmental sample
  DOMAIN (1)...(167): 4Fe-4S iron sulfur cluster binding proteins, NifH/frxC family
  misc_feature (1)..(167): Xaa is any amino acid

SEQ ID NO: 48751 - DNA, 324 bp, Unknown
  Obtained from environmental sample
  misc_feature (1)..(324): n is a, c, g, or t
atgttattagttagagcaattattcgtcccgaaaaagccggagctgttatgagcgagctggcttccgctggtttccctgccatcacaaaatttgacgtgttcggacgcggcaaacagaaaggcattaccgttggcaatgttcactacgacgaaattccaaaagaaatgctcgttgtagtctgcaatgatgaagacaaggacgatcttgtaaaaatcatcattcgcgttgctagaacaggcgaaggtaactttggagacgggcgtatttttgtttcccctgtggaatctgcctacactatcagctccggcaagcccgggttgtag

SEQ ID NO: 48752 - protein, 107 aa, Unknown
  Obtained from environmental sample
  DOMAIN (4)...(103): Nitrogen regulatory protein P-II
  misc_feature (1)..(107): Xaa is any amino acid
MLLVRAIIRPEKAGAVMSELASAGFPAITKFDVFGRGKQKGITVGNVHYDEIPKEMLVVVCNDEDKDDLVKIIIRVARTGEGNFGDGRIFVSPVESAYTISSGKPGL

SEQ ID NO: 48753 - DNA, 402 bp, Unknown
  Obtained from environmental sample
  misc_feature (1)..(402): n is a, c, g, or t
atgcgggaaattatgtgttttataaggccaaataaggtcaatgaaactaaaagggctttggcagaaaacggtttccccgcttttacctgctgtaggtgccttgggcgtggaaaaaaaagcattgacccggaactgctcaaaacagttcttgcagcaggcgaattgccgctttctccaattggggaaaatcttaccgaggctactcgactagttgccaaacgcttttttacgctcatcattgacgataaagatgttgataaagcggttaaaacaataatcactgccaaccaaaccggtaaccccggagacggcagaatttttgttttgcctatccttgaaacttcttccgttagaactggagaaggcggtttacacattgcatctgagggaggagcatcatga

SEQ ID NO: 48754 - protein, 133 aa, Unknown
  Obtained from environmental sample
  DOMAIN (4)...(120): Nitrogen regulatory protein P-II
  misc_feature (1)..(133): Xaa is any amino acid
MREIMCFIRPNKVNETKRALAENGFPAFTCCRCLGRGKKSIDPELLKTVLAAGELPLSPIGENLTEATRLVAKRFFTLIIDDKDVDKAVKTIITANQTGNPGDGRIFVLPILETSSVRTGEGGLHIASEGGAS

SEQ ID NO: 48755 - DNA, 1143 bp, Unknown
  Obtained from environmental sample
  misc_feature (1)..(1143): n is a, c, g, or t
atgacagacagcagagaaaagttgcttgaaaagtattccgctaagatctataaaaaccgcaaagaacacgttttgcaactcgccgaaggcgagaaaaacgttgcaattgccgccaacactcgcgccattcctggcgtgatgacggcgcgtggttgttgctatgccggttgtaaaggtgttgtggttggtccgctgaaagatgtgttagttataactcacgggcctataggctgcggtttttatagctggggcacaagaagaaacaaagcaaaacccgatgaaaatacagataaaaactttattccatattgtttttccacagatatgcaggaatccaatatcgtgttcggtggtgagaaaaagctggaacaagccattgaagaagctatggcactgttcaacccaaaatgcattatgatatgctccacttgccccataggtcttatcggtgatgatgtgcaagcggtggcaaggcgaaccgaagccaaatacggcatagccgccattggttattcttgcgaaggctacaaaggcgtttcgcagtctggcggtcatcatatagctaacaacgggcttatgcgctatgttataggcacaggcgataaaaaaccaaaaacaaaattttccgtcaatgtacttggcgaatacaacatcggcggtgatggttgggaagaggaacgcattttcaaacgctgcggcattgaagtgctgaacctgtttaccggcgatgcctcttacgaagggcttaaaagtgcgcatttagcccatttgaatttggtgatgtgccaccgttccataaactacatagccgaaatgatgaaaaccaaatacggcatagactggatcaaagtgaattttatcggtgttgaggcaacgtgtaaatctctgcgagatattgcaaaatatttcaacgatgccgaactcacaaaaagagttgaagaggtaatagccgatgaagtcggggctattaaaagcgacatggagcattacaaatccaagctaacgggcaaaactgctggtattttttccnggtggttctcgttctcatcactatcaggttcttttgcaagaactcggtatgaaaaccatanattgctggttatgaattcgctcatcgcgatgattacgaagggcgagacataa

SEQ ID NO: 48756 - protein, 380 aa, Unknown
  Obtained from environmental sample
  DOMAIN (44)...(380): Nitrogenase component 1 type Oxidoreductase
  misc_feature (1)..(380): Xaa is any amino acid
MTDSREKLLEKYSAKIYKNRKEHVLQLAEGEKNVAIAANTRAIPGVMTARGCCYAGCKGVVVGPLKDVLVITHGPIGCGFYSWGTRRNKAKPDENTDKNFIPYCFSTDMQESNIVFGGEKKLEQAIEEAMALFNPKCIMICSTCPIGLIGDDVQAVARRTEAKYGIAAIGYSCEGYKGVSQSGGHHIANNGLMRYVIGTGDKKPKTKFSVNVLGEYNIGGDGWEEERIFKRCGIEVLNLFTGDASYEGLKSAHLAHLNLVMCHRSINYIAEMMKTKYGIDWIKVNFIGVEATCKSLRDIAKYFNDAELTKRVEEVIADEVGAIKSDMEHYKSKLTGKTAGIFSXWFSFSSLSGSFARTRYENHXLLVMNSLIAMITKGET

SEQ ID NO: 48757 - DNA, 987 bp, Unknown
  Obtained from environmental sample
  misc_feature (1)..(987): n is a, c, g, or t
atgaaaccgaaaaaaggcaaggaaagcaaaatgaacgagctggcaatcagggctgaaagcgacatcaaggaaatggcagctattctggccacgttcccggaaccgggcaaatggacgcaagagcagaaaacacaggccgttaattttgccgccttattggaaaccgcccagaaggtgatcgcggccaaaacttttgccggaatagactacggcgcggaaaaggaaatgtttcttatcaatgccggaaggacggacagcaagcacacgcacaggagctacagatccgcccttgcccggcttgaggcatacgcagagagggcgcacatttcccccctggaacttacgccgatgagggcagacgactttatttacagcatgaagggcaacggggccgctgcttccatccggcgcgacattgcggcctgttcaagtttctttacctggcttgaacgccgccatgaggggataaaaaacccttttcgcggaaccaaggcaaggcccgcagataaaacgaaaaaagacctggtaatcccaaacgcccaggaagtgaagaaaataatcgccggacttccagcttatgaagccgccgccgttactgtaatggctttccggggcttgcgtatcggcgcacttccgggaatggaaatcagcggcgaccgattcaaaacccgcagcaagggcaaggccatatccggggaattgcccggcaacgcgctggcggcaataaaggcagccgatccagaggataagaaacgcccctttgccggaataaccgaagaggccctggcccggcgcatcgagtaccacatagggaagcttcacaaggcaaataaaataaaggccgcttactcttgccatgacttccggcattttttcgcggtaacggaatggggcaaggacaaagacataaagcgcgtacagaaactattgaaccacgcttcaatccaagtaactgaaagctacctccggggcataggtgaagtgtaa

SEQ ID NO: 48758 - protein, 328 aa, Unknown
  Obtained from environmental sample
  DOMAIN (73)...(153): Phage integrase, N-terminal SAM-like domain
  misc_feature (1)..(328): Xaa is any amino acid
MKPKKGKESKMNELAIRAESDIKEMAAILATFPEPGKWTQEQKTQAVNFAALLETAQKVIAAKTFAGIDYGAEKEMFLINAGRTDSKHTHRSYRSALARLEAYAERAHISPLELTPMRADDFIYSMKGNGAAASIRRDIAACSSFFTWLERRHEGIKNPFRGTKARPADKTKKDLVIPNAQEVKKIIAGLPAYEAAAVTVMAFRGLRIGALPGMEISGDRFKTRSKGKAISGELPGNALAAIKAADPEDKKRPFAGITEEALARRIEYHIGKLHKANKIKAAYSCHDFRHFFAVTEWGKDKDIKRVQKLLNHASIQVTESYLRGIGEV

SEQ ID NO: 48759 - DNA, 1086 bp, Unknown
  Obtained from environmental sample
  misc_feature (1)..(1086): n is a, c, g, or t
atgaattatttagccagagagcaagcccagtactggcaaggaagggaagaaagctatataaagcagttaaccggaattgcagacataatgggcgaatttgaaatgctgcccgcacaggacaggagggatcagtatgacaatatgctgaaagctaccctgaataacaaccccaacttcgcccgcatattttccatttggaaaccgaacgccatggacggtatggacagccagtatataggccgtccgggatcaactccgacggggcagtacgcaatgacatggggcagagataccggaccgattgaagtaaagcccaaccttatcattgatgagattaatgcctggatgaacggtcccaacgcgctcaagactcgtgttgaaaaccccacgccttttaagaacaacggaaaagacacctttattatcagaattggagttcccataaccagaagcaccagcgacgaagtagtcggacacctatgtgttcttttagacatcgccccaatgcaggcggcagtggaaaaaactattaaaggttacgaagaaatatcggggttgactatttattcgggcaacggatttattatgggccataccgttgcggaacgggtaggaaagatgctgcttgatgtggatacgatatatggcaagtatatgcaggatgcggatagggcagtacgcgaagggaaggaatttgaatgctcaagcttttcccctgtcttgaacggagttatgagaataaccatgattcccctccagataggcgattcccacatgtactggacagtaatgatagcgacatcagaaacgtacattatgaaagaagttaacgcgnataccagatttacccatatccttgcgacgatctctnatatagcggcagcgggtaattgtgttctttgtcctgcacagtactacaaagccaatcgtcaaggtggcggacacgctcaaggatatttccgagggcgaaggcgacttaacgcggagcatcgccgtccattcccaggacgagatcggcgatttggcactgtacttcaacaagaccctggagaaaatcaaaaacctcgtcaaaaatgtcaagaatga

SEQ ID NO: 48760 - protein, 361 aa, Unknown
  Obtained from environmental sample
  misc_feature (1)..(361): Xaa is any amino acid
MNYLAREQAQYWQGREESYIKQLTGIADIMGEFEMLPAQDRRDQYDNMLKATLNNNPNFARIFSIWKPNAMDGMDSQYIGRPGSTPTGQYAMTWGRDTGPIEVKPNLIIDEINAWMNGPNALKTRVENPTPFKNNGKDTFIIRIGVPITRSTSDEVVGHLCVLLDIAPMQAAVEKTIKGYEEISGLTIYSGNGFIMGHTVAERVGKMLLDVDTIYGKYMQDADRAVREGKEFECSSFSPVLNGVMRITMIPLQIGDSHMYWTVMIATSETYIMKEVNAXTRFTHILATISXIAAAGNCVLCPAQYYKANRQGGGHAQGYFRGRRRLNAEHRRPFPGRDRRFGTVLQQDPGENQKPRQKCQE

SEQ ID NO: 48761 - DNA, 810 bp, Unknown
  Obtained from environmental sample
  misc_feature (1)..(810): n is a, c, g, or t
gtgttctttgtcctgcacagtactacaaagccaatcgtcaaggtggcggacacgctcaaggatatttccgagggcgaaggcgacttaacgcggagcatcgccgtccattcccaggacgagatcggcgatttggcactgtacttcaacaagaccctggagaaaatcaaaaacctcgtcaaaaatgtcaagaatgagtcaacggtactatccaacatcgggaatgatcttgccagcaacatgaatgaaacagcggcggcggtaaacgaaataacctcgaatatccagagcatgaaaggccgcgtcatcaaccagagtgccagcgtgagcgagactcacgcgactatggaacaggttgtaaacaacatcaacaaacttaacgggcatgtcgaaaagcagagcgataatatttcccaggcatcatccgccattgagcaaatggtagccaatatcagttcagtaaccaatacgctggtcaataacgcaaacaatgtaaagaccctgagagaagcgtccgaagttggccgaagcggactgcaagacgttgcaacggacattcaggaaattgcccgcgaatcggaaggcttactggaaataaacgcggtaatggaaaacatagcaagccagaccaacctgctttcgatgaacgcggcgatagaggcggcccatgccggggaggcgggcaaaggctttgccgtagtagcggatgagatccgcaagctggcagaaagttccggcgagcagtccaaaacgattggtacggtactgaaaaaaatagcgggaatcaatcaaaaaaattacaagctccactga

SEQ ID NO: 48762 - protein, 269 aa, Unknown
  Obtained from environmental sample
  DOMAIN (1)...(57): HAMP domain
  misc_feature (1)..(269): Xaa is any amino acid
MFFVLHSTTKPIVKVADTLKDISEGEGDLTRSIAVHSQDEIGDLALYFNKTLEKIKNLVKNVKNESTVLSNIGNDLASNMNETAAAVNEITSNIQSMKGRVINQSASVSETHATMEQVVNNINKLNGHVEKQSDNISQASSAIEQMVANISSVTNTLVNNANNVKTLREASEVGRSGLQDVATDIQEIARESEGLLEINAVMENIASQTNLLSMNAAIEAAHAGEAGKGFAVVADEIRKLAESSGEQSKTIGTVLKKIAGINQKNYKLH

SEQ ID NO: 48763 - DNA, 1218 bp, Unknown
  Obtained from environmental sample
  misc_feature (1)..(1218): n is a, c, g, or t
atgtctggtgaatttcagcccgttaccgtcaacttaaaaaaagacgcttatatttttgtggaaggaaaacaccacgccgacaaattttatattatcaagcaaggcaatgtacggattatccgcgaagcattaaccgatgaaacaggaagcgtgctaggccccggagatatgtttggcctgatttccgcaatggcggcgcatggctatattgaatcggcggtagccatgacagatgtcgccctgctggcagtagaacggaaacaatacggtagccttatccgcaaaaaccatactattgccgtcaacagcataaaggcattttcccaaaggctgcgggaattggatgtcgctttttcacaacgggcattaaaaaacacagcgtcagccgatccttcgcatatcgaacaaataggcgattattacaaaaactcaggcaaactaaaatcggcgttatacgcatacagccgataccttgaactctgccccgatgcgtatgatattgactatattaaggcaaaagtcactgaattgaagagttgcgttgccgaaataagggtggaatacccgcctgacaaaatggttcaggcatatccgaaaggacacctgctttttgccgaaggcgaaaccgggaataccatgtatatcgttcagaaaggctcggtaaaaataacaaagatcgttgacaataaagaaatcatccttgcggttctcaacaaaggcgatattttcggcgaaatggcgctgttggaagacaaaccccgcgccgccaccgccgaagtttacgaagactgcgcattactggcggtaaaccgtgataatttttcaaacctcataagggatcagccggacatggtagtccgcatggcaatcttaatgtccgagcgcatttggctgctctaccgccagcttgataacacattaatagaaaatcccctggggcgtatttatgatgccctgcttatccagcttgaaaaaaaccgcgttgacattcacagcagcgaaccgtatcaatgcagtttcggctttaaagaattattaggcatggctggtatgcaagaatccgagaacaaacaccttgaccgcaaagtcgccggcgacggaaaactgacctttaatgacgacaaaattcagatactaaaaatctcagacatactgaaagaatccgcattttaccgcaaagcgcaaaaaatagccgggaacagaaaaattaacatctaa

SEQ ID NO: 48764 - protein, 405 aa, Unknown
  Obtained from environmental sample
  DOMAIN (9)...(98): Cyclic nucleotide-binding domain
  misc_feature (1)..(405): Xaa is any amino acid
MSGEFQPVTVNLKKDAYIFVEGKHHADKFYIIKQGNVRIIREALTDETGSVLGPGDMFGLISAMAAHGYIESAVAMTDVALLAVERKQYGSLIRKNHTIAVNSIKAFSQRLRELDVAFSQRALKNTASADPSHIEQIGDYYKNSGKLKSALYAYSRYLELCPDAYDIDYIKAKVTELKSCVAEIRVEYPPDKMVQAYPKGHLLFAEGETGNTMYIVQKGSVKITKIVDNKEIILAVLNKGDIFGEMALLEDKPRAATAEVYEDCALLAVNRDNFSNLIRDQPDMVVRMAILMSERIWLLYRQLDNTLIENPLGRIYDALLIQLEKNRVDIHSSEPYQCSFGFKELLGMAGMQESENKHLDRKVAGDGKLTFNDDKIQILKISDILKESAFYRKAQKIAGNRKINI

SEQ ID NO: 48765 - DNA, 1083 bp, Unknown
  Obtained from environmental sample
  misc_feature (1)..(1083): n is a, c, g, or t
atggccgaggacgcgaagccggcagcctgtgttatgtgcgaatgtattcaggctcgatcaagccgggcgccccnggtttataatatcggcaagaaaaagcgggagcgcgccaatcgtattctgcgtatgcattccaacaagagcgacccgatggacgagttaagcgccggggacatcggcgtgatcatcgggatgaagctggcgcagacaggcgataccataggcagcgaaggctggccggtgctgctggaaaaaatgcagttccccgagccggtgatctccgtttccattgagcctaaaacaatttccgatcaggacaagcttaaagacatcctctcgattctttccaaagaagaccccacgtttaccaccagggaaaacgaggaaaccggacagcttatcatctccggcatgggcgaattgcatttggatgttttggttacccgtatactcaaggagtacaatcttggcgcaaaagtagggaaacctcaggtcacttaccgggagtcgataagcgcggccgccgagcggagcgagaatttctcccgcgtgattgccggcaaggaaaacgccgcgggcgtaaaccttcgggcggaaccggcgaaacgcgggacaggaaacaagtatgtttgcgaggttaaaaacagcgaaataccggaggagattttcagcgcggtggagcgcggcattaccggcgcgtttgcttcaggaattgttatgggctacccctgcattgatattgcggttaccgtcactaacatcagctattcggaattgagcggcacggagtttgcctttgaagcctgcgccagcatggcctttgacgaagcctgccgcgccgcttctcccatactcctggaaccgatcatggctgttgaccttatcagcccccatgaatttgtaggcgaggttatggggccttgtcacccagcgcgcgggtcaaattttcagcatggacgcaagagccgacatagacgaaataaaagcccaggcgccaatggcgcagatgttcggctttatgacctcactgcgcagcgtaagccagggcagagcgagcttcagcatggaattctcgcattttga

SEQ ID NO: 48766 - protein, 360 aa, Unknown
  Obtained from environmental sample
  DOMAIN (163)...(282): Elongation factor G, domain IV
  misc_feature (1)..(360): Xaa is any amino acid
MAEDAKPAACVMCECIQARSSRAPXVYNIGKKKRERANRILRMHSNKSDPMDELSAGDIGVIIGMKLAQTGDTIGSEGWPVLLEKMQFPEPVISVSIEPKTISDQDKLKDILSILSKEDPTFTTRENEETGQLIISGMGELHLDVLVTRILKEYNLGAKVGKPQVTYRESISAAAERSENFSRVIAGKENAAGVNLRAEPAKRGTGNKYVCEVKNSEIPEEIFSAVERGITGAFASGIVMGYPCIDIAVTVTNISYSELSGTEFAFEACASMAFDEACRAASPILLEPIMAVDLISPHEFVGEVMGPCHPARGSNFQHGRKSRHRRNKSPGANGADVRLYDLTAQRKPGQSELQHGILAF

SEQ ID NO: 48767 - DNA, 639 bp, Unknown
  Obtained from environmental sample
  misc_feature (1)..(639): n is a, c, g, or t
ttgcaggaaagacaagaaggacagggccgatcactgaccgacgaagatcgggaaaatgcggtgaacagcgccctggaagtgcttaacaaccgtatcgaccgtttcggccttacagagcctgttataagacggcaggggccggatcagatttatctggaaatacccggcagcgcagacccggaacggatcaatgacatcatcatgggcaagggcagcctggctttccacatggtggattccgaagccacagacgctttcaacagttactatctggccaatccagcgcgcacttttgacaatgatgggaatattattaaccccacgatagtgccggctgatgtgatggtgttaggcgtataccagaaagaccgttacggcctggacgagcagatgcgcaacgctgacggcagcctccgttacgccgcccttaaaaaggaagtaggcttggacggcaaccatatccgcagcgccgtggtggaacgtaacaccctggacggcaaaccggaagtcaccttcatgctggacagcgaaggcggcgagattttctacagactcacctcggccaatgtgggaaagcctatggctatagtgctagacaacagggtaaatcaacggcgacatacagtcggcaatccgtga

SEQ ID NO: 48768 - protein, 212 aa, Unknown
  Obtained from environmental sample
  misc_feature (1)..(212): Xaa is any amino acid
MQERQEGQGRSLTDEDRENAVNSALEVLNNRIDRFGLTEPVIRRQGPDQIYLEIPGSADPERINDIIMGKGSLAFHMVDSEATDAFNSYYLANPARTFDNDGNIINPTIVPADVMVLGVYQKDRYGLDEQMRNADGSLRYAALKKEVGLDGNHIRSAVVERNTLDGKPEVTFMLDSEGGEIFYRLTSANVGKPMAIVLDNRVNQRRHTVGNP

SEQ ID NO: 48769 - DNA, 675 bp, Unknown
  Obtained from environmental sample
  misc_feature (1)..(675): n is a, c, g, or t
gtgcgactgacaggctttggcctggatgaggcaaataacatcgcccttaccttaagaaccgcagcgctgcccgtggagcttgaagttgtaaaccagcagagcataggcgcttctatgggcgaagatacaataaggcagggcctgtacgccctgctcggcggcattgtggcggtccttatctttatgctggcttattataaaatttcggggatcaacgcgattgtcgcccaggtcttcaacttctatataatgttcagcgtgctttccgcttttaacttcaccctgactctgccaagcatagcgggcttcattctgaccatcggtatggcggtagatgccagtgtaattatttttgaacgcatgaaagaagaaatgcgcctgggcaaaggcagaaaagccgttgtcgataccggttttaacaaggcattctgggcgattatggattccaacatcacgacctttatcgctgccctgttcctttcacagcttggttccggccccatacagggattcgccgtaaccctttccgtcggggtgttttcttcggtctttactgccctgtttgtttcccggttgatatttgactttggcacggatgtgctgcacagcaaaaatgtttcgatagcctggtccaaaatgcaggttgaagaggcggctgcggggaggagcaaataa

SEQ ID NO: 48770 - protein, 224 aa, Unknown
  Obtained from environmental sample
  DOMAIN (14)...(199): Protein export membrane protein
  misc_feature (1)..(224): Xaa is any amino acid
MRLTGFGLDEANNIALTLRTAALPVELEVVNQQSIGASMGEDTIRQGLYALLGGIVAVLIFMLAYYKISGINAIVAQVFNFYIMFSVLSAFNFTLTLPSIAGFILTIGMAVDASVIIFERMKEEMRLGKGRKAVVDTGFNKAFWAIMDSNITTFIAALFLSQLGSGPIQGFAVTLSVGVFSSVFTALFVSRLIFDFGTDVLHSKNVSIAWSKMQVEEAAAGRSK

SEQ ID NO: 48771 - DNA, 315 bp, Unknown
  Obtained from environmental sample
  misc_feature (1)..(315): n is a, c, g, or t
ttggaagtcgggcacacgcttacatccgcgaaccatcctcagagcaacggcaagctggaacggttccaccgcaccttgaaaactgaacacgtaaggagggcatcgtatctggaataccaagacgcctgcataaggatggcggaatggattgcgtattacaacagcgaaaggcttcacagcgcgatctggtatttaacgccgaatgacgttttttacggcaggacggctaaacggcttgcagaacgcaaagaaaagttgcacactgcatttatcaagagacaggaatactggcggacgcaaaacgctggttcctga

SEQ ID NO: 48772 - protein, 104 aa, Unknown
  Obtained from environmental sample
  misc_feature (1)..(104): Xaa is any amino acid
MEVGHTLTSANHPQSNGKLERFHRTLKTEHVRRASYLEYQDACIRMAEWIAYYNSERLHSAIWYLTPNDVFYGRTAKRLAERKEKLHTAFIKRQEYWRTQNAGS

SEQ ID NO: 48773 - DNA, 804 bp, Unknown
  Obtained from environmental sample
  misc_feature (1)..(804): n is a, c, g, or t
ttggaggaatttatgaatcctaaaaaaatggtaaaactcagtaatattatcggctttatttcaattctggcgcttatttattggatcattatattcattacaatggaggtttttgacttaagagtcttcaaagagcatacgacatcagcattcaatttcagtattatgggaattttggcgttaatgttcggcgcattaataataaatgtaatgtttaatttgtcaagaatcgcggaaaggaataaagaagaagagcaacagccctcaaaaaataaaaaaggaattattatttttttagcgtcttttccggtgattatttgttttttgtttcttggaaatttcatctcggcaaaaaaagtggaaaacgacctgaagaaatcggcggatgaaatgataaaaacatactctcgtgaaattaacgaattctcaaattattcatttacaaaagaatggataaaccataccgcaaatacgataaaaataatagaaaagacagatcgaaattttgacaatgtttatttgattttgcaggatgttattaatggaaataatatgtatttaagtttttccagccatactgtcaatatggatgaaaaaacagtattagacaaaatagattatataagcagatcggctttaaaagagcgtgaatatttcaataaggttttcaaagaaaattataacgaaaaatactttgtatccaatggcgggacttatgtattatttgtgccattaagggaaaatggcaatactgttatacttatgtttagtaacaggcagaattatgggaatttaagcaaataa

SEQ ID NO: 48774 - protein, 267 aa, Unknown
  Obtained from environmental sample
  misc_feature (1)..(267): Xaa is any amino acid
MEEFMNPKKMVKLSNIIGFISILALIYWIIIFITMEVFDLRVFKEHTTSAFNFSIMGILALMFGALIINVMFNLSRIAERNKEEEQQPSKNKKGIIIFLASFPVIICFLFLGNFISAKKVENDLKKSADEMIKTYSREINEFSNYSFTKEWINHTANTIKIIEKTDRNFDNVYLILQDVINGNNMYLSFSSHTVNMDEKTVLDKIDYISRSALKEREYFNKVFKENYNEKYFVSNGGTYVLFVPLRENGNTVILMFSNRQNYGNLSK

SEQ ID NO: 48775 - DNA, 873 bp, Unknown
  Obtained from environmental sample
  misc_feature (1)..(873): n is a, c, g, or t
ttggaggcggtgcgaaagcgccccggtatgtatattggaactaccggcatagacggcttgcatcatctggtttttgaagtagtagataattcggttgacgaagcaatgcagggtcactgtgacaatattcttgtggcccttgaagtgaacgatgtggtgcgtgttgaggacaatggccggggtattccggttgatatacattcaggtgaaggagtaagcgcccttgaactggtaatgacccggctccacgcgggcggcaagtttgacaaaaagtcatataaggtgtccgggggccttcacggcgtgggtgtatctgtggttaacgccctttcccagtggtgcgaagttttcgttcacatggatggccgcgttcatacccagagttataaaaccggaattgccgatgggccggcccacgaaatcacaccggacaaggtgccttaccctgctggccccaatcgcaaaggtaccgtggtccgctggaaggcggatgcctcgatttttgagactactacccacaatttcgatgctttgagcaaccgcctgcgggaactggcttttctcaacaagggtcttaaaattacgattcgggatgaacgtctttccacccccaaaacccacgagtttaagttcgagggcggggtaaagagctttgtggagtaccttaacgaaaacaaaaccgtgctatataaggagccgatttttattgaaggtgttcgggacgacgggttgggtggcagtgttgagattgagtgcgcaattcagtacaacgacggttttaatgagataatgtattcctttgtgaatgatattaacacccgcgaaggcggcacgcatcttatgggttttaatccgcgcttacacgcactttga

SEQ ID NO: 48776 - protein, 290 aa, Unknown
  Obtained from environmental sample
  DOMAIN (214)...(290): DNA gyrase B
  misc_feature (1)..(290): Xaa is any amino acid
MEAVRKRPGMYIGTTGIDGLHHLVFEVVDNSVDEAMQGHCDNILVALEVNDVVRVEDNGRGIPVDIHSGEGVSALELVMTRLHAGGKFDKKSYKVSGGLHGVGVSVVNALSQWCEVFVHMDGRVHTQSYKTGIADGPAHEITPDKVPYPAGPNRKGTVVRWKADASIFETTTHNFDALSNRLRELAFLNKGLKITIRDERLSTPKTHEFKFEGGVKSFVEYLNENKTVLYKEPIFIEGVRDDGLGGSVEIECAIQYNDGFNEIMYSFVNDINTREGGTHLMGFNPRLHAL

SEQ ID NO: 48777 - DNA, 1032 bp, Unknown
  Obtained from environmental sample
  misc_feature (1)..(1032): n is a, c, g, or t
ttgaatgaatttttaaaaaagtcaaaacattctaaaaagttagacgaaactctttcgggtgacgatgtgcgcgaaggactgactgcggtactgtcggttaaagttcccaatccgcagtttgaagggcagacaaaaggaaaactgggcaactcggaagtgaagggtatagtggagtcccttgtaaacgagcagcttgagctttactttgacaaacaccccgatgtaattaataacatacttgaaaaatcggtgttagctgcaaaggcgcgtattgccgcgcgtcaggcgagagacgctacacgcagaaagaacgcgatggacagcgcgggtttgcccggcaaacttgccgactgttccgaaaaagacccggcaaagtgcgaactttttatcgtagagggcgactccgcgggcggctcagccaaaggcggcagagacaggcgcacacaggcgatacttccgctgtggggcaagatgttaaatgtagaaaaacagcgtatcgagaaagtaattacaaacgaaaaattacagcccgtcatcgcaagcataggagccggctgcggcaatgaatttgacgtttccaaaattcgctatcataaaattatcataatggctgatgccgatgttgacggctctcatatccgcacattgcttttaacgttcttctaccgttacatgacgccgcttatcgagcaagggcacgtttaccttgccatgccgccgctttacaaggtgagttacgataaaaagtcattctacgcttacgatgacgctgaaaaagaccgtattcttgcggattcgggcaaagacgctgaaaaagtctcggttcagcggtacaaggggttaggtgaaatgaaccctgaccagttgtgcgacacaacaatggacccgaacaagcgcaatattattcaggtgcatttggacgacgttcccgaagcggaaagaatttttaccacgctgatgggcgaggttgtcggtccgcgccgtgagtttatcgaggaaaacgctctgttggtcagtaacttagacgtttag

SEQ ID NO: 48778 - protein, 343 aa, Unknown
  Obtained from environmental sample
  DOMAIN (126)...(237): Toprim domain
  misc_feature (1)..(343): Xaa is any amino acid
MNEFLKKSKHSKKLDETLSGDDVREGLTAVLSVKVPNPQFEGQTKGKLGNSEVKGIVESLVNEQLELYFDKHPDVINNILEKSVLAAKARIAARQARDATRRKNAMDSAGLPGKLADCSEKDPAKCELFIVEGDSAGGSAKGGRDRRTQAILPLWGKMLNVEKQRIEKVITNEKLQPVIASIGAGCGNEFDVSKIRYHKIIIMADADVDGSHIRTLLLTFFYRYMTPLIEQGHVYLAMPPLYKVSYDKKSFYAYDDAEKDRILADSGKDAEKVSVQRYKGLGEMNPDQLCDTTMDPNKRNIIQVHLDDVPEAERIFTTLMGEVVGPRREFIEENALLVSNLDV

SEQ ID NO: 48779 - DNA, 393 bp, Unknown
  Obtained from environmental sample
  misc_feature (1)..(393): n is a, c, g, or t
atggcggcgaaaagacgagaagcgtctccgtacaaaatcgaagatgtaaacgtaatcggcgaagacctttcaagtataaaaatttctgattacaaattcccgtcaaccgtaaaaggttttagtaaaacggttgagaaaaatcccgttgtaagaaatcttttaaaatcgactttaactaaatttcccgtagtggcaaaagaaagatgtatcggctgcggcatgtgcgcgaccgcctgtccgcaaaaaatgatcacaataattccgtataaaaaaaagaaagttgccgttataaacttaaaagactgcattcgctgttattgctgccatgaattatgtccgcataaggcgattgacatgaagaacaaatttatttcaaaggcgttaaaaatataa

SEQ ID NO: 48780 - protein, 130 aa, Unknown
  Obtained from environmental sample
  DOMAIN (95)...(118): 4Fe-4S binding domain
  misc_feature (1)..(130): Xaa is any amino acid
MAAKRREASPYKIEDVNVIGEDLSSIKISDYKFPSTVKGFSKTVEKNPVVRNLLKSTLTKFPVVAKERCIGCGMCATACPQKMITIIPYKKKKVAVINLKDCIRCYCCHELCPHKAIDMKNKFISKALKI

SEQ ID NO: 48781 - DNA, 945 bp, Unknown
  Obtained from environmental sample
  misc_feature (1)..(945): n is a, c, g, or t
atgaccgaaacagctgccgcgatcaaccagatcgcttccaacattaacaacatcaaaggcagggtgataagccagagcgcgtcagtaacccagaccaacgccactatggggaatatcaccgtcaatatcgacaagctcaacaaccatgttgaggaacaagcttccagcatggcccgttcgtcttcggccattgaggaaatgcttgccaatatccgttccgtaaccgctaccctggcaaagaacgccgacagcgttaacgatttggcctacgcttccgacgccggacgcgaaagcctgcaaaacgtcgcggctgacataaaggaaatcgaggatcgatcaacagagcttatgaagattaacgcggtcataaaaaacatcgccagccaaaccaacctgctctcaataaacgccgcaattgaagcggcgcacgccggcgaggccggtatggggttcgccgtggttgccgacgaaattcgcaaactcgccgaggattccggcgttcagtccaagatcgtcaataccgtactcaaacagaccaaggcatccatcgataaaatcatcgaatccgttaataatgtgcttgccaaatttgaagccattgacgaaggggtaaaaaccgtttcggatcaggcggagaatatcaggattgccatggaagaacaggatcagggcagcaagcagattatggaaaccttcgtccagctcaacgatattacccggcaggttaaaaacggctcaaccgagatgtttgagggcgcgaaggaagtaatacaggaaagcaacaacctggaaaaagtcacccaggaaatagccagcggtatgaacgaaatggccagcggcgcggatcagattaacgtggcggtaaaccacgtcaacgagataagcgcaaagaaccgggaaggcattgacactctcgcgaaagaagtggagaagtttaaagtttag

SEQ ID NO: 48782 - protein, 314 aa, Unknown
  Obtained from environmental sample
  DOMAIN (51)...(313): Methyl-accepting chemotaxis protein (MCP) signaling domain
  misc_feature (1)..(314): Xaa is any amino acid
MTETAAAINQIASNINNIKGRVISQSASVTQTNATMGNITVNIDKLNNHVEEQASSMARSSSAIEEMLANIRSVTATLAKNADSVNDLAYASDAGRESLQNVAADIKEIEDRSTELMKINAVIKNIASQTNLLSINAAIEAAHAGEAGMGFAVVADEIRKLAEDSGVQSKIVNTVLKQTKASIDKIIESVNNVLAKFEAIDEGVKTVSDQAENIRIAMEEQDQGSKQIMETFVQLNDITRQVKNGSTEMFEGAKEVIQESNNLEKVTQEIASGMNEMASGADQINVAVNHVNEISAKNREGIDTLAKEVEKFKV

SEQ ID NO: 48783 - DNA, 831 bp, Unknown
  Obtained from environmental sample
  misc_feature (1)..(831): n is a, c, g, or t
gtgtcttccgttattacggcgctggcttttgtaagcgggtccttaaagcctacacggacaattaaacttttattcgcggctgacgaagaagttgggtccgctttcggcattgagtggcttgtaaaaaatcacggcgatttattctataaaaatgacatggtactggttcctgacggaggggacataaagggcgaatgtattgaaatcgccgagaaaaatattttatgggtgaagtttgtaacccacggaaagcaggcgcacggttcaatgccggattcgggggccaacgcctttttagcgggagcggatctggcaacgcgccttcatcacggactttcggccaaatttaaaaaaagagattctatgtttgacccggactactccacttttcaacctacaaaaaaagaggctaatgtccctaacatcaatactattcccggcgaagatgttttttatatggatatgcgcgtccttccctgttattcaaatgattcggtattcgcggaaattgacagaataaaaaccaaaatagaaaaggaatatcacgttaaggttgaatactctttatcgcagtcaacacagtcaaaagcgaccgatgtaaaagcgccgattgtcacattattgaatgacgctataccgcaggtttattccgtcaagccgcgccttatcggtatcggcggcggcactatggcggcgtactttcgcaacataggcatagactgcgccgttgggacaaagacggacgagacccttcaccagccgaacgagtacgccctcctggataatatcctcggggacgcgaaggtaatggccctgttggcgataaattaa

SEQ ID NO: 48784 - protein, 276 aa, Unknown
  Obtained from environmental sample
  DOMAIN (1)...(276): Peptidase family M20/M25/M40
  misc_feature (1)..(276): Xaa is any amino acid
MSSVITALAFVSGSLKPTRTIKLLFAADEEVGSAFGIEWLVKNHGDLFYKNDMVLVPDGGDIKGECIEIAEKNILWVKFVTHGKQAHGSMPDSGANAFLAGADLATRLHHGLSAKFKKRDSMFDPDYSTFQPTKKEANVPNINTIPGEDVFYMDMRVLPCYSNDSVFAEIDRIKTKIEKEYHVKVEYSLSQSTQSKATDVKAPIVTLLNDAIPQVYSVKPRLIGIGGGTMAAYFRNIGIDCAVGTKTDETLHQPNEYALLDNILGDAKVMALLAIN

SEQ ID NO: 48785 - DNA, 1644 bp, Unknown
  Obtained from environmental sample
  misc_feature (1)..(1644): n is a, c, g, or t
gtggtgttggttattatggacggcgtcggctacggcaagtacaaggaaggcgacgcggttgccgattcaaaaatgtaccatctgaccgagcttacggaaaaatgcccccataccaagctcaaggcgcacggaaccgccgtaggactgccctccgacgacgatatgggcaacagcgaggttgggcataacgcgatgggctgcggacgggtgtttaaccagggggcggcgctggtgtccaaatcccttgaaacgggagccatgtttgaaggcgcggcatggaaggagattgtcgccaatctcaaaaatggctcaaatgccaccggccgtgcccctaccctgcactttttgggacttttttccgacggcaatgtacacagccacatggaccacctgaaagcaatgatccggcaggcgaaacaggagggggtcaagcgggtgcgggttcacacgctgtttgacgggcgggatgtcggcgaaaccagcgccctggaatatgttgatccttttgaggcgtttttgaaagaactcaataccgctgattttgacgcgaaaatcggttcgggcggcgggcgcatgtggatcaccatggaccgctacggcgcggattggtcaatggttgaaaggggctggcactgccatgtgctgggaacgtcgcggcagtttgcctcggcgcgtgaagcggtggaaacctaccgcaaggaaattcccggcatcattgatcaggacttanaggaatttgtcatcgccgaagacggcaagcccatcggcactatcgaagacggcgactcgctggtgtactttaacttccgcggcgaccgcgccctggaaataaccgccgcttttgaagatgataatcttaccaaatttgaccgcaagcgccgcccgaaaatctgctacgcgggcatgatggaatatgacggcgacctgcacgttcccaggcgctacctggtcagcccgccctcaatcgaccgcaccatgggcgagtatctggcggcaaccggcgtgcggacgctggcaatctccgaaacgcaaaagtacggccatgtcacctactttttcaacggcaaccgcaccggcaaatttgacgacaagctggaaaactatgttgaaataaaaagcgatgtaattccctttgaacagcgcccctggatgaagtgcgcggaaattaccgaccaggttattgaggccatcggctcaggcaaatacgactttatccggctgaactatcccaacggcgacatggtggggcataccggcatttatcaggcggtggtgtgttccatggaaggcatggacatccagctgggcaggctccttaaagcgattgatgaagccggcgcggtgatggtcgttaccgccgaccacggcaacagcgacgatatgttcgagcatgacagaaagacnggagccgtttcactaaagagcgacggtactcccaaagcaaaaacaagccacagccttaaccctgttccgtgtattattcacgatcctgaacacaagggcgaatatccaatcgagccgaaagaaagcagcttgaatgaaaaattgggcataagctcaatcgctgctacctgtattcagcttttgggctttgtgccgccgcaggattacgataagtcagtgctgaaaatctcggccatctga

SEQ ID NO: 48786 - protein, 547 aa, Unknown
  Obtained from environmental sample
  DOMAIN (383)...(511): Metalloenzyme superfamily
  misc_feature (1)..(547): Xaa is any amino acid
MVLVIMDGVGYGKYKEGDAVADSKMYHLTELTEKCPHTKLKAHGTAVGLPSDDDMGNSEVGHNAMGCGRVFNQGAALVSKSLETGAMFEGAAWKEIVANLKNGSNATGRAPTLHFLGLFSDGNVHSHMDHLKAMIRQAKQEGVKRVRVHTLFDGRDVGETSALEYVDPFEAFLKELNTADFDAKIGSGGGRMWITMDRYGADWSMVERGWHCHVLGTSRQFASAREAVETYRKEIPGIIDQDLXEFVIAEDGKPIGTIEDGDSLVYFNFRGDRALEITAAFEDDNLTKFDRKRRPKICYAGMMEYDGDLHVPRRYLVSPPSIDRTMGEYLAATGVRTLAISETQKYGHVTYFFNGNRTGKFDDKLENYVEIKSDVIPFEQRPWMKCAEITDQVIEAIGSGKYDFIRLNYPNGDMVGHTGIYQAVVCSMEGMDIQLGRLLKAIDEAGAVMVVTADHGNSDDMFEHDRKTGAVSLKSDGTPKAKTSHSLNPVPCIIHDPEHKGEYPIEPKESSLNEKLGISSIAATCIQLLGFVPPQDYDKSVLKISAI

SEQ ID NO: 48787 - DNA, 987 bp, Unknown
  Obtained from environmental sample
  misc_feature (1)..(987): n is a, c, g, or t
gtgaaaatccgcagaaaggcgtgtgctaagggcatcccgtgcttgacttccatagatactgcaaatgcgcttgcagacagcttgctttctgggtacaacgagataaataccgaacttgttgatataaataatttgagaagcgagcgtatgaaacttgagtttacaaaaatgcagggttgtggcaacgattatatttacataaactgttttgatttaaacataaattcaccggagtctctctcggttcttttatccgacaggcattacggcataggcggcgatggcgtggttttgattatgcgttctgaggttgccgatgcaaagatgaggatgttcaacctagatggcagcgaaggtaaaatgtgcggaaacgcaatccgctgtgttgcgaaatatttatacgataataacgttatcagaaaattgcaaatgagcatagaaacgctcagcggcataaagaaactttatttaatcactcaaaatgggtttgtttcgtctgttaaggttgatatggggcgtgccgtgctggagccggaaaagataccggttaagttttctggcgaaagtgctgtagcaaagcaggtgatcattggcgatgtggcatacaccataacctgcgtttctatgggcaatccccacgcggttgtgttttgcgaagacgttgagaatttacgcgtttccgagataggtcctttgtttgaaaaagaccctttgttcccagacagggtgaataccgaattcgtagaggttatggacagaaaccatttgaaaatgcgggtttgggagcgtggtagcggtgaaacgcttgcttgcggaacgggagcctgcgcctcggtggtagctgccgttctaaacgggcattgcgacaaaggcacggacgtaaaagttcaacttctcggcggcgagcttataatcaactacacaggcgaaaccgtctttatgacaggcaaatgcaaaaaagtgtttgacggggtggtggagatataa

SEQ ID NO: 48788 - protein, 328 aa, Unknown
  Obtained from environmental sample
  SIGNAL (1)...(25)
  DOMAIN (54)...(177): Diaminopimelate epimerase
  misc_feature (1)..(328): Xaa is any amino acid
MKIRRKACAKGIPCLTSIDTANALADSLLSGYNEINTELVDINNLRSERMKLEFTKMQGCGNDYIYINCFDLNINSPESLSVLLSDRHYGIGGDGVVLIMRSEVADAKMRMFNLDGSEGKMCGNAIRCVAKYLYDNNVIRKLQMSIETLSGIKKLYLITQNGFVSSVKVDMGRAVLEPEKIPVKFSGESAVAKQVIIGDVAYTITCVSMGNPHAVVFCEDVENLRVSEIGPLFEKDPLFPDRVNTEFVEVMDRNHLKMRVWERGSGETLACGTGACASVVAAVLNGHCDKGTDVKVQLLGGELIINYTGETVFMTGKCKKVFDGVVEI

SEQ ID NO: 48789 - DNA, 399 bp, Unknown
  Obtained from environmental sample
  misc_feature (1)..(399): n is a, c, g, or t
gtgcctttgtcgcaatgcccgtttagaacggcagctaccaccgaggcgcaggctcccgttccgcaagcaagcgtttcaccgctaccacgctcccaaacccgcattttcaaatggtttctgtccataacctctacgaattcggtattcaccctgtctgggaacaaagggtctttttcaaacaaaggacctatctcggaaacgcgtaaattctcaacgtcttcgcaaaacacaaccgcgtggggattgcccatagaaacgcaggttatggtgtatgccacatcgccaatgatcacctgctttgctacagcactttcgccagaaaacttaaccggtatcttttccggctccagcacggcacgccccatatcaaccttaacagacgaaacaaacccattttga

SEQ ID NO: 48790 - protein, 132 aa, Unknown
  Obtained from environmental sample
  misc_feature (1)..(132): Xaa is any amino acid
MPLSQCPFRTAATTEAQAPVPQASVSPLPRSQTRIFKWFLSITSTNSVFTLSGNKGSFSNKGPISETRKFSTSSQNTTAWGLPIETQVMVYATSPMITCFATALSPENLTGIFSGSSTARPISTLTDETNPF

SEQ ID NO: 48791 - DNA, 420 bp, Unknown
  Obtained from environmental sample
  misc_feature (1)..(420): n is a, c, g, or t
atgagttattttttagacacgaatacgtgtatatattttctgaaaagtacaagtaaagtttttttggataagtttagcagtattgacgcaaacgatataaaaataccatccattgttaccgcagagctacattatggggctttgaaaagcgtaaggaaagatgagaatattgctaaaatatcaaaatttattgctctttatgatgttgtttcttttgataaaaaatctgcggaaatttatggtgatgttcgcaaaaaactagaaagcgttggaaatataattggcggtaatgatttgcttattgcctctattgttttagcaaataacgggattttagtaactcataatacaaaagaatttaatagagtggaaaatttgattatagaggattggttagaaatgaatgccgatgaagcataa

SEQ ID NO: 48792 - protein, 139 aa, Unknown
  Obtained from environmental sample
  DOMAIN (3)...(131): PIN domain
  misc_feature (1)..(139): Xaa is any amino acid
MSYFLDTNTCIYFLKSTSKVFLDKFSSIDANDIKIPSIVTAELHYGALKSVRKDENIAKISKFIALYDVVSFDKKSAEIYGDVRKKLESVGNIIGGNDLLIASIVLANNGILVTHNTKEFNRVENLIIEDWLEMNADEA

SEQ ID NO: 48793 - DNA, 882 bp, Unknown
  Obtained from environmental sample
  misc_feature (1)..(882): n is a, c, g, or t
ttgctgcgttttttcatcgtaatcttcacgccgctcaattaccttgcctcggcagggagaaacgtcataataaaaatcttcccgccaaacgcgaacaggcatattaccgaggacgagctgctgacttttgtggaagaggtaaggcaggaaggggggatcaataagcgtgaagagcagatgatccgccatgccattgaatttgacgagattaccgcggcggagattatgaccccgcggatggatgtggcggccgtatcggagaccgacactgtggggcatattgaatcgttgtttgagaatacgggcttttcccgcctgccggtttttcgtgacaatatcgacaatatcatcgggattatattgttgaaagattttcaccgtgaggtgataattaaaggcaaatccccttcggagattataaagcccgtggttcttgtcaccaagacaatgaaaatccccaggcttttgcagactctcaaggagaaacagtcccacatggcggtgctggtggacgaattcggcggcacccttggaatagttaccgttgaggatatagtagaggagctggtaggcgaaatttgggacgagcatgaccgcgtggtggaaccggttaagcgtaacgccgacggcagtttttccgcccttggcagcctgcagtttcaggatatggtggattatatcggcaacaaaacgtctaacgatgatttgcatgaaggcgacgagatccccgctactacggtcggcaactgggtaatggagacgaagggaagccttccccgcgcgggggagcagtttgactggcacaagctgcgtatcagggtatcgcgcgttcagcgccacagggttatggatgtggttgtaacaataagcaatgagcaatga

SEQ ID NO: 48794 - protein, 293 aa, Unknown
  Obtained from environmental sample
  DOMAIN (205)...(291): Transporter associated domain
  misc_feature (1)..(293): Xaa is any amino acid
MLRFFIVIFTPLNYLASAGRNVIIKIFPPNANRHITEDELLTFVEEVRQEGGINKREEQMIRHAIEFDEITAAEIMTPRMDVAAVSETDTVGHIESLFENTGFSRLPVFRDNIDNIIGIILLKDFHREVIIKGKSPSEIIKPVVLVTKTMKIPRLLQTLKEKQSHMAVLVDEFGGTLGIVTVEDIVEELVGEIWDEHDRVVEPVKRNADGSFSALGSLQFQDMVDYIGNKTSNDDLHEGDEIPATTVGNWVMETKGSLPRAGEQFDWHKLRIRVSRVQRHRVMDVVVTISNEQ

SEQ ID NO: 48795 - DNA, 735 bp, Unknown
  Obtained from environmental sample
  misc_feature (1)..(735): n is a, c, g, or t
gtggtgaataccctggaacagccggatattcttgaagcgctccgcttttttcattcctggtatagcgacggcattatcaatcccgacgcgaatatgatagatgaaagtccgcggggtaaaccttttttcatggcccaggcctggccttccgtagcggctgcttatgcccttcaggaaggagtggaacagtatgatcctgtgcgtttttttggcccttcctattccaccggctctattcaaggttccatgaacgccatcagcgctaattcaaaatacaagaaagaagcgctgcggttcctccaactggtcaacaccgataaaaaactgcgggatatgctgcacatgggcgttgagggaaagcattttgaatatgtaaacaacgggaccgcaataaaccgcctgcggacagactggccgctggtgaattatcagcagggcagttattttattcaaactccgctggcaacagcgccccacggttactgggacgaagtacgcagacaaaacgaagaagcgaagccttctgtgatgctgggttttatgatggacatagaacctgtgttaagcgaagtgatgaactgtcggagcgtctgggagaagtataaagtcgatttgcttaccggcgcctccgatcccgacaaggttttaccccaaattatggcggaactcaaaagcggcggctttgacaaggtacttaaggaagctcagcgccaggtagacgaattttccaaataa

SEQ ID NO: 48796 - protein, 244 aa, Unknown
  Obtained from environmental sample
  misc_feature (1)..(244): Xaa is any amino acid
MVNTLEQPDILEALRFFHSWYSDGIINPDANMIDESPRGKPFFMAQAWPSVAAAYALQEGVEQYDPVRFFGPSYSTGSIQGSMNAISANSKYKKEALRFLQLVNTDKKLRDMLHMGVEGKHFEYVNNGTAINRLRTDWPLVNYQQGSYFIQTPLATAPHGYWDEVRRQNEEAKPSVMLGFMMDIEPVLSEVMNCRSVWEKYKVDLLTGASDPDKVLPQIMAELKSGGFDKVLKEAQRQVDEFSK

SEQ ID NO: 48797 - DNA, 996 bp, Unknown
  Obtained from environmental sample
  misc_feature (1)..(996): n is a, c, g, or t
atgcaaaataaatttgagcgttggaattttatccccaaagcctggactcccctgcaatgggcaccattcgtgaaaaaggaaatagcaatagcgcacataaaaattttaagagacaaattttataagcacaaaaacgtgaaagtttcgtggaattcttgggaaacagcgcatttagaagcaatatacagccgaggcggtcaaaacctagcccccttgatttacgaagcatacaaaagaggcttagtttttgaaagcgacagcaatcatttaaatccaagcgaatgggaaaaaatcagaaacgccctcaactacagcgatgcttggctttttgaggaaataaaccaagaagaaaatttgccttgggacataatagatgcgggcataagcaaaaaatttttgcaaagagaatgggaaaaagcgcacaacccaaatgcagaacccgtgccaaattgcaaatggggcaaatgcggggcctgcggaatcccgggcaacggcaaagacaccattttggggaaaatcccttctgtacgggcaacccccgtggaagggcagccacagggggctgcccctacgggggttgcctccgcgggaattttcccatacaaaatcattttccgcaaaaccaaatccagccgttttttgccgcatcaaaacacattatcatttttcgaaagggcatttgtgaaacttgatattccaataaaattcagcgaagggttcagccccaaaccacgcatagcaaacacaggagcattgccgctgggtttggaatctctttgcgaaattatttccattgaacttttggaaaaattggatttggagaataaaaaagcagagcttgtgaaaaacataaatgaaatttttccgcaaggcttggagattgtctcaatagaacccctgaaaataaaactatcggcgcaagttcccaaatccacggattactgcatggcagggagaatacccgagggggttagtgcaaaaaaaggaggaaaatga

SEQ ID NO: 48798 - protein, 331 aa, Unknown
  Obtained from environmental sample
  misc_feature (1)..(331): Xaa is any amino acid
MQNKFERWNFIPKAWTPLQWAPFVKKEIAIAHIKILRDKFYKHKNVKVSWNSWETAHLEAIYSRGGQNLAPLIYEAYKRGLVFESDSNHLNPSEWEKIRNALNYSDAWLFEEINQEENLPWDIIDAGISKKFLQREWEKAHNPNAEPVPNCKWGKCGACGIPGNGKDTILGKIPSVRATPVEGQPQGAAPTGVASAGIFPYKIIFRKTKSSRFLPHQNTLSFFERAFVKLDIPIKFSEGFSPKPRIANTGALPLGLESLCEIISIELLEKLDLENKKAELVKNINEIFPQGLEIVSIEPLKIKLSAQVPKSTDYCMAGRIPEGVSAKKGGK

SEQ ID NO: 48799 - DNA, 921 bp, Unknown
  Obtained from environmental sample
  misc_feature (1)..(921): n is a, c, g, or t
ttggaacagtttgcactattactctttttgaaaaaaacagaaagcgtttgcgatgaaattttttccagaatacgcgaaattgaaaaatttatgagcgtgaatatttcctcctccgatgtcagccgcataaacgccgccgccggaattgagccggtacaggtgcaggaagaaacgtttaaggtaattggacgcgctgtttatttcgcggaattaagcggcggcgcatttgaccccacagtggggcctattgtctccctatgggggattagcggcaaaccgcgcgtcccaagcgacgaagaaatcagcgaagcgctgcctttaataaattggcgtaacgttgaatttgacgcgcggttaaaaagcgtatatcttacgcacagcggcatgtctcttgatttggggggcatcgctaaaggttacgccgcggatgaagcggttaaaataatcaagtcccatgaaataaacagcgcaaaaattgatcttggcggcaatattgtcatggtcggcgcgcggcgcgataaaaaaccctggaaggtcggcattcagaatccggacggaggacggggttccattatcgggtatttacggctgccggaaaaaacaatcgtaacatccggcgtttatgagcggagctttgaaaaagacggggtgttttatcatcatctcctgtccgtaacagacggatatcctgtgaaaaacgggcttgtatcggtaacaataataaccgatgtttccatggacgccgacgctctttctacggcggtttttgtttcaggttatgaaaagggattatccattttaaaaaattacggtgaagcgcangcggtttttgtttttgaagacaagagcgtaatcgctacgcccggttttgattttacgcttacagataanaaatataatatggcagccatgaaagaataa

SEQ ID NO: 48800 - protein, 306 aa, Unknown
  Obtained from environmental sample
  DOMAIN (1)...(284): ApbE family
  misc_feature (1)..(306): Xaa is any amino acid
MEQFALLLFLKKTESVCDEIFSRIREIEKFMSVNISSSDVSRINAAAGIEPVQVQEETFKVIGRAVYFAELSGGAFDPTVGPIVSLWGISGKPRVPSDEEISEALPLINWRNVEFDARLKSVYLTHSGMSLDLGGIAKGYAADEAVKIIKSHEINSAKIDLGGNIVMVGARRDKKPWKVGIQNPDGGRGSIIGYLRLPEKTIVTSGVYERSFEKDGVFYHHLLSVTDGYPVKNGLVSVTIITDVSMDADALSTAVFVSGYEKGLSILKNYGEAXAVFVFEDKSVIATPGFDFTLTDXKYNMAAMKE

SEQ ID NO: 48801 - DNA, 405 bp, Unknown
  Obtained from environmental sample
  misc_feature (1)..(405): n is a, c, g, or t
ttgacaaaaaggcctgtattcaccgcaattgtatttaacgagccggatcctaccggccatgcaaatggctggggatcaaaagcttattacgataagctttcattattggataattttgtggctattattgaacaggcagtaaaggattccgggatatacgacagcacggtttttgttttctcatctgaccacggcggtagctttaaagggcatgggatgaacacttccaagcatcgaaaaattccccttatattttacggagcgggtataaaaaaaggctatgtcattccttttcctactgatatttacgatacaacgccttctatgaccacaatcctgggacttcaagcgcctcaggaatggactggtagacctatattcgaaatttttgataatttaaaataa

SEQ ID NO: 48802 - protein, 134 aa, Unknown
  Obtained from environmental sample
  misc_feature (1)..(134): Xaa is any amino acid
MTKRPVFTAIVFNEPDPTGHANGWGSKAYYDKLSLLDNFVAIIEQAVKDSGIYDSTVFVFSSDHGGSFKGHGMNTSKHRKIPLIFYGAGIKKGYVIPFPTDIYDTTPSMTTILGLQAPQEWTGRPIFEIFDNLK

SEQ ID NO: 48803 - DNA, 405 bp, Unknown
  Obtained from environmental sample
  misc_feature (1)..(405): n is a, c, g, or t
atgaacaaagaaaaagtaaaaattgccattataattgttattgatctctttattattctttcatgcgctacttctattatgctgcccagagaaaccgtgcttaattcaaattttactcctgccagacatttagtttttatagggtttgatggatggggtgcggcatatttaaaaaaagcatatatgccaacaataaaacggatgatttcggatggaactttgagtaccgagacacgttctgtaatgccaagcgtcagttggcaaaattggacttccatttttatgggaactccgcctgaaaaacggtcaaaagataatttccccttcattttttcagttgtaaaaggaatcatttttctatggttcaaagaagatccagaaactcaagccgttctttttttatga

SEQ ID NO: 48804 - protein, 134 aa, Unknown
  Obtained from environmental sample
  misc_feature (1)..(134): Xaa is any amino acid
MNKEKVKIAIIIVIDLFIILSCATSIMLPRETVLNSNFTPARHLVFIGFDGWGAAYLKKAYMPTIKRMISDGTLSTETRSVMPSVSWQNWTSIFMGTPPEKRSKDNFPFIFSVVKGIIFLWFKEDPETQAVLFL

SEQ ID NO: 48805 - DNA, 333 bp, Unknown
  Obtained from environmental sample
  misc_feature (1)..(333): n is a, c, g, or t
atgttgtatctttactcatccgccagggcgttgctttttccaggtattgaagattttggaattattccggtagaagcccaagccgcaggctgtcccgtgatcgcataccgccgcggcggcgcgcttgatacagtaattgagggtgtaacgggcattttttttgatgaacaaacccctgcttccatcatagaagcaatgaatcgctttgagtcaataaaagcggaaggcgcctttaataacagggatgtattttccggccatgtacggcaattttcacctgatgtgttcaaggataaagttaaaagaattattgaagaaagaaaacgattgtag

SEQ ID NO: 48806 - protein, 110 aa, Unknown
  Obtained from environmental sample
  misc_feature (1)..(110): Xaa is any amino acid
MLYLYSSARALLFPGIEDFGIIPVEAQAAGCPVIAYRRGGALDTVIEGVTGIFFDEQTPASIIEAMNRFESIKAEGAFNNRDVFSGHVRQFSPDVFKDKVKRIIEERKRL

SEQ ID NO: 48807 - DNA, 849 bp, Unknown
  Obtained from environmental sample
  misc_feature (1)..(849): n is a, c, g, or t
atgaaagaaaaaatacctttgcggtttttcgttgttacctttttatggacatggggcttttttactccgttggtacttgtagggaatggatttatctcgcttggaaaagagtgcttttctataataacagtaccaataatagttatagcggctttcggtcccgctgtcggtgcgctttattcagtacgaacattaaacggaaaaggaagcataaagaaatatcttaaatcatttttgtctcttaggttcggttggaaggtatggttatcaatatttttaattctcggatttagttcttttatatgctggattataccggaatttttcggaggctccagattgccgatatacttgccgaatatacttttatttcccgtatatctggttttggtaacattttttggcgggggacaggaagaagtcggctggaatgggtatatatatccttttcttgaaaaaaggtttgggtgtatgttggctccgttaattatgggagtaatatggtcagtttggcatctgccattgtggtttataccggaatcaattcaaagtcatatgaactttttttgctttacattgatggtaataggatatgcatattttcatacatggatagtagaaaagtcaggttatcgttctttatcgggattgatttctcatggaacagccaacgcatatgcagccatttttccatatttggatatgaaagaaaatgttccgcaaactcgtttctggttatatgccattaccacgcttttaattgggctaataatcggaatttatagacataaaaaatataaagaaacaatgaaacaaaagcacaaaaacaagaatattttttatggctag

SEQ ID NO: 48808 - protein, 282 aa, Unknown
  Obtained from environmental sample
  DOMAIN (126)...(231): CAAX amino terminal protease family
  misc_feature (1)..(282): Xaa is any amino acid
MKEKIPLRFFVVTFLWTWGFFTPLVLVGNGFISLGKECFSIITVPIIVIAAFGPAVGALYSVRTLNGKGSIKKYLKSFLSLRFGWKVWLSIFLILGFSSFICWIIPEFFGGSRLPIYLPNILLFPVYLVLVTFFGGGQEEVGWNGYIYPFLEKRFGCMLAPLIMGVIWSVWHLPLWFIPESIQSHMNFFCFTLMVIGYAYFHTWIVEKSGYRSLSGLISHGTANAYAAIFPYLDMKENVPQTRFWLYAITTLLIGLIIGIYRHKKYKETMKQKHKNKNIFYG

SEQ ID NO: 48809 - DNA, 621 bp, Unknown
  Obtained from environmental sample
  misc_feature (1)..(621): n is a, c, g, or t
ttggaaaaactgcttgaaaaatatacggagcgccatgaggctgttacgcgttataccgacgcttaccgccgttactgctgggatgtgaatagccttgacgactaccgtatcgccccgtttcatattctcgccaccgagggtaaaacatggaacaatgaaaaccatttagtacatatagaatccatcgcaaaatacatgtgcggatctgatcctgtttttatggcaacgaatcatcttttggtcgatttgttagatgaaagcagcatagcggcaggcgccgcgtggtgggaagctctgaccgaatcgggcggcgagggtatggtagtcaagccctttgacttcatagcgatgaaaggcaaggagcttttgcagccggccgtcaaatgcagagggcgcgaatatctgcgtatcatttacgggcctgaatacgctttaggcgccaatcttgaaaggcttaaacaacggtcgctcaggaagaagcgcgacctggcgctttgtgaattcgcccttggaatggaatcgctggaacgattcaccaaaaaagagccgctctaccgcgtccacgagtgcgtgttcggggtactggccctggaaagcgagccggtggatccaagactgtaa

SEQ ID NO: 48810 - protein, 206 aa, Unknown
  Obtained from environmental sample
  misc_feature (1)..(206): Xaa is any amino acid
MEKLLEKYTERHEAVTRYTDAYRRYCWDVNSLDDYRIAPFHILATEGKTWNNENHLVHIESIAKYMCGSDPVFMATNHLLVDLLDESSIAAGAAWWEALTESGGEGMVVKPFDFIAMKGKELLQPAVKCRGREYLRIIYGPEYALGANLERLKQRSLRKKRDLALCEFALGMESLERFTKKEPLYRVHECVFGVLALESEPVDPRL

SEQ ID NO: 48811 - DNA, 1026 bp, Unknown
  Obtained from environmental sample
  misc_feature (1)..(1026): n is a, c, g, or t
atggcgataccaccggcgaagtggaggatacggttcttcnggtacggctgccatgggcaaacgagtaccggggcaaggnccctggttgtatacgggcacacgcctgttccggaagcgcagatggttaataaaaccatttgcattgacacgggctgcgtattcggcggcaaactgaccgcgtaccgttaccccgaaagtgaaatcgtgcaggtaaacgcaaaacgggaatattacccccctgtgagaccttttcttgacaaacaaaccggcaattacgacgatatgctgaacattgatgatattcttggtcagaactgtttgaataccaaactgcgccattccataaaaataaacgctgaaaattcgtctgctgccctggaacttatgagccgcttcgcagcggatctccactggctcatatatctgccgcccacaatgtcgccctgtgaaacaagcaggctttccggctatctggaatatccaggcgaagcctttggttactataaagcgcacggggttggcaaggtggtctgtgagcaaaaacacatgggttcgcgcgcggtaatcgtcctttgcaaagacgccgaaactgccgcaaagcgttttggcgtcgcggataacagcttcggcatcatttatacccgcacggggaggcgcttcttcgatgattccgaaacagaaaaagccctactggcgcggttccggaaggcgctttccgaatcgcgtttctgggatgactttaatacgcaatgggcctgcgttgacgccgagcttatgccatggtccgcgaaggcgaaggagctccttgaaacccaatatgccccggtcggctgcgccggacgcaacgggctcgcggcggcgttggacgcaatcaaaaaagccgactgtnattcaaggggaacaagcccggagcggcgtcgtccgcccagggcgttgatttggaaaaactgcttgaaaaatatacggagcgccatgaggctgttacgcgttataccgacgcttaccgccgttactgctgggatgtga

SEQ ID NO: 48812 - protein, 341 aa, Unknown
  Obtained from environmental sample
  misc_feature (1)..(341): Xaa is any amino acid
MAIPPAKWRIRFFXYGCHGQTSTGARXLVVYGHTPVPEAQMVNKTICIDTGCVFGGKLTAYRYPESEIVQVNAKREYYPPVRPFLDKQTGNYDDMLNIDDILGQNCLNTKLRHSIKINAENSSAALELMSRFAADLHWLIYLPPTMSPCETSRLSGYLEYPGEAFGYYKAHGVGKVVCEQKHMGSRAVIVLCKDAETAAKRFGVADNSFGIIYTRTGRRFFDDSETEKALLARFRKALSESRFWDDFNTQWACVDAELMPWSAKAKELLETQYAPVGCAGRNGLAAALDAIKKADCXSRGTSPERRRPPRALIWKNCLKNIRSAMRLLRVIPTLTAVTAGM

SEQ ID NO: 48813 - DNA, 1344 bp, Unknown
  Obtained from environmental sample
  misc_feature (1)..(1344): n is a, c, g, or t
atggcggcatggcagcgcggtaataaaagacttgtgcggctgtggcatggaagagctaaaagccggacattgcggttattttttgttagttgcgcggaaagaggcgtcatgatttcacctttacagaaatgggttgggggaaaaaccggcttgggctcttccctaaatcctgataccctggaacaatttcaattcacccgcctgcgtgaacagctttattatgcgcgctcgcgatgcccttattactcaagacaactgcaaggtctggatattgaacatatcagggatcgctcttcccttcctttactgccctttaccccgtcgcaggcgttgcgggaagaaccgcagaagctggtctgcataagcggtggagacgcgccccgtgtcaccactctaaacacttccggttcaagcggcggtacaaagcgcgtctggttcagccaggctgaccttgcccgcaccatcgagttttttgcccagggcatgaccacaatggttgggccgggacagatggcacttgtcctgctttccggcagttccccggacagcctgggggatttgcttggcagggccctggcagacataggggtaaacccggttatccacgggcctgtgcgggaaatggagacggttataaacgcggcggaaaaagctgattgtataataggtttgccggttcagttgaaccgcatttgtttaagcgcaagcggcttgcgtccggcaacggtattattgacagccgattatatacctcaggggattatcaataatatacggaacttatggggcagcgcggtgtttacccattacggcatgaccgagagcggcttcggcctggcagtgcaatgcgaagcgcgcgaagcccatcacctgcgcgacgcggagtttatcgttgagatcatagaccctgccggtgagcaaagtcttccggacggccaatggggagaactcgcgcttacttctctctgtaatgaagccatgcctttgatacgttaccgtacaggcgatataacgcggcgcgttgtcggtccctgtccctgcggcggcgtccttcccaggctggataaaataaaaggccggatttccaacgtcactcaagccttttcaatctacgcgctggacgaagcgctcttcagtttacccggcttttttgattaccgcgcaaacattttgaatgatcgcgggcttgacctgactcttgacggtttatccgcgtatagcgaagaagaacttcgccgggctttgaaatcccaagggctggaaccgtctgttttaaaattccgtaacggggctttaccggttttttccggccccgccaaacgcagtatcatatctcagcgataa

SEQ ID NO: 48814 - protein, 447 aa, Unknown
  Obtained from environmental sample
  misc_feature (1)..(447): Xaa is any amino acid
MAAWQRGNKRLVRLWHGRAKSRTLRLFFVSCAERGVMISPLQKWVGGKTGLGSSLNPDTLEQFQFTRLREQLYYARSRCPYYSRQLQGLDIEHIRDRSSLPLLPFTPSQALREEPQKLVCISGGDAPRVTTLNTSGSSGGTKRVWFSQADLARTIEFFAQGMTTMVGPGQMALVLLSGSSPDSLGDLLGRALADIGVNPVIHGPVREMETVINAAEKADCIIGLPVQLNRICLSASGLRPATVLLTADYIPQGIINNIRNLWGSAVFTHYGMTESGFGLAVQCEAREAHHLRDAEFIVEIIDPAGEQSLPDGQWGELALTSLCNEAMPLIRYRTGDITRRVVGPCPCGGVLPRLDKIKGRISNVTQAFSIYALDEALFSLPGFFDYRANILNDRGLDLTLDGLSAYSEEELRRALKSQGLEPSVLKFRNGALPVFSGPAKRSIISQR

SEQ ID NO: 48815 - DNA, 633 bp, Unknown
  Obtained from environmental sample
  misc_feature (1)..(633): n is a, c, g, or t
gtgccgactttagtgcccggcgtgaacacccgcgaacttggcgatattattcgctttgccgtcaaacatagcccggctgtgagaggcgtgcactttcagcctgtcagttactttggccgaagccccctgctcccgcaatcaagcccccgttataccctggacgagctgttacgcgatattacggaacaaagcggcggtcttgcggaagcggatgatttttctccttcccgctgcgatcatcccctttgcgggctgcacggcgattttattgttctgccggacggaagcttaaaagcgctgaaacagtatagaaacgcgcaggaaacatctagctgctgtgaaccctgctgcgactctggagccgcggcgaaaaacagggcctttgtaggccggttctggcagcgttcgcaaagtgcggagccggaagatgaaaactgctgttgttccgggcatgaggaacttgaccttacggatatggggcaattcgcggcaagggtaaaaagccacggctttaccattacggccatggcttttcaggacgccgctactttggatatagcgcggctgcgccaatgcagcctgcatgtgtatgaaaatggaaaacatgtgcccttctgcgcatactatctataa

SEQ ID NO: 48816 - protein, 210 aa, Unknown
  Obtained from environmental sample
  misc_feature (1)..(210): Xaa is any amino acid
MPTLVPGVNTRELGDIIRFAVKHSPAVRGVHFQPVSYFGRSPLLPQSSPRYTLDELLRDITEQSGGLAEADDFSPSRCDHPLCGLHGDFIVLPDGSLKALKQYRNAQETSSCCEPCCDSGAAAKNRAFVGRFWQRSQSAEPEDENCCCSGHEELDLTDMGQFAARVKSHGFTITAMAFQDAATLDIARLRQCSLHVYENGKHVPFCAYYL

SEQ ID NO: 48817 - DNA, 660 bp, Unknown
  Obtained from environmental sample
  misc_feature (1)..(660): n is a, c, g, or t
atgtgtatgaaaatggaaaacatgtgcccttctgcgcatactatctataataatgcggctgaagagctctgccgcgttggcggcctggccttaactcaggaggcgctggatttttgcggatttgcccctggttcgcgcattgctgacattggctgcggcaaaggcgccaccgtgcggtatttgcgggccgccggatttgacgccgtcggccttgactgcgacacgaacatcattgagcaggcagggccgcattgccgccacggggattcatcacggttgccgtatcaggcggggagccttgacgggattttttttgagtgcagcctctcccaaatggagccgcgccgcagcgcactggccgaagcaaaccgggcattaaaggccgggggcaggcttgtactcagcgacatctactcccggaacgagcggccccacggctttttgccggcccgcagcacctggcaaacaataatcaccgacgcggcatttactgtccttctctttgcggacaaaagcgacggcctggcggagtttgcggcgcggctcttatggcagcacggcagcgcgggcttacaggcattgtgcggctgcgatatggacgcgctgcgagccgcccactgcggctatttcctgctcatagcgcggaaaggggccgcgtaa

SEQ ID NO: 48818 - protein, 219 aa, Unknown
  Obtained from environmental sample
  DOMAIN (48)...(132): Methyltransferase domain
  misc_feature (1)..(219): Xaa is any amino acid
MCMKMENMCPSAHTIYNNAAEELCRVGGLALTQEALDFCGFAPGSRIADIGCGKGATVRYLRAAGFDAVGLDCDTNIIEQAGPHCRHGDSSRLPYQAGSLDGIFFECSLSQMEPRRSALAEANRALKAGGRLVLSDIYSRNERPHGFLPARSTWQTIITDAAFTVLLFADKSDGLAEFAARLLWQHGSAGLQALCGCDMDALRAAHCGYFLLIARKGAA

SEQ ID NO: 48819 - DNA, 738 bp, Unknown
  Obtained from environmental sample
  misc_feature (1)..(738): n is a, c, g, or t
ttggccgagaacggtggtgaccccctggacctttacgccatagaaaccgcgctcaggcttaaggaacggtttttcccgcgcgacggggaaataaccgctatttcgatggggccccctgccgccatgcgggtactaaaagagacagccgcaatgggctgcgatcgctgcgccctgctttccgacaaacgattcagcggcgcggatacctgggctacctcctatacacttgcccagggagccaaaaaactgggcccctttgatattatcgttgccggagagcgggccaccgacggggataccgcccaggtggggcccgctttggcggcatggctggacatcaatgttttgacctatgtctcaaaaattatagaaataaaaggcaatgaaatagctgggggccgtatcagggcggaacggcttgtggaagaaggctatgaaatgctggaggctcctctgccctgcttaatcacggtggtaaaggaaatcgccgtacccaggcttcccacgcttaaaggaaagctcaagtctaaagaaatgaatatccctgttttttccgcagatgacctcggaggaaaccctttgtattttggccttaacggttcgcctaccagggtagcaaaaatctatacctcttccgtttccaggggaggcagaacgataaaagttcaggatgaagattcccttaagctcgcggttgatgcacttatggatttgctggccgaaaaggggattgtatga

SEQ ID NO: 48820 - protein, 245 aa, Unknown
  Obtained from environmental sample
  DOMAIN (2)...(193): Electron transfer flavoprotein domain
  misc_feature (1)..(245): Xaa is any amino acid
MAENGGDPLDLYAIETALRLKERFFPRDGEITAISMGPPAAMRVLKETAAMGCDRCALLSDKRFSGADTWATSYTLAQGAKKLGPFDIIVAGERATDGDTAQVGPALAAWLDINVLTYVSKIIEIKGNEIAGGRIRAERLVEEGYEMLEAPLPCLITVVKEIAVPRLPTLKGKLKSKEMNIPVFSADDLGGNPLYFGLNGSPTRVAKIYTSSVSRGGRTIKVQDEDSLKLAVDALMDLLAEKGIV

SEQ ID NO: 48821 - DNA, 1662 bp, Unknown
  Obtained from environmental sample
  misc_feature (1)..(1662): n is a, c, g, or t
gtgaagccgccatttgccacttctaaagacccctggataagggaagtccttggggcagtttccgtccagcagggggacaagctcccggtgagcaagattcccaatgacgggactttccccaccgccacaacccagtacgaaaagcgtgcggttgcggaaagggttccctcctggaacccggaagtgtgcatacagtgcggtctgtgttcggctgtttgttcccatgcctgtatcagaatgaagaaccttaccaacgcggaagcttctgccgctccggctggctttaagacagcggagattaagccgaagccagtagaaggaaaaaagacagccctggccatttccgccgaggactgcatggaatgcggggtttgcataaactgctgcccaatgtcaaaagacaccgcaaagcccacagccctttcctggaaatctttcgccgacgacccggcataccacgaagagcaggccaaagcctggtattacttcctttcactgccggaagtgcccgccgcagaactcaatcttggcacacaaaagggtcttgcataccaaaggccgctctttgaattctccggggcttgtggcggctgcggcgaaacaccctatgtcaagctaatcagccagctttttggcgacaggatgatcatgggcaacgcgacaggctgctcctccatttatggcggtaacctgccaaccaccccctactgcaagcgggcggacggacgcgggccggcgtggtcaaacagcctctttgaggacgcggcggaattcgcaatgggcttcaggcttaccagcgacaagctggcgatccacgcccgcgaagttgccgcgcaagccaaaagcgaaggtattgccgcggggatcatcgacaagatactctccaatgatcaggccgatgacgcaaagatcgacgaaatgcggaaaagcatcgacgaactcaaagccgcggttaaaaacgactcaaagccaacggcgaaactgctttactcccttgccgatttctttgtaaaaagatcgatatggggtttcggcggcgacggatgggcctacgacatcggcttcggcggccttgaccacgtgctcgcctcaggcaaaaatgtgaacctcctttgtatggataccgaagtttattccaacaccggcggccagatgtcaaaggcaaccccggtaggcgctattgccaagttcgccaatgccggaaaggaaattaccaagaaagacctgggcgcgatagccatgagctatggttacgtgtatgtcgcgaagatttcgctgggctatgacatgaacaagacgatacaagctttccgcgaagcggaatcttacaatggcccctctcttatcatcgcctactcgcactgtatcaaccacggcatcgacatgagcaggggacttgaacatggcaaggcggcagtcaccagcggcctgtggcccctgttccgctacgatcccaggctcaaagaccagggcaagaaccccttccagcttgactccaaagaccccaccaccagcattgaggatttcatgtacagcgaagtccgcttcaagagcctcaagcaggccgaccccgcgcgcgccgacaggctgcttaaaatagccaaggacaaagccgagcggacctggaaagagtacaagtacctggcggaaagaccgttctaa

SEQ ID NO: 48822 - protein, 553 aa, Unknown
  Obtained from environmental sample
  DOMAIN (56)...(79): 4Fe-4S binding domain
  misc_feature (1)..(553): Xaa is any amino acid
MKPPFATSKDPWIREVLGAVSVQQGDKLPVSKIPNDGTFPTATTQYEKRAVAERVPSWNPEVCIQCGLCSAVCSHACIRMKNLTNAEASAAPAGFKTAEIKPKPVEGKKTALAISAEDCMECGVCINCCPMSKDTAKPTALSWKSFADDPAYHEEQAKAWYYFLSLPEVPAAELNLGTQKGLAYQRPLFEFSGACGGCGETPYVKLISQLFGDRMIMGNATGCSSIYGGNLPTTPYCKRADGRGPAWSNSLFEDAAEFAMGFRLTSDKLAIHAREVAAQAKSEGIAAGIIDKILSNDQADDAKIDEMRKSIDELKAAVKNDSKPTAKLLYSLADFFVKRSIWGFGGDGWAYDIGFGGLDHVLASGKNVNLLCMDTEVYSNTGGQMSKATPVGAIAKFANAGKEITKKDLGAIAMSYGYVYVAKISLGYDMNKTIQAFREAESYNGPSLIIAYSHCINHGIDMSRGLEHGKAAVTSGLWPLFRYDPRLKDQGKNPFQLDSKDPTTSIEDFMYSEVRFKSLKQADPARADRLLKIAKDKAERTWKEYKYLAERPF

SEQ ID NO: 48823 - DNA, 528 bp, Unknown
  Obtained from environmental sample
  misc_feature (1)..(528): n is a, c, g, or t
ttgatcattgttacggcggtttttctggttttcggcgttatggcaagccagtttgagtcatttgtcgatccgttgatcattttcttttcaataccgcttttgtttataggagtcatctggatatataaattaggcaatcagactatgtcgatgttctccattgtcggcattgtcgcccttgtcggcgttgttgtaaacaacgggattgttctggtagattacacaaacaccctgcgcgcccgcggaatgaaggtgcgggaagcgtgcgttgaagccggaaaaaggcgtttgcgccctattttaatgacaagccttacgactatcctcggtatggcccctattgcctttttcccgggagccggcgcggataccattcagccaataggtaaaacctttgtcggcggcctccttgtcagcacaataatgactatttttgttactcccgtaatgtactcggtattaaattcaaggcacgacagggtaaaggtaaaaacctctgaacctgagaataatcaggccggcgtatga

SEQ ID NO: 48824 - protein, 175 aa, Unknown
  Obtained from environmental sample
  SIGNAL (1)...(15)
  misc_feature (1)..(175): Xaa is any amino acid
MIIVTAVFLVFGVMASQFESFVDPLIIFFSIPLLFIGVIWIYKLGNQTMSMFSIVGIVALVGVVVNNGIVLVDYTNTLRARGMKVREACVEAGKRRLRPILMTSLTTILGMAPIAFFPGAGADTIQPIGKTFVGGLLVSTIMTIFVTPVMYSVLNSRHDRVKVKTSEPENNQAGV

SEQ ID NO: 48825 - DNA, 972 bp, Unknown
  Obtained from environmental sample
  misc_feature (1)..(972): n is a, c, g, or t
atgaataaactgaaagccgccgttatcggtcttgggcgcatcgcgtccctgcttgatgaagacactctacgcgaaaaaccatgcacccactccggcgccatcgccgccaacgaggattgcgtccttgccgccggatgcgacattgacgaagagcgccgcaatctttttgcggaaaaatggaaagttcccgtttacaaagacgcagacgaaatgctgcgtgtccataagccggatattttgtcgatagcgacccaccccgacagccactaccgttactgccgacttgccgcagacttcggcgttcccgttgtcatctgcgagaagccgcttgcggacaacatccgtgaagcgcgaaaaacggcaaagttagccgaaaaaggaaaaattgtcatcattacaaaccacgagcggcgttattcgcaagattacattaacgcgaaggctgttcttgatgaggagaaacttgggcggcttttacttgtacgcgcctgcctttacatgggaaaaaccaggcggcttattgaccagctttggcacgacgggacccatcttgcggacgcgataatgttccttacatcatccgggttgaaacacaggcggctttggggcgctaaactaaaatgtaaaagcggaaccgcgtggctggaaggggaattgcgtaaagataaatccgcgcagcctgttcccattctcatggaaataggcgcggggcgcgatcatcttatttttgagattgagttttcatgcgaaaaaggcagattacgcataggaaacggagtttttgaggtttgggaaagcgttccaagcccttacgctgaaaaattccgttctttgcaaaacacaggcgcacaattcagcgggcctacgggttattttgccaatatgcttaaagacgcggttctttgcgcccaaaacccaaaacataagccgtgctcgtgcgcgcaagacggactgcgtgttattgagtattga

SEQ ID NO: 48826 - protein, 323 aa, Unknown
  Obtained from environmental sample
  DOMAIN (4)...(135): Dihydrodipicolinate reductase, N-terminus
  misc_feature (1)..(323): Xaa is any amino acid
MNKLKAAVIGLGRIASLLDEDTLREKPCTHSGAIAANEDCVLAAGCDIDEERRNLFAEKWKVPVYKDADEMLRVHKPDILSIATHPDSHYRYCRLAADFGVPVVICEKPLADNIREARKTAKLAEKGKIVIITNHERRYSQDYINAKAVLDEEKLGRLLLVRACLYMGKTRRLIDQLWHDGTHLADAIMFLTSSGLKHRRLWGAKLKCKSGTAWLEGELRKDKSAQPVPILMEIGAGRDHLIFEIEFSCEKGRLRIGNGVFEVWESVPSPYAEKFRSLQNTGAQFSGPTGYFANMLKDAVLCAQNPKHKPCSCAQDGLRVIEY

SEQ ID NO: 48827 - DNA, 789 bp, Unknown
  Obtained from environmental sample
  misc_feature (1)..(789): n is a, c, g, or t
atgaatttttacaaaataaaagaaatatacccctggctttacagcatatatgatccccaggacgtattttgctatttagccgtcggaaaagaaaaagccttgctttttgacacagtgtacggaatcggcaatctgccttcggcaatcaaggaaataacggataagcctgtctgcgttgtccttggacacggtcatcttgatcacgccaacggcgcctatcaatttgaagaagcgtggatacatgaggctgattttgaattatgcagtcttcacacttcggaagaataccgtcagattgcccttaagcaaataaaagaatacggaattaaagcaccggatgattttaatcccaatgaatacctaanagccggaacaggcaatttgaaaaagatgcaagacggcaaaatattcgatcttggcggtttgcatattgaagtgataggcatgggcgggcacaccgccggttctataggaatccttgccaaagagccaaaagtacttctgacaagcgattcggcaacgccgcaggtttggatgtttaaaatagaatccctttctgtcaaggaatatatagccatgctggaacgggttattcaacttgatttcgataattttataacggggcatacggacgaaatatttccaaaatctgaatttaataaatacatcaatgccgcgcgtcatctttctatagaaaaatccgtgccctttaaatatcaccctgaattgaaagggcttctttacagtgaagacggcgttgaaattgtgttcagcgaagcgaaattatag

SEQ ID NO: 48828 - protein, 262 aa, Unknown
  Obtained from environmental sample
  DOMAIN (21)...(209): Metallo-beta-lactamase superfamily
  misc_feature (1)..(262): Xaa is any amino acid
MNFYKIKEIYPWLYSIYDPQDVFCYLAVGKEKALLFDTVYGIGNLPSAIKEITDKPVCVVLGHGHLDHANGAYQFEEAWIHEADFELCSLHTSEEYRQIALKQIKEYGIKAPDDFNPNEYLXAGTGNLKKMQDGKIFDLGGLHIEVIGMGGHTAGSIGILAKEPKVLLTSDSATPQVWMFKIESLSVKEYIAMLERVIQLDFDNFITGHTDEIFPKSEFNKYINAARHLSIEKSVPFKYHPELKGLLYSEDGVEIVFSEAKL

SEQ ID NO: 48829 - DNA, 1140 bp, Unknown
  Obtained from environmental sample
  misc_feature (1)..(1140): n is a, c, g, or t
atgcttctcgactacctttaccagaccaccggagtctacctattctacgggcgcatcttcgccacgagcgtcaccaccgtcttttcgttcgccttggcgatgctgctctttccgccctacataaagtttttgcgtgggctgaacgtctcctcggagtttgagaagggcggtacggcgcagcccgggccggtcatgccggctgggatactcttcttcttcatcgtcatagccaccacgcttatcgccgtgcgtatcaacccgtacgtgacgagcgcgctcatcatatactgcttcttcagcatcataggcgcggtcgacgacgtggccaaggtcataaaccagcgaaaggtcgcccgcggggagctctcaaagcaggactaccagtacaaggccgacggcatctcctcaagcctgcgccttacgctctacctcgtcatctctttcggcgtggccctgctcgcttacaagtatatacctaatataaacaagagcataaacatcccgttgctcagcatagacaggttttacccgtcgctcccggtttggctcttcatccctttcatgacgctgaccatcgcggtgatggccaacggggtgaacttcaccgacggcttcgacacgctggccacggtgcccgcgatctgctgtctgacgttcctcgggatcatctccttcgtgtcgagcaacagcgtgtggagcagctacctgctgatcccccacatccccggccttcaagagatactcccgctgataggcgcggtgatcgggacgcttttggcctacctatggtacaactcgccgccctccaccatcataatgggcgacagcggctcggtcggcctcggcgggttcatcggcatcctcttcatcttctcgaagtcggagttctacctccccatagtggccttcatcttcctgctggagttcgtctccgtgttcatgcagatgggctggttcaagctgacgaagaagcgcatattccgctgcgcccccatccaccaccacttccaattcggcatgagggccgccgggaagtacgcgagcgagttccacataaagtcgaaggtcacgtggcgcttccacatcacgtcggtggtgatgctgatcgtggggctggtgctgtttttgaagatacgctga

SEQ ID NO: 48830 - protein, 379 aa, Unknown
  Obtained from environmental sample
  DOMAIN (89)...(298): Glycosyl transferase family 4
  misc_feature (1)..(379): Xaa is any amino acid
MLLDYLYQTTGVYLFYGRIFATSVTTVFSFALAMLLFPPYIKFLRGLNVSSEFEKGGTAQPGPVMPAGILFFFIVIATTLIAVRINPYVTSALIIYCFFSIIGAVDDVAKVINQRKVARGELSKQDYQYKADGISSSLRLTLYLVISFGVALLAYKYIPNINKSINIPLLSIDRFYPSLPVWLFIPFMTLTIAVMANGVNFTDGFDTLATVPAICCLTFLGIISFVSSNSVWSSYLLIPHIPGLQEILPLIGAVIGTLLAYLWYNSPPSTIIMGDSGSVGLGGFIGILFIFSKSEFYLPIVAFIFLLEFVSVFMQMGWFKLTKKRIFRCAPIHHHFQFGMRAAGKYASEFHIKSKVTWRFHITSVVMLIVGLVLFLKIR

SEQ ID NO: 48831 - DNA, 819 bp, Unknown
  Obtained from environmental sample
  misc_feature (1)..(819): n is a, c, g, or t
gtggcgcggagaagatttttgcccggcaaattgggcgggacatggaattcggtaatgagcgaagacccgaaaagctttaaccaccttatcgccgaacaggacaattcaacttcttccgtggtaggcagcatgaacgactacctgatcgattacgacgtggtaaaccgcgaatggaagcccagagtcgcttcttttgaaataaaaattgattatacggcggatacgctggacgtaatttataccctgcgcgacgatgtttactggagctattataattcaaccaaaaaagtaaaagtgacaagcgacgacgtgatattctggtacgatgaaattcagggcgatcccgattgtttaagttcaagctacaacggccagtttttaaccatgccggacggaagcgaggcgcgcattaccattcataaaattgacgacaggcgtttttattttcattttcccaggataatagcggacccgcttttaacgacaaatatggatttcggtccgcgccatatttaccagcctgccaaaagagaaggaggcgccgataaagtaagaaatgttattttcaaggtgtcacaagaccccgtaacaattccctcaatgggcgaatggtttttggttgaatatactcccgggcaaaggcttgtttacaaacgaaatcccgattactggagaaaggacgcaaagggcgtatcactaccctacatcgaagaacaaatcgtccgcatcatccccgatgaaaacaccaaactgctccttttcaaagacggaaagaccgaaacctattctttacgtcctgaagatttggacggactgtaa

SEQ ID NO: 48832 - protein, 272 aa, Unknown
  Obtained from environmental sample
  misc_feature (1)..(272): Xaa is any amino acid
MARRRFLPGKLGGTWNSVMSEDPKSFNHLIAEQDNSTSSVVGSMNDYLIDYDVVNREWKPRVASFEIKIDYTADTLDVIYTLRDDVYWSYYNSTKKVKVTSDDVIFWYDEIQGDPDCLSSSYNGQFLTMPDGSEARITIHKIDDRRFYFHFPRIIADPLLTTNMDFGPRHIYQPAKREGGADKVRNVIFKVSQDPVTIPSMGEWFLVEYTPGQRLVYKRNPDYWRKDAKGVSLPYIEEQIVRIIPDENTKLLLFKDGKTETYSLRPEDLDGL

SEQ ID NO: 48833 - DNA, 1257 bp, Unknown
  Obtained from environmental sample
  misc_feature (1)..(1257): n is a, c, g, or t
gtgagccaccatcttctcgcccatgattacattgattcgtggttttcgcgtctttcgcaaatgagggacgtgcgctgtttttacatcctttgcccttcgcattggggactttcaacacagccttattctcttacaaacggctcttgggtaagcggtttcggaagcgttaactccgacaagaaaaaagtaagcatgcttgcaaaatccctcaaagtcgatttagacccaaaggtattcgatgttgaacacggagcgtcaacattaatgccgtacatcaaaaaatattttcccgacgctttaacagtcgttatcgcctacgaaggagaggctcccgtgaatgttccgaaaagcgccctgctcgcagattctcttaaaaactcctttgacaaaagaggaaagaaggaaaattttttattgatatcaaccgatttttcccatcacggcaatcttgaagagacaagaaagaaagacagtgtttcaatgatgtatttaagaagccccgccggcagctcatgttataatgttggctgcgataacgctccgggaatttttattcttgacaggcttggaaaaaacaatttggaatcttttatcctttaccataccaattcctgggaaatatcaggcgaatgggagcatgatgtaacaagttatttctttatatatctgggggacaggattcctataaatccggaaataaacgcgaaacttcgggaatcctatgacacagaaagattaaaggaaattcttcaatcggcaagagaaagtattttcaatgtttggaatgaaggcgggccgcctgctctgcctccgcccggcgagaacgaaggattggcagtgcgccttattgtcaggggaaaggatcgcggctgtcttgcgtggtataaaaactcaggcgatatgaatctctttgcggcatactgcgcggcacaagctctaagagacccgcgttatgagccgctccgccgggaagaagcgaaagacgctgttattgaactgctgatcttcggcgaatgggaagatatgcgaaatcctgaggattttattcccggaaaccacaatctttggcttttcgacggttttaacaacacaatccttcaggcatccgtagcctcgcaaagacactattcaaaaaaagtttttcttcaaagaatatgcgaaaaagccggtcttgataaaaacgcgtggaacgaaaataaaaacctcgtatggcgcaaaagccccgccgtttggataacggaaccgctggtaatgtag

SEQ ID NO: 48834 - protein, 418 aa, Unknown
  Obtained from environmental sample
  DOMAIN (2)...(222): Protein of unknown function DUF52
  misc_feature (1)..(418): Xaa is any amino acid
MSHHLLAHDYIDSWFSRLSQMRDVRCFYILCPSHWGLSTQPYSLTNGSWVSGFGSVNSDKKKVSMLAKSLKVDLDPKVFDVEHGASTLMPYIKKYFPDALTVVIAYEGEAPVNVPKSALLADSLKNSFDKRGKKENFLLISTDFSHHGNLEETRKKDSVSMMYLRSPAGSSCYNVGCDNAPGIFILDRLGKNNLESFILYHTNSWEISGEWEHDVTSYFFIYLGDRIPINPEINAKLRESYDTERLKEILQSARESIFNVWNEGGPPALPPPGENEGLAVRLIVRGKDRGCLAWYKNSGDMNLFAAYCAAQALRDPRYEPLRREEAKDAVIELLIFGEWEDMRNPEDFIPGNHNLWLFDGFNNTILQASVASQRHYSKKVFLQRICEKAGLDKNAWNENKNLVWRKSPAVWITEPLVM

SEQ ID NO: 48835 - DNA, 477 bp, Unknown
  Obtained from environmental sample
  misc_feature (1)..(477): n is a, c, g, or t
atgcgatgcccccattgcggcagtattgatgataaggtagttgaatccaggacccttgctaatggggaggcgatacgccggcgcagggaatgtgaacgttgcggctacaggtttaccagctatgagcggacggaagacaaccagttcatggtgataaaaaaggacggaaggagggagccttttgagcgggacaagatagaaaggggcatcaagcacgcgatgcggaaacggccggtgtcgcagatgcagattgaaagcctggttaacgaaatcgaggacgaggcggcgattgtcaacaaggacagcagggagattccttcaaaagtgataggggatttgatacttgaaagactggaaaaacttgacaaggtcgcgtacatccgcttcgcttccgtgacccgccattttgagagtgtggacgaatttatacatgagataaataatctgggagaggaacaaaaatcccagtctccttga

SEQ ID NO: 48836 - protein, 158 aa, Unknown
  Obtained from environmental sample
  DOMAIN (49)...(141): ATP cone domain
  misc_feature (1)..(158): Xaa is any amino acid
MRCPHCGSIDDKVVESRTLANGEAIRRRRECERCGYRFTSYERTEDNQFMVIKKDGRREPFERDKIERGIKHAMRKRPVSQMQIESLVNEIEDEAAIVNKDSREIPSKVIGDLILERLEKLDKVAYIRFASVTRHFESVDEFIHEINNLGEEQKSQSP

SEQ ID NO: 48837 - DNA, 597 bp, Unknown
  Obtained from environmental sample
  misc_feature (1)..(597): n is a, c, g, or t
ttgtataatacaggcatgactgccgaagaaaagaaaagcgtcgcgtcttttatcgacctggcctcaggccatgtaaggggagggtactcccgggctgagagggagtataatttttccgatgatacggccaacagcccaaagggcgcgcctgatcctctggttatggtaattggcgatgtctccgactcgggtgaagacgccatccttcttgataaaatgcttggatcaattaatttgtccagggaaagcaactgctttatcgcaaatattattaaataccgtccgcctgataaccgcgagccccagcctgatgaaatcgccgcctgcgccggttttcttgaatctcagatacaatcccttaaaccccgctttatactctgtgtcggaagcttgtctgcgcaagccatgctccatagcgggattgaaaaactgcgcggaaggttgattgattataaggttaatggtatgacaataccgcttgtagcaacttaccatcccaccgacctcttgcgtaacgaagagtacaagcgcccggcttgggacgaccttaaattgcttcgcgccgcgtttgggcccgtggaaagcggggccagatag

SEQ ID NO: 48838 - protein, 198 aa, Unknown
  Obtained from environmental sample
  DOMAIN (45)...(188): Uracil DNA glycosylase superfamily
  misc_feature (1)..(198): Xaa is any amino acid
MYNTGMTAEEKKSVASFIDLASGHVRGGYSRAEREYNFSDDTANSPKGAPDPLVMVIGDVSDSGEDAILLDKMLGSINLSRESNCFIANIIKYRPPDNREPQPDEIAACAGFLESQIQSLKPRFILCVGSLSAQAMLHSGIEKLRGRLIDYKVNGMTIPLVATYHPTDLLRNEEYKRPAWDDLKLLRAAFGPVESGAR

SEQ ID NO: 48839 - DNA, 1206 bp, Unknown
  Obtained from environmental sample
  misc_feature (1)..(1206): n is a, c, g, or t
ttgcgggaaaaggcaggcgtattatccgaagatgatcttttacagcttcattttcaatatgataataacgcctcccctttatctgtccgcttgcctgtaagagaagaaagttatccccacgccgtaacttatcctttttttgaaaatttaactcctgaaggcgaagcctntgagatactcacaaaagaccatgtctcaggcaataatgttttttctattcttaacagattcggcggagattgcgcaggagcggtgtctttttatgaaacagcgccggaaaacagcggcgaaaacataagcgaaatatcttcccgtaaaatcgcgcaaataattgacaaactgccacaggatcccttgcttactagcattgaaaatccgccgcgtctttcactggcaggggctcaatcaaagttcgcagtatataaattagacggaaaatattaccgttcaagcgatgtaaatcccacaactcatataataaaaattaccaataaaagatttccggatttactaaataacgagtttttttgcatgaaactcgcaaaggatattttacctgatgttcccgaaattgagttattggaagccgaaggccgtccgtatcttgagattaccagatatgacagaaatgttaacaacagaacagttcaacgtatacatcaggaagatttttgtcaggcgcttggcattgtctcaggcaagaaatatcagacaggcggcggcgtgaaaataaaggattgctataagatcatcaatgaattttccgaaaaccgcctttctgacattatccggtttacggaatggattatttttaattatttaatcggaaatacggacgctcacgcaaaaaatttgtctttacttcacagcgattcaggagttaaacttgccccgttttatgatttactttcaaccgaagtttaccctgaaagcatcattgaccatgaaatggctatgcttataaatggcaaggggaaatataattctctaagacctaaagattttatcgcgttatttgagaatctggaacaaaattctacaaatatgatgaagactatattatttaaatttgcgaatattgtccctatggctgaaaagcttcgtgaaaatatgcctgacccggatataccaatctataataaaattatcgcgattattaaaaaacgtttttccgttttatttgggtatattccatataattcttaa

SEQ ID NO: 48840 - protein, 401 aa, Unknown
  Obtained from environmental sample
  DOMAIN (130)...(209): HipA-like N-terminal domain
  misc_feature (1)..(401): Xaa is any amino acid
MREKAGVLSEDDLLQLHFQYDNNASPLSVRLPVREESYPHAVTYPFFENLTPEGEAXEILTKDHVSGNNVFSILNRFGGDCAGAVSFYETAPENSGENISEISSRKIAQIIDKLPQDPLLTSIENPPRLSLAGAQSKFAVYKLDGKYYRSSDVNPTTHIIKITNKRFPDLLNNEFFCMKLAKDILPDVPEIELLEAEGRPYLEITRYDRNVNNRTVQRIHQEDFCQALGIVSGKKYQTGGGVKIKDCYKIINEFSENRLSDIIRFTEWIIFNYLIGNTDAHAKNLSLLHSDSGVKLAPFYDLLSTEVYPESIIDHEMAMLINGKGKYNSLRPKDFIALFENLEQNSTNMMKTILFKFANIVPMAEKLRENMPDPDIPIYNKIIAIIKKRFSVLFGYIPYNS

SEQ ID NO: 48841 - DNA, 579 bp, Unknown
  Obtained from environmental sample
  misc_feature (1)..(579): n is a, c, g, or t
ttggcacgagcggcacgagccccaggagaacttcacgagcaaaaagactttgaccgaacaggaaagaaagctgttgtatgcccacccggttttgggttttacctcctgaaatcctttgactttcccctggttatttgcctgggagcgcttgagcaccatgaacgggaaaacggaaccggatatccccagcgcaagaccggcgacaaaatcagcctgtacgcgaaaattatcgccgtggcgtgttcttatgaggctattttatccagccgctcctacaaggatgccaaggacggccacacggggatactggaactgctgaaaaatgaggggaaacaatacgatgacaccattgtccgggcgctggtatattcgctgtcgctgtatcccatcggcctgtatgtactgttatccaacgggaaaaggggacaggtggttgacgtgaatccggagaatccccgcttccccattgtagaggtattcggggagcttatgcccaacggtaaaaacaaagccgtacagacttcagctaacggctgttccatagtccgcccccttaccaaagcagaacttgaaggttag

SEQ ID NO: 48842 - protein, 192 aa, Unknown
  Obtained from environmental sample
  misc_feature (1)..(192): Xaa is any amino acid
MARAARAPGELHEQKDFDRTGKKAVVCPPGFGFYLLKSFDFPLVICLGALEHHERENGTGYPQRKTGDKISLYAKIIAVACSYEAILSSRSYKDAKDGHTGILELLKNEGKQYDDTIVRALVYSLSLYPIGLYVLLSNGKRGQVVDVNPENPRFPIVEVFGELMPNGKNKAVQTSANGCSIVRPLTKAELEG

SEQ ID NO: 48843 - DNA, 1299 bp, Unknown
  Obtained from environmental sample
  misc_feature (1)..(1299): n is a, c, g, or t
ttgccgatgattatactcattgccgcattaatcctggcaagtggatttttttccttgtttgaacaggcgctgaaaaccgccggcaaaccccatctgcacccggaaaccgctcatgctgaaaaacaggacgcccaaggagccacccaacgggtcgcccgccgccgccgtctgtttttgaaagcggcggaagattcagatcgttaccttatggcggcgcatttttggcgcatcaccctcagaacctttgccgccgtcattgccgggatggtaatacaatccgccgcgcatctggtcttcctgtccgcggccgtctgcgccgccgtattgataggcgtaatgctcctgctggacagcctcatattcagcgttgcccgccgcgccgcggaaggcatagcggcggcggccttccctctctttgaactttttaccctgcccctgcggcctttttatacgctgatacacagcgccgggcagcggctgcggaaggtatttccctcggagccgccgccgccggccatgaccgaggatgatctgcgccttgcccttatggaaggggaaaaatcgggcattgttgaaagcaaggaacgaaccatggtagaaggggtcttttatctgggagaccggcctctcggcgcttttatgactcaccgttccgaaatccaatggcttgatatcaacgacccgttaactgacatccgcgcgaagattctggaataccgtaatcaacgctgttttcccgtagccgacggcgctcttgacgccattataggggcggcctatccggaagatataattcttgacacggtttccgactcgcctgccggactgcgggccataatgaaaacagccctgttcgcgccggaaaccatgccggccctgaaagcctttgaatcattcaggcggggaaaggcggattttctgtttgtcatggatgaatacggcggttttgccggcatagtcagcgtacttgacctgatggaagaaattgtcggcgaactgaccgcccctgtccgtgcggaagaacaggcggtacggcaggaagacggctcatggctggcaagcggcggcttgaatattgacgaagcggcggcgcttttctccctgcccgatctttcagccgcgatggaatcttctggcggcgcgcacggcggctaccatacccttgcgggcctggtgctttcaattgccggggaacttccccgttcaggcgacagcttcgtttatcaggactgccgctttaccgttctggaaatggacggcaaccgcatcgagaagattgctgtaaagaaagaagactaa

SEQ ID NO: 48844 - protein, 432 aa, Unknown
  Obtained from environmental sample
  SIGNAL (1)...(23)
  DOMAIN (2)...(195): Domain of unknown function DUF21
  misc_feature (1)..(432): Xaa is any amino acid
MPMIILIAALILASGFFSLFEQALKTAGKPHLHPETAHAEKQDAQGATQRVARRRRLFLKAAEDSDRYLMAAHFWRITLRTFAAVIAGMVIQSAAHLVFLSAAVCAAVLIGVMLLLDSLIFSVARRAAEGIAAAAFPLFELFTLPLRPFYTLIHSAGQRLRKVFPSEPPPPAMTEDDLRLALMEGEKSGIVESKERTMVEGVFYLGDRPLGAFMTHRSEIQWLDINDPLTDIRAKILEYRNQRCFPVADGALDAIIGAAYPEDIILDTVSDSPAGLRAIMKTALFAPETMPALKAFESFRRGKADFLFVMDEYGGFAGIVSVLDLMEEIVGELTAPVRAEEQAVRQEDGSWLASGGLNIDEAAALFSLPDLSAAMESSGGAHGGYHTLAGLVLSIAGELPRSGDSFVYQDCRFTVLEMDGNRIEKIAVKKED

SEQ ID NO: 48845 - DNA, 786 bp, Unknown
  Obtained from environmental sample
  misc_feature (1)..(786): n is a, c, g, or t
gtgaaggagctctacccaagaatcagccttcgttacagccaaagctccacggaaaagggccttgttttggaacaaagcccccagccgggtactattgttaaggcaggccggaggatacagcttgtggtaagccagggggtaatggtcaataccattgaaaattacctgggcagaaatattgacgaggttcgcatggacatccagacccttttgtcaactcagagcgctggagggagcgtccagccggttaccataaaagaccctgtgatgtaccaattctccacagaaccggcgggaacggttttgcagcaaaaacctgaagcgggtacggctatttccgggccgacagtgttggaacttgtggtgagccggggcagcgaaaacgtaatgacaaagctgccgaatctccttgggttgggccttaatgacgcgctggaacagataggtttgaccggaatagattttgagttctcgatcaggcagagccagggcagtgaaagggccggaactgtggtttaccagaacccgggcggggatgtccttgccgcttcaagcacaagggttgagatcgttatgaccataccggacaacctgccgcaaaatcaggttttcggcctttttacctacgatatagcgcaaaacccataccccctcctggtaactttggaaagcatactctccggcggcgcaagggagcggcttattgtcggtgcagtaccccggaggtcggctttcggttccgtaccttcagccttccggggcggtgctggtactctcaatgcttaa

SEQ ID NO: 48846 - protein, 261 aa, Unknown
  Obtained from environmental sample
  misc_feature (1)..(261): Xaa is any amino acid
MKELYPRISLRYSQSSTEKGLVLEQSPQPGTIVKAGRRIQLVVSQGVMVNTIENYLGRNIDEVRMDIQTLLSTQSAGGSVQPVTIKDPVMYQFSTEPAGTVLQQKPEAGTAISGPTVLELVVSRGSENVMTKLPNLLGLGLNDALEQIGLTGIDFEFSIRQSQGSERAGTVVYQNPGGDVLAASSTRVEIVMTIPDNLPQNQVFGLFTYDIAQNPYPLLVTLESILSGGARERLIVGAVPRRSAFGSVPSAFRGGAGTLNA

SEQ ID NO: 48847 - DNA, 612 bp, Unknown
  Obtained from environmental sample
  misc_feature (1)..(612): n is a, c, g, or t
ttgatagaggccacatccagcacaggggccttcgtcatgttctctggcgccgtcaagcgcgctgccgtgaagttgagcaagctgtgcaacgaccttcgcctgctctccagcggccctaggtgcggcctacaggagatcaacctgccgccgcgcgcgccaggcagcagcatcatgcccggcaaggtgaacccagtgataccggaagtggtgaaccaggtggcattcagggtcataggcaacgacctgacgctcaccctggccgcagaggccggccaactgcaactgaacgtcatggagcctatactggcattcagcctgttcgagagcgtgaggatgctggccgccgccgtgaacacgctcacgtcccgctgcatagtcggcataaccgccaacgccgagcattgccgcgaaatggtggagcacagcataggcatagtgacggccatcctcccggcggtcggctacaaaaaggccacagaggtggccaagatagccctggagactggcaagcccgtccgcgagatactcaccgaaaaagcttggctgaccgacgcgcaactggacgaaatcctaagccccgagtccatgacggagccgaagcacggtggctag

SEQ ID NO: 48848 - protein, 203 aa, Unknown
  Obtained from environmental sample
  misc_feature (1)..(203): Xaa is any amino acid
MIEATSSTGAFVMFSGAVKRAAVKLSKLCNDLRLLSSGPRCGLQEINLPPRAPGSSIMPGKVNPVIPEVVNQVAFRVIGNDLTLTLAAEAGQLQLNVMEPILAFSLFESVRMLAAAVNTLTSRCIVGITANAEHCREMVEHSIGIVTAILPAVGYKKATEVAKIALETGKPVREILTEKAWLTDAQLDEILSPESMTEPKHGG

SEQ ID NO: 48849 - DNA, 561 bp, Unknown
  Obtained from environmental sample
  misc_feature (1)..(561): n is a, c, g, or t
gtgcggcctacaggagatcaacctgccgccgcgcgcgccaggcagcagcatcatgcccggcaaggtgaacccagtgataccggaagtggtgaaccaggtggcattcagggtcataggcaacgacctgacgctcaccctggccgcagaggccggccaactgcaactgaacgtcatggagcctatactggcattcagcctgttcgagagcgtgaggatgctggccgccgccgtgaacacgctcacgtcccgctgcatagtcggcataaccgccaacgccgagcattgccgcgaaatggtggagcacagcataggcatagtgacggccatcctcccggcggtcggctacaaaaaggccacagaggtggccaagatagccctggagactggcaagcccgtccgcgagatactcaccgaaaaagcttggctgaccgacgcgcaactggacgaaatcctaagccccgagtccatgacggagccgaagcacggtggctagtgaataacgatgctataaaattaacctgtgcgttgcccttggaggtcccgtggaaaaaccaaaactag

SEQ ID NO: 48850 - protein, 186 aa, Unknown
  Obtained from environmental sample
  misc_feature (1)..(186): Xaa is any amino acid
MRPTGDQPAAARARQQHHARQGEPSDTGSGEPGGIQGHRQRPDAHPGRRGRPTATERHGAYTGIQPVREREDAGRRREHAHVPLHSRHNRQRRALPRNGGAQHRHSDGHPPGGRLQKGHRGGQDSPGDWQARPRDTHRKSLADRRATGRNPKPRVHDGAEARWLVNNDAIKLTCALPLEVPWKNQN

SEQ ID NO: 48851 - DNA, 432 bp, Unknown
  Obtained from environmental sample
  misc_feature (1)..(432): n is a, c, g, or t
ttgcgcgtcggtcagccaagctttttcggtgagtatctcgcggacgggcttgccagtctccagggctatcttggccacctctgtggcctttttgtagccgaccgccgggaggatggccgtcactatgcctatgctgtgctccaccatttcgcggcaatgctcggcgttggcggttatgccgactatgcagcgggacgtgagcgtgttcacggcggcggccagcatcctcacgctctcgaacaggctgaatgccagtataggctccatgacgttcagttgcagttggccggcctctgcggccagggtgagcgtcaggtcgttgcctatgaccctgaatgccacctggttcaccacttccggtatcactgggttcaccttgccgggcatgatgctgctgcctggcgcgcgcggcggcaggttgatctcctgtag

SEQ ID NO: 48852 - protein, 143 aa, Unknown
  Obtained from environmental sample
  misc_feature (1)..(143): Xaa is any amino acid
MRVGQPSFFGEYLADGLASLQGYLGHLCGLFVADRREDGRHYAYAVLHHFAAMLGVGGYADYAAGRERVHGGGQHPHALEQAECQYRLHDVQLQLAGLCGQGERQVVAYDPECHLVHHFRYHWVHLAGHDAAAWRARRQVDLL

SEQ ID NO: 48853 - DNA, 516 bp, Unknown
  Obtained from environmental sample
  misc_feature (1)..(516): n is a, c, g, or t
atgtatgagttattgcttgacaggcatggtataaaattaaattacggggaaaaattaagaatgttcgcaaattatgttgtcgcgtacgacatgagcgcgaatatagataaaatcaccaaaaaatcaaatgaaaaacttgctccaatgatagattcaataaaaagaagaaaaagtaacagcataaataaattaacaaaaatatttaaatttataaacgaacggttcataaaagaagtatcaaatatggataaagatttcaccgttaatgataattgtacaggctgtagtacatgtgaaaaaatttgtccggtgaaaaacattgaaatggtaaataataggccggaatataaacatcattgtgaacaatgtgtcgcgtgtattcaattttgtcctcaaaaagcaataaattataaaaacataactcaaaacaggaaacgatatacaaatcccgcagtaagttgtgaggaattatccggatataacaataaagaggcttgtgtagattatctttattag

SEQ ID NO: 48854 - protein, 171 aa, Unknown
  Obtained from environmental sample
  DOMAIN (85)...(108): 4Fe-4S binding domain
  misc_feature (1)..(171): Xaa is any amino acid
MYELLLDRHGIKLNYGEKLRMFANYVVAYDMSANIDKITKKSNEKLAPMIDSIKRRKSNSINKLTKIFKFINERFIKEVSNMDKDFTVNDNCTGCSTCEKICPVKNIEMVNNRPEYKHHCEQCVACIQFCPQKAINYKNITQNRKRYTNPAVSCEELSGYNNKEACVDYLY

SEQ ID NO: 48855 - DNA, 1185 bp, Unknown
  Obtained from environmental sample
  misc_feature (1)..(1185): n is a, c, g, or t
ttgcgatgttgcggtaataagagtaaattaaaaaaggaaaaagttttaatgatgatagaaaattcaataccggaaaaccaaacacctgttctgccggaaaaagaagattatctcactcaacagcttattacatatatcggaaacaaacgcgctttattgggatttatcggggagggaattaaaaagatccaaaacaaattaaacaaagaaaagttaaaaatgtttgatgtcttcagcggatcgggtatagtcgcgagatattttaaacaattttccgatttattaattgtgaatgatcttgaaaaatattcatcattaataaatgaatgttatttgtcaaatgacagcgagagaaatgaatttactttgcgtaaatattattatgaattagctgaacaggcagaaaacaaccttgttaaaggtattatttccgaattatacgctccgaaaaacgataaagagatagaacaaaacgaacgtgttttttatacgacaagaaacgcgatgtatatagatactatacggcaattaattgataatattccgaaagaatatcaaaaatattttcttgctcccctgttgtcggaagcgtcaatacacgcgaatacttccggtgtttttaaaggtttttataaaaataaaaaaacgggtattggtcaattcggagggataaaccgtgacgcgttattcagaataaccggcgatatagaactgccgtttcctgtttttagtaattttaactgtgaaacaatgatttgtaacggggattcaaatgaaatcattcattcattgcctgaaacagatatagcatatttagatccgccttacaatcaacacccttacggatccaattattttatgctcaatttaattttagattataaatatcctgagagtatgagtaaaatatcaggtattcctgaaaattggaatcgttctaattataataaaagtcaaaaagctctacagtcattaacagaactgtgnnaaggaataaaagcgaaatatgtattgatttcatttaattctgaaggttttattacgattgaacaaatgaaaaagatgttaaaaaaaataggcaaacttcaggtactggaaacaaaatataacacttttaggggaagcagaaatttaaataatcgtgaaattcatgtaaaggaatatttgtatctattggagaaataa

SEQ ID NO: 48856 - protein, 394 aa, Unknown
  Obtained from environmental sample
  DOMAIN (45)...(355): D12 class N6 adenine-specific DNA methyltransferase
  misc_feature (1)..(394): Xaa is any amino acid
MRCCGNKSKLKKEKVLMMIENSIPENQTPVLPEKEDYLTQQLITYIGNKRALLGFIGEGIKKIQNKLNKEKLKMFDVFSGSGIVARYFKQFSDLLIVNDLEKYSSLINECYLSNDSERNEFTLRKYYYELAEQAENNLVKGIISELYAPKNDKEIEQNERVFYTTRNAMYIDTIRQLIDNIPKEYQKYFLAPLLSEASIHANTSGVFKGFYKNKKTGIGQFGGINRDALFRITGDIELPFPVFSNFNCETMICNGDSNEIIHSLPETDIAYLDPPYNQHPYGSNYFMLNLILDYKYPESMSKISGIPENWNRSNYNKSQKALQSLTELXXGIKAKYVLISFNSEGFITIEQMKKMLKKIGKLQVLETKYNTFRGSRNLNNREIHVKEYLYLLEK

SEQ ID NO: 48857 - DNA, 333 bp, Unknown
  Obtained from environmental sample
  misc_feature (1)..(333): n is a, c, g, or t
ttgctcggtgtaattcttgacagcagtgttactcatatcggcgacggcgcgtttcaaaacaataaactgaccagtacaatctttggcaatagtgttactcatatcggtgacagcgcatttcagaacactgaactgatcagtataatattcggcaatagtattaaatacatctgtaatgacacgtttcacaataatgaactgaccggcgtaactatcccaaacagcgttactcatatcgacgacagggcgttttccagtaataaactgactaaagtaactattgacagcggtgctactcatattggcgaacggcctatttacaaaatagactga

SEQ ID NO: 48858 - protein, 110 aa, Unknown
  Obtained from environmental sample
  misc_feature (1)..(110): Xaa is any amino acid
MLGVILDSSVTHIGDGAFQNNKLTSTIFGNSVTHIGDSAFQNTELISIIFGNSIKYICNDTFHNNELTGVTIPNSVTHIDDRAFSSNKLTKVTIDSGATHIGERPIYKID

SEQ ID NO: 48859 - DNA, 582 bp, Unknown
  Obtained from environmental sample
  misc_feature (1)..(582): n is a, c, g, or t
ttgtcggtttctacccaccccactcagggaatgtttacatgggacgatgtggacattaccggtaaaccaatgttccgccgcgcaaggcttggcattgcctacctcccgcaggaagcctcgattttccgcaagcttaccgtagaacaaaatatcatggctgttttggaaagccgcaaagacatagacttgccgcaaaaaaaagaaaggctggaaaacctgttggacgatttcaacatagcccgcataagaaaacaatacggctacaccctttccggcggagagcgtcggcgcacggaaattgccagagcgcttgccaccgaaccaaagtttttactccttgacgaaccctttgccggcattgaccccatcgccgtttatgaaatcaagcagattataagaaagcttgccgaaaaaggcataggcatattgattacagaccacaatgtccgcgacacgcttgaaataacccacgaggcctttatcattgccgacggaattatagtagcccacggcgaccgcgacgagattcttaacaatgaaatggtgcgggaagtttatctcggcagcgagttcagaatgtaa

SEQ ID NO: 48860 - protein, 193 aa, Unknown
  Obtained from environmental sample
  DOMAIN (1)...(165): ABC transporter
  misc_feature (1)..(193): Xaa is any amino acid
MSVSTHPTQGMFTWDDVDITGKPMFRRARLGIAYLPQEASIFRKLTVEQNIMAVLESRKDIDLPQKKERLENLLDDFNIARIRKQYGYTLSGGERRRTEIARALATEPKFLLLDEPFAGIDPIAVYEIKQIIRKLAEKGIGILITDHNVRDTLEITHEAFIIADGIIVAHGDRDEILNNEMVREVYLGSEFRM

SEQ ID NO: 48861 - DNA, 879 bp, Unknown
  Obtained from environmental sample
  misc_feature (1)..(879): n is a, c, g, or t
atgacaaatcttgccaattaccgcggtcaaggaaagaagatcgtaactgtattcgtaaccggccgcccgcgcatagtgacgcagctcttgcaggcgagcgacgctttcttggtcgcgtggctgcccggcacggagggcggcggagtggcggacatcctcttcggaagcgccataaccggcacgctgcccgttacttggcccggcgccaacggcgcgcagttccaatacgggtttggattgaactaccttaaaactcccgccgccccgaacgcgccgacgctcgcctcaaaatcgcacaacagcgtaacgctcacgcccaacgccgcctatgagttttcgatagacagcgccgcgtggctgagaagcaacgaatttacggatttgacggcggagacggagtacacgttttatcaaagggtagccgccacggacacgacaaccgcttccgtgtcaagccacggccttaaagtgacgacaaacacggagccaatctccatagcgagcccaaaccgagaaatcccgtcagccaagaccgagggcgcgggcgtgttgcaaccggtgcccgccgtggcgataaatgatctctcagccgggcctaaccccgtaacattacgctccggcggcgtgaaattcttttggcggggcggcgggataaaaggcggatcgcttaatatatatgacgcgttcggcaattttatcaagaagatcaatatcaacgataaatcagcgagtgaatcgtgtggacgcgccgtcggcaaatgggactttaccgatagaagagggcgcagcgttttggagggaagttatctggtcaaaggaactgcaatcgggcgggacgggaagagcaaaaaaatctctttcgttttgggtgtgagatag

SEQ ID NO: 48862 - protein, 292 aa, Unknown
  Obtained from environmental sample
  DOMAIN (1)...(84): Glycosyl hydrolase family 3 C terminal domain
  misc_feature (1)..(292): Xaa is any amino acid
MTNLANYRGQGKKIVTVFVTGRPRIVTQLLQASDAFLVAWLPGTEGGGVADILFGSAITGTLPVTWPGANGAQFQYGFGLNYLKTPAAPNAPTLASKSHNSVTLTPNAAYEFSIDSAAWLRSNEFTDLTAETEYTFYQRVAATDTTTASVSSHGLKVTTNTEPISIASPNREIPSAKTEGAGVLQPVPAVAINDLSAGPNPVTLRSGGVKFFWRGGGIKGGSLNIYDAFGNFIKKININDKSASESCGRAVGKWDFTDRRGRSVLEGSYLVKGTAIGRDGKSKKISFVLGVR

SEQ ID NO: 48863 - DNA, 1839 bp, Unknown
  Obtained from environmental sample
  misc_feature (1)..(1839): n is a, c, g, or t
gtgtggactaaaccttatgttgacgattcaggctctttcagccttatgacaacggcaggcgcgggcatatttaatcaagacaggctgataggtatttccacaatagactgggaaatagataaagtgattaaggaattaaccgcgataaaaccgacaaaaaacagttttgttttattatgtgtgcctgaacaggattatataatctccggtacgcgcgcaggcattacttccggcgcttcaataaaaagccttccctgggatataaacgccgattcttttacattagacggcgttcaatatctgcgcttcgggcgtgatatggataacggctggctgttatccgtgcaaattcctaaagatgaaatttttgacgaggtggaaaaacagaataaccgtttctcgctgctcatagctctttcggtcgttgtgatgataggtctggcgtattaccttatttcaaaatttatcaacgcgccgataaaaaaactgaccaaggatgtctcccggctggcgcttggcaatctggatacgcatgttgaaatagactcaaatgatgaattgggtctgctggcgcaggcttttaataaaatgaccggcgatctgaaaaaatccatcgaggagaacgtccgcgagcgggcggaaaaaaaacggattggcgccgagcttggcgtggctgcggcgatacaggccagtatgcttcccaatattttcccgcccttcccggaaagaaccgaatttgacctgtacgcctccatgattccggcaaaggaggttggcggtgatttttatgatttctatttaattgacaaggacaatctggcggtggttatcgcggatgtttcaggcaagggcgttcccgccgcgttattcatgatgattacgaaaaccatgatcaaggacggcagtccgggtaatagcctgaaagatctttttgaatcagtaaacaaaaaattatgcgaaggcaatgaagcggatatgttcgttacggcgtttatgggcgtttacaatattcccagcggaagatttgtttttgtcaacgcgggacataatccgccgcttttaaaaaaacacggaagcggttatgagtttctggaaacggaacccggttatgttctggcatggatgaagaattcgcaatacaaggaaaaagaaatcagccttgaaccgggcgatgttctgtatttatatacggacggcgtaacggaagcgatgaaccggcggaaggaactcttcggcgaacagcggctgtttgacgcgctgaacgcaaacagggatgtcccgcttaaaaaactgttaccggcgatcaagcgggaagttgataatttcgaggatggaacagagcaggccgacgatattaccatgcttgccctgaagataaacaacgggagttccggcgaagcgccggatgacatgaataagctggaacttgaggcagacattgaaaatctgaataaggcgctggattttataaacacggagttggaacagcacggatgccccgaggacatacaggggaaaattgaggttgccgttgaagagatttttgtaaacatcgcgaattacgcctacgccgccgatggcagcgacagccctggtagcggagacgcggtcatatatatttcagttaacgataaagctgtaatccgttttgaagatacgggcaaaccctataaccccctggagaaacccgagccggatttggacaagccgctcatggaacgcgacataggcggtctgggcgttttccttgtcaaaaaattgatggacaatgtggaatacgccagggaaggtaataaaaatgttcttgttatgacaaaagcaatgaacaatgagcaatga

SEQ ID NO: 48864 - protein, 612 aa, Unknown
  Obtained from environmental sample
  DOMAIN (134)...(203): HAMP domain
  misc_feature (1)..(612): Xaa is any amino acid
MWTKPYVDDSGSFSLMTTAGAGIFNQDRLIGISTIDWEIDKVIKELTAIKPTKNSFVLLCVPEQDYIISGTRAGITSGASIKSLPWDINADSFTLDGVQYLRFGRDMDNGWLLSVQIPKDEIFDEVEKQNNRFSLLIALSVVVMIGLAYYLISKFINAPIKKLTKDVSRLALGNLDTHVEIDSNDELGLLAQAFNKMTGDLKKSIEENVRERAEKKRIGAELGVAAAIQASMLPNIFPPFPERTEFDLYASMIPAKEVGGDFYDFYLIDKDNLAVVIADVSGKGVPAALFMMITKTMIKDGSPGNSLKDLFESVNKKLCEGNEADMFVTAFMGVYNIPSGRFVFVNAGHNPPLLKKHGSGYEFLETEPGYVLAWMKNSQYKEKEISLEPGDVLYLYTDGVTEAMNRRKELFGEQRLFDALNANRDVPLKKLLPAIKREVDNFEDGTEQADDITMLALKINNGSSGEAPDDMNKLELEADIENLNKALDFINTELEQHGCPEDIQGKIEVAVEEIFVNIANYAYAADGSDSPGSGDAVIYISVNDKAVIRFEDTGKPYNPLEKPEPDLDKPLMERDIGGLGVFLVKKLMDNVEYAREGNKNVLVMTKAMNNEQ

SEQ ID NO: 48865 - DNA, 495 bp, Unknown
  Obtained from environmental sample
  misc_feature (1)..(495): n is a, c, g, or t
gtgatttcacagcttattgcaaatgcgcgaaaaataatagtcaagtttggttcaaatacccttgcaaacaacgagggaaaaataaataccgaattactttttgaatttgcacagcagacggcggcgcttgtacacagcggtaaacaaattgtatttgtttcttcaggcgcgcaggtagcgggactttctactatggacaagtgggcgcgaaaaaaggacattcactacaggcaggcgttatgcgcagttggtcaggtagaattgatgggcgcatggcggcacgcgtttgaccagcacggccttcacattgcgcaaattcttttaactcgggaagacttcaacgattctcacagaaacttgaacatgaggaacactattttcaccctagtggacgaagggattatcccaatcattaacgaaaatgacactgtttctgttgaagaaattaaaatcggcgataatgatacgctggcagcccgctctgcaatcctatga

SEQ ID NO: 48866 - protein, 164 aa, Unknown
  Obtained from environmental sample
  DOMAIN (10)...(163): Amino acid kinase family
  misc_feature (1)..(164): Xaa is any amino acid
MISQLIANARKIIVKFGSNTLANNEGKINTELLFEFAQQTAALVHSGKQIVFVSSGAQVAGLSTMDKWARKKDIHYRQALCAVGQVELMGAWRHAFDQHGLHIAQILLTREDFNDSHRNLNMRNTIFTLVDEGIIPIINENDTVSVEEIKIGDNDTLAARSAIL

SEQ ID NO: 48867 - DNA, 480 bp, Unknown
  Obtained from environmental sample
  misc_feature (1)..(480): n is a, c, g, or t
ttgtacacaaagacgcgctctcagcgcttatgccgaanatggcggcggcgcttgcaacacaatgcgaactgcgctgtgataacgcgggcaaaaaccgctatcggcgcaatacctgccgcccttgtttttaaggacgctgtgaggaaagactgggaaactgaattccttgattacattctcgctgtaaaaacagttgcttcatgcgacgaggcaattgcgcatatcaaccgctacggaacaaaacattcggaagcgatacttacaaatgatttaaagtcggcacaaaaatttaaagcgcaagtggacgcggcatgcgtttatgtaaacgcatctacacgatttacagacggcggagagtttggcttcggcgctgaacttgggattagcacgcagaaattccatgcgagagggcctatgggaccggaagcgctgactacgataaaatatcttataagcggctcagggcagatacggagctag

SEQ ID NO: 48868 - protein, 159 aa, Unknown
  Obtained from environmental sample
  misc_feature (1)..(159): Xaa is any amino acid
MYTKTRSQRLCRXWRRRLQHNANCAVITRAKTAIGAIPAALVFKDAVRKDWETEFLDYILAVKTVASCDEAIAHINRYGTKHSEAILTNDLKSAQKFKAQVDAACVYVNASTRFTDGGEFGFGAELGISTQKFHARGPMGPEALTTIKYLISGSGQIRS

SEQ ID NO: 48869 - DNA, 783 bp, Unknown
  Obtained from environmental sample
  misc_feature (1)..(783): n is a, c, g, or t
ttggaagcaaacgctcgcgatgtggaacaggcgagaaagggcagcatgaaagaaagccttgttgaccgcctgcttctcaacgacaaacggatagacggtattatagaaggaatcgaaatcgtcatcaggcaggaagacccgattggtaaagtgcaggcgggctggactttgcccaatggtctgcagattgataaagtaaccgtgcccctcggcgtcgccgccattatttacgaatcgcgtccaaatgttacggcggactgcgccgcccttgcgtacaaagcgggctgttcaatacttttacgaggctcctcttccgcgctggaatccaacaaagcgctggttaaagctatcaaggcggggcttgaaaacggcggcggaattgcggacgctgtcgctctcgcggaatcaggcagtagagacgaagttgacgaaatactcaaagctcgcggttacattgatgtagttcttccgcgcggagggcatgagttaatccgcagagttgtagaaaacgctcgtatccctgtgattgaaacaggagaaggcaactgccacatctacgttgagccaagcgcggatatgaacaacgctgtagaaattatcgccaacgcanaacttcaaaaacccggcgtgtgtaacgctgtggaaacaatacttgtacacaaagacgcgctctcagcgcttatgccgaanatggcggcggcgcttgcaacacaatgcgaactgcgctgtgataacgcgggcaaaaaccgctatcggcgcaatacctgccgcccttgtttttaa

SEQ ID NO: 48870 - protein, 260 aa, Unknown
  Obtained from environmental sample
  misc_feature (1)..(260): Xaa is any amino acid
MEANARDVEQARKGSMKESLVDRLLLNDKRIDGIIEGIEIVIRQEDPIGKVQAGWTLPNGLQIDKVTVPLGVAAIIYESRPNVTADCAALAYKAGCSILLRGSSSALESNKALVKAIKAGLENGGGIADAVALAESGSRDEVDEILKARGYIDVVLPRGGHELIRRVVENARIPVIETGEGNCHIYVEPSADMNNAVEIIANAXLQKPGVCNAVETILVHKDALSALMPXMAAALATQCELRCDNAGKNRYRRNTCRPCF

SEQ ID NO: 48871 - DNA, 747 bp, Unknown
  Obtained from environmental sample
  misc_feature (1)..(747): n is a, c, g, or t
ttgacctttgtcggagaagtgcggcaggaagggggaatcaacaaaagtgaagagcagatgatccgccaggttattgagtttgacgatattaccgcggcggaaattgttaccccccgcgttgacgttgcggcagtttcggacaacgatacgcccgaggagattgatcgtgtattcgccgcgaccggattttcccgcctgccggtttaccatgatagtattgataacataaccggtgtcatactgctgaaagattttcaccacgaagtgataaaaaaaggcaggcaacccggagagattatcaagccggtggtctttgtaaccaagaccatgaaaatatccagcctgctgcggaccttgcagaaaaaacagtcgcacctggcggtactggtggacgaatttggcggcactttgggaatagccaccatagaagacattcttgaggaacttgtcggcgaaatatgggatgaacatgacaaggtggtggaaccgttccggcggaacgccgacggaagtttgaacgtactgggcagtgtcaagtttcaggatatgcttgaatatatgaacgaaaacccgcctgaaaacggggatattcccaataccacggttggcagttgggtattggaaaattcaggcaggctgccccgtaccggagagcgcattgtttggcataatttacagatcaccgtgtcgcgtatgcagcggaaccgcgtgatggaagtaacaatcaacagaaatttggttacttaa

SEQ ID NO: 48872 - protein, 248 aa, Unknown
  Obtained from environmental sample
  DOMAIN (165)...(246): Transporter associated domain
  misc_feature (1)..(248): Xaa is any amino acid
MTFVGEVRQEGGINKSEEQMIRQVIEFDDITAAEIVTPRVDVAAVSDNDTPEEIDRVFAATGFSRLPVYHDSIDNITGVILLKDFHHEVIKKGRQPGEIIKPVVFVTKTMKISSLLRTLQKKQSHLAVLVDEFGGTLGIATIEDILEELVGEIWDEHDKVVEPFRRNADGSLNVLGSVKFQDMLEYMNENPPENGDIPNTTVGSWVLENSGRLPRTGERIVWHNLQITVSRMQRNRVMEVTINRNLVT

SEQ ID NO: 48873 - DNA, 1029 bp, Unknown
  Obtained from environmental sample
  misc_feature (1)..(1029): n is a, c, g, or t
atgccgaacgggttccggacagcgcgggcnggttttgaaaaagccgtttcggtactgaccatccacaatctggggtatcaaggcatttacagcaaaaacaattttgattataccggtctgggctgggacgtattttacaacgcgggctttgaggactggaatatgctcaattttctcaaggccggcctgtacagcgcggacaagctgaacaccgtttcacctaactacgccgaggaaacaaaaattcaggcgcacggtttccggcttgacggagtgctgcgttaccgttccgccgattattcgggcatcctaaacggcattgatacgggggtctggaatccccaaaaagataccctgataccccagtgttattcggttaataacatggaaggaaaagcggcggcaaagaaagcgttacagcggtactttgggcttgccgaggacagcagcgtaccggtaatcggcatggtgacgcggcttaccgagcagaaaggggtaggggatttgttcggtcccagctatgggtccgcatggtcaatttgccacgacatgaagctgcaactggtgttaatcggcaccggcgaggcatggtgtgagcatgaaataaccagcctgtcatcccgcctccccaactttaaggcgtacatcggttacaacgaagagttaagccaccttgtcgaagcgggttcggatttcttcctgatgcccagccgttatgagccatgcggccttaaccagatgtactctctggtttacggcactcttcccattgtacggagaaccggcggtcttgttgacacggtagaaaactacgatgaaaagaagggaaccggcaccggctttatgtttgaccagcttaacccttcctctatttacaacacggtaggctgggcggtctgggcatggtacaacaagcccgaacacatcaaagccatgcgtaccaaagccatgaagcaggacttctcctgggaaaaatccgcgcagaaataccttgatctgtacaaagaaacgcagaaaaaaattaagtaa

SEQ ID NO: 48874 - protein, 342 aa, Unknown
  Obtained from environmental sample
  DOMAIN (136)...(319): Glycosyl transferases group 1
  misc_feature (1)..(342): Xaa is any amino acid
MPNGFRTARAGFEKAVSVLTIHNLGYQGIYSKNNFDYTGLGWDVFYNAGFEDWNMLNFLKAGLYSADKLNTVSPNYAEETKIQAHGFRLDGVLRYRSADYSGILNGIDTGVWNPQKDTLIPQCYSVNNMEGKAAAKKALQRYFGLAEDSSVPVIGMVTRLTEQKGVGDLFGPSYGSAWSICHDMKLQLVLIGTGEAWCEHEITSLSSRLPNFKAYIGYNEELSHLVEAGSDFFLMPSRYEPCGLNQMYSLVYGTLPIVRRTGGLVDTVENYDEKKGTGTGFMFDQLNPSSIYNTVGWAVWAWYNKPEHIKAMRTKAMKQDFSWEKSAQKYLDLYKETQKKIK

SEQ ID NO: 48875 - DNA, 1143 bp, Unknown
  Obtained from environmental sample
  misc_feature (1)..(1143): n is a, c, g, or t
atgttttgcggagtttgcactttgtgcggagttgaagttatggatgccgggcttgccaccactccaacggtggaacttttggttgagcaattcaaagccgatggcggaataatagtgaccgcaagccataacccaattgaatggaatgccttgaaatttttgaacagcaggggaatgtttttgggtccaaacgaggtaaaaaaactctttgcgagagcagatgcttttggaaaaaaagaaagcatatctaatggcgatgatatgcacataaaaacgacaatcgcactgccttatgttgacacgcaaaaaataaaggatagcaaattcaaagttgccgtagatgccgttaatggtgcgggttcttatgtcttgccaaaattattggaatcgcttggttgcgaggttgttaaagttcactgcgagccaaatggaattttcccaaggggtgcagagcctttgcaagagaatttgagccatttgagcaaggtagttcaagataataaatgcgatataggttttgctttagatccagatgcagaccgttgcgccatagttgacgaaatgggaaaacctattggcgaggaatacactttggcaatagcggcagaaacggttttggagcgagatgcgaagcccctttccataaatttgtccacctccagaatgtgcgaagatttggcggagagattcgggacaaagtgctaccgagccgctgtgggtgagataaatgtgagtttggatatgattgagcaccactgcgtaattggcggcgagggcaatgggggagttattctgcccgctttgcactacgggagggactctttggtttctgtagctttggttttggatttgctcgcaaggcacaatataaaggtttctgactgggttaaaagccacccttcttatacaatgctcaaaaagaaatttgaaatgaaaaatcctgtgtctctggctatggaaaaggcagaaaaagcctttgcagattggaaagcagacaagagagatggtttgtggcttggcaaggaaaagagctttgtgcatttgagagcctccaacacagaacctgttatcaggataatcgccgaagcccccactgcaaatgaggcagaaacgctttgcaaaaaaatagaagcattgctatga

SEQ ID NO: 48876 - protein, 380 aa, Unknown
  Obtained from environmental sample
  DOMAIN (1)...(80): Phosphoglucomutase/phosphomannomutase, alpha/beta/alpha domain I
  misc_feature (1)..(380): Xaa is any amino acid
MFCGVCTLCGVEVMDAGLATTPTVELLVEQFKADGGIIVTASHNPIEWNALKFLNSRGMFLGPNEVKKLFARADAFGKKESISNGDDMHIKTTIALPYVDTQKIKDSKFKVAVDAVNGAGSYVLPKLLESLGCEVVKVHCEPNGIFPRGAEPLQENLSHLSKVVQDNKCDIGFALDPDADRCAIVDEMGKPIGEEYTLAIAAETVLERDAKPLSINLSTSRMCEDLAERFGTKCYRAAVGEINVSLDMIEHHCVIGGEGNGGVILPALHYGRDSLVSVALVLDLLARHNIKVSDWVKSHPSYTMLKKKFEMKNPVSLAMEKAEKAFADWKADKRDGLWLGKEKSFVHLRASNTEPVIRIIAEAPTANEAETLCKKIEALL

SEQ ID NO: 48877 - DNA, 645 bp, Unknown
  Obtained from environmental sample
  misc_feature (1)..(645): n is a, c, g, or t
atgtcgtccagcggctacaaggacatcgacgtctctctcaccacgcgcgagctgagtcgtatgataaagtcggcgggcatagacttcaaaaatctgccggaagagggcgccgactccatactcggcgattacaccggcgccgggacgatcttcggcgcgacaggcggcgtcatggaggccgcgttgcgtaccgcttatcatttgataacgaagaaagagctcgaagacgtaaacttcaaaggcgtccgcggtttagagggcgtcaaagaagcgacggtggatgtggacggcacggaggtgagggtagccgtagcccacggcatggtcaacattgccgcggtgctcgacaaaatcaaaaccgcgctcgccgaaggcaaggagaccccgtaccacttcgtagaggtgatggcctgccgaggcggttgcgtaggcggcggaggccagccgtacggcgccgacgacaacgtgcgcaaactccgtgccgacggcctgtacctagacgatgagaagtcaaaattccgctgctcgcacaagaacccgcagatcgccaagctctacgaggaattcttggaaaagccgctgtcccacaagtcgcacgatctgttgcacaccagctacgagccgaggccggagtatcggtggtag

SEQ ID NO: 48878 - protein, 214 aa, Unknown
  Obtained from environmental sample
  DOMAIN (1)...(149): Iron only hydrogenase large subunit, C-terminal domain
  misc_feature (1)..(214): Xaa is any amino acid
MSSSGYKDIDVSLTTRELSRMIKSAGIDFKNLPEEGADSILGDYTGAGTIFGATGGVMEAALRTAYHLITKKELEDVNFKGVRGLEGVKEATVDVDGTEVRVAVAHGMVNIAAVLDKIKTALAEGKETPYHFVEVMACRGGCVGGGGQPYGADDNVRKLRADGLYLDDEKSKFRCSHKNPQIAKLYEEFLEKPLSHKSHDLLHTSYEPRPEYRW

SEQ ID NO: 48879 - DNA, 441 bp, Unknown
  Obtained from environmental sample
  misc_feature (1)..(441): n is a, c, g, or t
ttgctgggggcgtatcacttttttcatttgaattatgacggcgcggagcaggcggaaaattttattaatacggcgggcggtgttattgacttgcctccggtgatagactttgagtttaccggggatccgaaaactttcggcaaaagcgagactgagttaagaaatgagctaagaaagtgcatcaataaattggaagagcactataaacacaaagcgataatttatacgacgcgggacgcgtataaatttataataaaagataacattgaaaatccgttatggtatcgttcaatcatattgccgttaaacaaagatatgccgaacgtgctgttttggcaataccataatagcgcgagggttaatgggatagataagcctgtcgatttgaatgtatttagagggagtatggaagaattaggtaatttgattatgaaggaatga

SEQ ID NO: 48880 - protein, 146 aa, Unknown
  Obtained from environmental sample
  DOMAIN (2)...(123): Glycosyl hydrolases family 25
  misc_feature (1)..(146): Xaa is any amino acid
MLGAYHFFHLNYDGAEQAENFINTAGGVIDLPPVIDFEFTGDPKTFGKSETELRNELRKCINKLEEHYKHKAIIYTTRDAYKFIIKDNIENPLWYRSIILPLNKDMPNVLFWQYHNSARVNGIDKPVDLNVFRGSMEELGNLIMKE

SEQ ID NO: 48881 - DNA, 309 bp, Unknown
  Obtained from environmental sample
  misc_feature (1)..(309): n is a, c, g, or t
atgagtaatatcgcgaaggcgttccaaaacgacaaggggtttatcggttatgttatgggcggggatccaaatacggaaaaatcaaaagatttcgcgctggaaatgatcagggccggggccgttttcgtggaaatgggctttcccttttcagaccccatagcggaaggcccggttatacaggaggggaatatacgcgctctggctaacggatccacagtggaaaaaatgtttacacttgtccgggatctgcgaaaagaaacacaagtcccgctggtgtttttaacatacctcaatcctgtttttcattag

SEQ ID NO: 48882 - protein, 102 aa, Unknown
  Obtained from environmental sample
  DOMAIN (8)...(102): Tryptophan synthase alpha chain
  misc_feature (1)..(102): Xaa is any amino acid
MSNIAKAFQNDKGFIGYVMGGDPNTEKSKDFALEMIRAGAVFVEMGFPFSDPIAEGPVIQEGNIRALANGSTVEKMFTLVRDLRKETQVPLVFLTYLNPVFH

SEQ ID NO: 48883 - DNA, 1179 bp, Unknown
  Obtained from environmental sample
  misc_feature (1)..(1179): n is a, c, g, or t
atgagtagcaaaggacgattcggcgattacgggggacagtacattcccgaaacattgatgaatgagctcatcaatctggaaaaagcctataaccattacagcaaggacaaagaatttaacacagagttaaacgatctgcttaaaaattacgcgggccgtccctcgcatttgtactacgcggaaaagatgacccgcgatctgggcggcgcgaagatataccttaagcgggaggacatgaaccacaccggatcgcacaagatcaacaacgtgctgggacagacccttctggcgaaaaaaacgggcaaaacgaggatcatcgccgagaccggcgcgggacagcacggggttgcggcggcgaccgcggcggctttgctgggcatggagtgcgagatctttatgggcaaggaagacaccatacgccagccccttaacgtgtaccgcatggaattgttaggcgcaaatgtccatccggtgacttccggcacgcaaacgcttaaagacgcggtaaatgaaaccatgagagaatgggtcagccgcgttcatgacacccactatgtgctcggctcggtgatggggccccatccttttccgacaatggtgcgtgattttcagagcgtaatcggcagggaggcgcgggaacaaatacttgccatggaaggcaaactgccggccgtggtgcttgcctgcgtgggcggcggcagtaacgcaataggcattttttataattttctttccgataccaacgtgaaacttataggctgcgaagccgccgggcttggaatcgacacagacaagcacgccgccaccatagccaaaggctccgtgggaatattccacggaatgaagtcctacttctgccagaacgacgaaggccaaattacgccggtttattcaatttcagcggggctggattatccgggcataggccccgaacacgcatggctcaatgactcggggcgcgccgaatacgtgcctgtcaccgatgaggaagcggttcgcgcctttgagtacctttcccgcgccgagggaatcataagcgcgattgaaagcgcccacgccgtagcccatgcgcggaaaatcgcgcgtaaattcggcaaagatgaaagtattattatctgtctttccggccgtggcgacaaggacgttgcggcaatcgcccgtacagggggagggcaataa

SEQ ID NO: 48884 - protein, 392 aa, Unknown
  Obtained from environmental sample
  DOMAIN (48)...(377): Pyridoxal-phosphate dependent enzyme
  misc_feature (1)..(392): Xaa is any amino acid
MSSKGRFGDYGGQYIPETLMNELINLEKAYNHYSKDKEFNTELNDLLKNYAGRPSHLYYAEKMTRDLGGAKIYLKREDMNHTGSHKINNVLGQTLLAKKTGKTRIIAETGAGQHGVAAATAAALLGMECEIFMGKEDTIRQPLNVYRMELLGANVHPVTSGTQTLKDAVNETMREWVSRVHDTHYVLGSVMGPHPFPTMVRDFQSVIGREAREQILAMEGKLPAVVLACVGGGSNAIGIFYNFLSDTNVKLIGCEAAGLGIDTDKHAATIAKGSVGIFHGMKSYFCQNDEGQITPVYSISAGLDYPGIGPEHAWLNDSGRAEYVPVTDEEAVRAFEYLSRAEGIISAIESAHAVAHARKIARKFGKDESIIICLSGRGDKDVAAIARTGGGQ

SEQ ID NO: 48885 - DNA, 321 bp, Unknown
  Obtained from environmental sample
  misc_feature (1)..(321): n is a, c, g, or t
ttgccgccccccaactccccactcccttttttgaatactgactattacctcattgactcaggagccggttcgggcaaagcctttaactgggaactgcttaattcacctgaaatgaacgcgcttaaagcggcaaaaccctggtttcttgccggaggcgtcgatcccggcaatatcgaacaggcgatgggttataatccttacgctattgacatttccagcggggctgaaacagacggtattaaagatcgggaaaaaatagtacaattagtatcaatagtacgtggctgcgcgggtacgcggtatgcaaaggaaaaaatatga

SEQ ID NO: 48886 - protein, 106 aa, Unknown
  Obtained from environmental sample
  misc_feature (1)..(106): Xaa is any amino acid
MPPPNSPLPFLNTDYYLIDSGAGSGKAFNWELLNSPEMNALKAAKPWFLAGGVDPGNIEQAMGYNPYAIDISSGAETDGIKDREKIVQLVSIVRGCAGTRYAKEKI

SEQ ID NO: 48887 - DNA, 696 bp, Unknown
  Obtained from environmental sample
  misc_feature (1)..(696): n is a, c, g, or t
atgaccaccacggacactcgcatggacaccaccattgaaagcagaatagccctgcttcaggcttttgatccgctgtttcccaccggcgcttacacaatgtcgggcggcatggaaacttatacgcaaaaaggactcgttcatgataaatccactcttctctcatacttgaaagctcaactntgcgttttgccctacggcgatctgggcgtctgcgcgaaaacggcgcagggcgaagattatatttttatggacagcctntgcgccgcgatgaaacagccctttgaaatacgaacaggaagcgaaaaactctgcacgcgttttttgaaagtacaggagacattatgtgattatccttctctttccgcgtacaggcaggcgataaggcgggaaaaatgcaggggccattatccggtcgcggtcggtctttttatacgcggcttaaaagcaaacttgagcgacgcgctggaactttattgctacagcctcttgtcgcagacggtaaaccacgccgttaaattaatccctcttgggcaatcagacggccagacggctcttttcgaaattctccgcctgattcccgatgcggcgcaaaaagcaatggcggctgatgttgatgaattgggagtctcaggctgcgggtttgatttgcgcgcgatgcagcacgagacgctttacggaagactgtatattaattaa

SEQ ID NO: 48888 - protein, 231 aa, Unknown
  Obtained from environmental sample
  DOMAIN (45)...(191): UreF
  misc_feature (1)..(231): Xaa is any amino acid
MTTTDTRMDTTIESRIALLQAFDPLFPTGAYTMSGGMETYTQKGLVHDKSTLLSYLKAQLCVLPYGDLGVCAKTAQGEDYIFMDSLCAAMKQPFEIRTGSEKLCTRFLKVQETLCDYPSLSAYRQAIRREKCRGHYPVAVGLFIRGLKANLSDALELYCYSLLSQTVNHAVKLIPLGQSDGQTALFEILRLIPDAAQKAMAADVDELGVSGCGFDLRAMQHETLYGRLYIN

SEQ ID NO: 48889 - DNA, 609 bp, Unknown
  Obtained from environmental sample
  misc_feature (1)..(609): n is a, c, g, or t
atgagttatgtgaaaataggagtcggcggccctgtaggttccggaaaaaccgcgctcattgagcggctgacaagaaagatggcggataaatacagtatctgcgtcgttaccaacgatatttacacgcgcgaggacgctgagtttcttgtaaaaaattccgtcctgccgccggagcgtattgtcggagtggaaacgggcggctgtcctcacacagccatccgtgaggactgctccatgaatctggaagccgttgaggaaatggcgcgcaagtttcccgacgcgcagattatttttgttgaaagcggcggagacaacctttccgcgactttttccccggagcttgcggacgctaccatttatgtaatcgacgtggcgcagggcgacaaaattccccgcaagggcggtcccggcgttacgcgctcagatttacttgtcatcaataaaatcgatcttgcacctatggtgggagcaagccttgatgtaatggcaagagattctgaaaaaggccgcggcggacgcccttatttgtttacaaatttggtctctctggaaggcgtagacgcggtagttaactggattcgcaaaaacgttctgcttgaagaaacataa

SEQ ID NO: 48890 - protein, 202 aa, Unknown
  Obtained from environmental sample
  DOMAIN (4)...(150): GTPase of unknown function
  misc_feature (1)..(202): Xaa is any amino acid
MSYVKIGVGGPVGSGKTALIERLTRKMADKYSICVVTNDIYTREDAEFLVKNSVLPPERIVGVETGGCPHTAIREDCSMNLEAVEEMARKFPDAQIIFVESGGDNLSATFSPELADATIYVIDVAQGDKIPRKGGPGVTRSDLLVINKIDLAPMVGASLDVMARDSEKGRGGRPYLFTNLVSLEGVDAVVNWIRKNVLLEET

SEQ ID NO: 48891 - DNA, 384 bp, Unknown
  Obtained from environmental sample
  misc_feature (1)..(384): n is a, c, g, or t
ttgagcgaattgtccataagtacggtttttaaaaacggaaaaaccgtcatgtccgattgttttttcacctctccgtttaaagtagccaaacctttttaccgcgaaggcggttatactgaaattatggtgatgtgcgcaagtccggggctcttagctggcgacaggtataatatgcgttttgatttatcagataacacaaaaacagctatcagcgagcaatcgtaccggaaactttacaataccgaaggtaatttttcccggcaagacactcaaataaagataggcgaagatgcgtcgctgtactatgttccgtatcctgttatccctttttgccggaagccgttttcattcngncgacgatatttttttgcgcgcttcatctaa

SEQ ID NO: 48892 - protein, 127 aa, Unknown
  Obtained from environmental sample
  misc_feature (1)..(127): Xaa is any amino acid
MSELSISTVFKNGKTVMSDCFFTSPFKVAKPFYREGGYTEIMVMCASPGLLAGDRYNMRFDLSDNTKTAISEQSYRKLYNTEGNFSRQDTQIKIGEDASLYYVPYPVIPFCRKPFSFXRRYFFARFI

SEQ ID NO: 48893 - DNA, 738 bp, Unknown
  Obtained from environmental sample
  misc_feature (1)..(738): n is a, c, g, or t
gtgttcttcttccttttttctcttttctttcttcttttttcttttgtattatgctatgcttcttgcatgagacctgaaagcgcggttgccgccttgttggaaggcgcgcagcggatcatcaaggggaagcgggaattcctggaattacttgtcactgcggcattggccggaggacatgtccttatcgaagataatccggggctgggaaaaaccactgtcgcgaagacgctggcgaaactaattgaggggaaaaaagggcttgtctttaagcgtatacagtttacccccgacctcctgccttatgatattaccggcgtcgatgtcttcgatcccaaaacgctgaagttccgctttgtgcccggccccgtgcttgccaatatcgtgcttgccgatgaaataaaccgcgcgactcccaaggtgcagtccgccctgcttgaggtgatggccgagaggcaggtgacaatcgggcagaccagccaccgcccgcccgagccttttttggttcttgccacgcaaaacccaatcgaaagcgaggggacttttcccctgcccgcggcgcagcttgaccgcttcatgatgaaactttcgatgggatatccggataaggacgcggaactttccatacttgatgaaaaccccgccgaaaaaaggcttgcggaactgaagccggttatcaagctgtcggattttctggcccttaggccgctgtctccggagtgttctgccacaaggcgttga

SEQ ID NO: 48894 - protein, 245 aa, Unknown
  Obtained from environmental sample
  SIGNAL (1)...(20)
  DOMAIN (59)...(200): ATPase family associated with various cellular activities (AAA)
  misc_feature (1)..(245): Xaa is any amino acid
MFFFLFSLFFLLFSFVLCYASCMRPESAVAALLEGAQRIIKGKREFLELLVTAALAGGHVLIEDNPGLGKTTVAKTLAKLIEGKKGLVFKRIQFTPDLLPYDITGVDVFDPKTLKFRFVPGPVLANIVLADEINRATPKVQSALLEVMAERQVTIGQTSHRPPEPFLVLATQNPIESEGTFPLPAAQLDRFMMKLSMGYPDKDAELSILDENPAEKRLAELKPVIKLSDFLALRPLSPECSATRR

SEQ ID NO: 48895 - DNA, 600 bp, Unknown
  Obtained from environmental sample
  misc_feature (1)..(600): n is a, c, g, or t
atgaaatacgtcagtaaagcgttgtttctttttattctctttacaggaatggcgggcatcggccatgcccagcgagttgacagggacgaattgcagaagaatcttgccccggtaacattctataataatgaagggccgcaggcccgcgttgaaacaagggaacagatccgccagattggggcgggtcttgggcagcttataggggcgcgacagacaagagcgggggctaacggccgttacttcgtgattcactctgtcaccgcgcctgacggcgataaactggacgctgatattttcgggcttggccccaatgtcggcgttgaccatatccgcaacctgagaaccattatccagggatatttgcaggaagcgtacagctactccgcggcggacgccgcgttgctcgccgaatacataaccatttacaacgccgtgtaccgcgggaactggaactatttttcaggacgcttcaagaagcccgttgtagacaaccttaacagggatgcagccggcctggctgtccgttatcaggaatggcccggcaaaacccttatgctcatacctttgaatgccggcgggctagctcctcggccgatctga

SEQ ID NO: 48896 - protein, 199 aa, Unknown
  Obtained from environmental sample
  SIGNAL (1)...(23)
  misc_feature (1)..(199): Xaa is any amino acid
MKYVSKALFLFILFTGMAGIGHAQRVDRDELQKNLAPVTFYNNEGPQARVETREQIRQIGAGLGQLIGARQTRAGANGRYFVIHSVTAPDGDKLDADIFGLGPNVGVDHIRNLRTIIQGYLQEAYSYSAADAALLAEYITIYNAVYRGNWNYFSGRFKKPVVDNLNRDAAGLAVRYQEWPGKTLMLIPLNAGGLAPRPI

SEQ ID NO: 48897 - DNA, 525 bp, Unknown
  Obtained from environmental sample
  misc_feature (1)..(525): n is a, c, g, or t
atgggtcagaatttcggcacgagcaacaccggctatttcaccntacaccccaacatcggcggcactttcaaaaacgagaacgaagcccacaaccacaaggatcaccccatcagcttccgcttccaggccctcaagcccatgcgcgacatccgcgacgatatagacgtaataatcgacggcatagccgacaccaagggctacatcatggactttaccgacgttaacacgggcgcggtcaacgaactctttgcccagttgggaatgtttatcataacaggctacaaaatcaagatagagggcgaccatcccgacgtaggcctgtattttcaacaggtaacaggcggcaacacgctaataaaagcgggcaaactggcggaaaacaccgcgtccaagctggtcggaataggccccggcagccccagcggaaccttcaaagtcatcataaagacgcagtataccggttccgccaacaagttttcgaaggagcttcgtatcatagaaagcccttttaccctgaaaaagtga

SEQ ID NO: 48898 - protein, 174 aa, Unknown
  Obtained from environmental sample
  misc_feature (1)..(174): Xaa is any amino acid
MGQNFGTSNTGYFTXHPNIGGTFKNENEAHNHKDHPISFRFQALKPMRDIRDDIDVIIDGIADTKGYIMDFTDVNTGAVNELFAQLGMFIITGYKIKIEGDHPDVGLYFQQVTGGNTLIKAGKLAENTASKLVGIGPGSPSGTFKVIIKTQYTGSANKFSKELRIIESPFTLKK

SEQ ID NO: 48899 - DNA, 1764 bp, Unknown
  Obtained from environmental sample
  misc_feature (1)..(1764): n is a, c, g, or t
gtgcctcaaaccagccaggtcgttcaatcggtgatggaatatatgaacggacccacagcgaacaaagaagcggtaaaccatcccgcccccatgacgctcctgggaaaagaagtcaatgtggtcagactgatggttcccattattaataaacgcaatgaagtagtcggaatcgtaggcgctcagttaaatatagatttgatacagccccggatagaaaccactatggaagacttcgaagaaatttccgcgatgtccgtttactccagcaacgggtttattatggcgagctaccggcccgagcggatagggaaaatgatggtcgacgaggaagtgcaattcggcagctatgtgaacgaagccttcgaggccgttagggccggaaaagaatttatgtgcttcagttacgcgcctacgatgaaaacaaacatacaaatctcccttatccctgtaactctggggcaggcggaaacaacctgggcgataatggccggtacaactgaagattacataatgagggatgtttacacgatgatcacatttgccgttattatcgcggtgatagcggtaatagcgtcggcggcaattttattcattgttctggacagaacaaccaagccaatcattaaggtagccgagatcttaaaaatcgtagccgaaggcgatctgacaaaacaggtaaacgtcaatacgaatgacgaaataggcgggcttgccaaagactttaacaatacgatcagtaaaatcaaagaacttgtgtttctcataaaaaggcaggcgcacatattgaatgatataggcaacgacctttccagcaatatgaccgaaaccgccgcggcaataaaccagattaccgccaacattcagagcgtcaaaagccgtgtaataaaccagagcgccagcgtaacccaaacaaacgcaactatggaacaggttatcgccaacatcaacaaactcaacggccatgttgaaaaccagagccgtaatgtatcgcaggcatcatccgccattgaggaaatggtagcaaacgtcagttctgtcaccaacacgctggtcaacaacgccgccaacgtacaaacattgcaggaagcttccgaagtaggaaagaccggcttgcaggaagttgcggcggacattcaggaaatagcccgcgaatccgaaggcctgttggagatcaacgcggtaatggaaaacatcgccagccagacaaatctgctttcgatgaacgccgcgattgaggcggcgcacgccggagaagccggaaagggttttgccgtagttgccgatgaaatccgcaaacttgcggaaagttccggcgagcagtcaaaaacaatcagcacggtactgaaaaagatagcggaatcaatcaaaaaaataacaggctccaccgaaaatgtactgaacaaattcgaatcgatagactccggcgtaaagacagtatcgatgcaggaagaaaacatccgcaacgcgatggaagagcagggcgaggggagcaagcaagttctgncaagcgcaagcagtttgagcggactaacccagcaggtaaaaagcggatccgaggaaatgctcagcggtagtcaggaagtaatgaaggaaagccagaatctggaaaaggtaacgcaggaaataaccggcggcatgaacgaaatggcaaacggtgcggatcagataaacatagcggtacacaatgtcaatgagatgactcaaaagaaccgtgatgccattgatgttttgataaaggaagtttcacgctttaaggtggagtga

SEQ ID NO: 48900 - protein, 587 aa, Unknown
  Obtained from environmental sample
  DOMAIN (181)...(250): HAMP domain
  misc_feature (1)..(587): Xaa is any amino acid
MPQTSQVVQSVMEYMNGPTANKEAVNHPAPMTLLGKEVNVVRLMVPIINKRNEVVGIVGAQLNIDLIQPRIETTMEDFEEISAMSVYSSNGFIMASYRPERIGKMMVDEEVQFGSYVNEAFEAVRAGKEFMCFSYAPTMKTNIQISLIPVTLGQAETTWAIMAGTTEDYIMRDVYTMITFAVIIAVIAVIASAAILFIVLDRTTKPIIKVAEILKIVAEGDLTKQVNVNTNDEIGGLAKDFNNTISKIKELVFLIKRQAHILNDIGNDLSSNMTETAAAINQITANIQSVKSRVINQSASVTQTNATMEQVIANINKLNGHVENQSRNVSQASSAIEEMVANVSSVTNTLVNNAANVQTLQEASEVGKTGLQEVAADIQEIARESEGLLEINAVMENIASQTNLLSMNAAIEAAHAGEAGKGFAVVADEIRKLAESSGEQSKTISTVLKKIAESIKKITGSTENVLNKFESIDSGVKTVSMQEENIRNAMEEQGEGSKQVLXSASSLSGLTQQVKSGSEEMLSGSQEVMKESQNLEKVTQEITGGMNEMANGADQINIAVHNVNEMTQKNRDAIDVLIKEVSRFKVE

SEQ ID NO: 48901 - DNA, 534 bp, Unknown
  Obtained from environmental sample
  misc_feature (1)..(534): n is a, c, g, or t
gtggaacggagcatggagcttctggaaaaagccgatctcgttctatatgtagttgacggcgttaaaggcttcactgaggaggacagggaatttatagcgaagcacagtgaaacgcgaaaagataatccgcttgtagtcctctggaacaaagcggatttagtaaagccttctgctttttccagtgaaaaaacgcaattttttccggtcagcgcgaaaaccggcgagggtattcctgagctgttgcgcctaatggccgaccttctggagaaaagttcccaatcgtcgttatcatcttcaaccgaagaccaattgcttcaagcggcagggccgggcagtttaaggcagaaagagcttattgactcggccttaagcgacatagaggaagccttgtctctggccgaccagggggaaagccttgaccttatcgccccactcattcgttccgccgttaatgccctgggagaaattacgggcgaagtttcaaacgcggatattttaagggttatgttcagccgtttctgcgttgggaagtaa

SEQ ID NO: 48902 - protein, 177 aa, Unknown
  Obtained from environmental sample
  misc_feature (1)..(177): Xaa is any amino acid
MERSMELLEKADLVLYVVDGVKGFTEEDREFIAKHSETRKDNPLVVLWNKADLVKPSAFSSEKTQFFPVSAKTGEGIPELLRLMADLLEKSSQSSLSSSTEDQLLQAAGPGSLRQKELIDSALSDIEEALSLADQGESLDLIAPLIRSAVNALGEITGEVSNADILRVMFSRFCVGK

SEQ ID NO: 48903 - DNA, 1044 bp, Unknown
  Obtained from environmental sample
  misc_feature (1)..(1044): n is a, c, g, or t
atggatctgcaggactatcgcggacgcatcgacaaggtggacgacgcgatactggagctgtttaaggagaggatggagatctcgcagcaaatcgcgcagtacaaaaaagagcatgggctgcccgctctggacatcgcgcgggagagggagaagctggccggcatggcgaaaaaggcgggcgacgcgctgcgttcctattcgtatatgctttattccatgctgtttgagttaagccgcgcgcgtcagggaagcatattgcatcccgcgtccgagctcagccggatcatcctgaacgcggcggagcataccgagcgggtattcccgcagcacgcgctgattgcctgccagggcgcggagggcgcctacgcgcagatcgcctgcgaccgcctcttctccgaacccaacatattgtatttcacgagcttcgacgcggtattctcggcgatccgcgacggcctgtgccaatacggggtgctgcctctggagaacagcgccgccggctcggtcaacatggtctacgacctcatgatgcgctatagcttcaagatcgcgcggagcgtgcgtctcaagatcgatcataatctgctcgcgaaggagggcgttaaaaagaacgccatccgcgagatcttttcccacgagcaggcgatcaaccagtgcgcgggctacctgaagggcttcggcaaggatgtcaggattaccgccgtcgccaacaccgccgaatccgcgaagatggttgccgaatcggacaggactgatgtcgcggcgctggcttcgcgttcgtgctgcgagctctatgggctcaaatgcgtggagagttcggtgcaggaccgcagcaataactatacgcggtttatctgcatctcgaaggatctggaaatttatcccggagcggatcgaaccagcatcatgctgaccaccgcgcacaagcccggcgcgctctacagggtacttgggcggatatacacccttggcgtgaatatcgtcaaactcgagagccgcccgattccggatcgggatttcgaattcatgtctcggccgatctga

SEQ ID NO: 48904 - protein, 347 aa, Unknown
  Obtained from environmental sample
  DOMAIN (7)...(85): Chorismate mutase type II
  misc_feature (1)..(347): Xaa is any amino acid
MDLQDYRGRIDKVDDAILELFKERMEISQQIAQYKKEHGLPALDIAREREKLAGMAKKAGDALRSYSYMLYSMLFELSRARQGSILHPASELSRIILNAAEHTERVFPQHALIACQGAEGAYAQIACDRLFSEPNILYFTSFDAVFSAIRDGLCQYGVLPLENSAAGSVNMVYDLMMRYSFKIARSVRLKIDHNLLAKEGVKKNAIREIFSHEQAINQCAGYLKGFGKDVRITAVANTAESAKMVAESDRTDVAALASRSCCELYGLKCVESSVQDRSNNYTRFICISKDLEIYPGADRTSIMLTTAHKPGALYRVLGRIYTLGVNIVKLESRPIPDRDFEFMSRPI

SEQ ID NO: 48905 - DNA, 858 bp, Unknown
  Obtained from environmental sample
  misc_feature (1)..(858): n is a, c, g, or t
ttgcggcgcgccgcttgcgatgatcatccgcaacaccgacgtgcgctccgccgattacagcgaggtgcgggatacgccgcgcccgtcgcacgccgattataccgcgcatatcaaatttggcggacatcaggatgtggccgagggcgggcatttctcgggcagactgacccgcccccctgtgcgccgccggtggaatatgtttacaaatattgcgcgatattggcgtattcgttggcgcgcatatcctggcggatcggcgatgccggggatgatccatttaatcctatatatatatcgtctgcggatttcgaagcgatcagggacaatcctctgcccgtactccggcgcgaggcgggcgaagccatgcggcagcagatccaggacgcgcgcgataagggcgactccgtcggcggcgtcattgagtgcgccgcgattgggctgcctgccggattgggcgatccgatcttcgacggcatcgagaaccgcgtcgccgcaatcgtctttgggataccggccgtcaaggggattgaattcgggagcggcttcgcgggcgcggcgcggcgcggctcggaaaataacgacggcttgtatatggacggcggcgctgtacggacgcgcacgaataacagcggcggcatattgggcgggataacaaacggtatgcccgttgtattccgcgcggcaattaaacccacgccctccatcggtctgaagcaggaaagcgtcagcctgtcgggcgcggagaataccatgatacaggtgcaggggcggcacgatccgtgtatcgttccccgcgcggtgccatgcgtggaagcggcggcggcgattgccctctatgacgcctggctggacagataa

SEQ ID NO: 48906 - protein, 285 aa, Unknown
  Obtained from environmental sample
  DOMAIN (12)...(285): Chorismate synthase
  misc_feature (1)..(285): Xaa is any amino acid
MRRAACDDHPQHRRALRRLQRGAGYAAPVARRLYRAYQIWRTSGCGRGRAFLGQTDPPPCAPPVEYVYKYCAILAYSLARISWRIGDAGDDPFNPIYISSADFEAIRDNPLPVLRREAGEAMRQQIQDARDKGDSVGGVIECAAIGLPAGLGDPIFDGIENRVAAIVFGIPAVKGIEFGSGFAGAARRGSENNDGLYMDGGAVRTRTNNSGGILGGITNGMPVVFRAAIKPTPSIGLKQESVSLSGAENTMIQVQGRHDPCIVPRAVPCVEAAAAIALYDAWLDR

SEQ ID NO: 48907 - DNA, 552 bp, Unknown
  Obtained from environmental sample
  misc_feature (1)..(552): n is a, c, g, or t
atggtattctccgcgcccgacaggctgacgctttcctgcttcagaccgatggagggcgtgggtttaattgccgcgcggaatacaacgggcataccgtttgttatcccgcccaatatgccgccgctgttattcgtgcgcgtccgtacagcgccgccgtccatatacaagccgtcgttattttccgagccgcgccgcgccgcgcccgcgaagccgctcccgaattcaatccccttgacggccggtatcccaaagacgattgcggcgacgcggttctcgatgccgtcgaagatcggatcgcccaatccggcaggcagcccaatcgcggcgcactcaatgacgccgccgacggagtcgcccttatcgcgcgcgtcctggatctgctgccgcatggcttcgcccgcctcgcgccggagtacgggcagaggattgtccctgatcgcttcgaaatccgcagacgatatatatataggattaaatggatcatccccggcatcgccgatccgccaggatatgcgcgccaacgaatacgccaatatcgcgcaatatttgtaa

SEQ ID NO: 48908 - protein, 183 aa, Unknown
  Obtained from environmental sample
  misc_feature (1)..(183): Xaa is any amino acid
MVFSAPDRLTLSCFRPMEGVGLIAARNTTGIPFVIPPNMPPLLFVRVRTAPPSIYKPSLFSEPRRAAPAKPLPNSIPLTAGIPKTIAATRFSMPSKIGSPNPAGSPIAAHSMTPPTESPLSRASWICCRMASPASRRSTGRGLSLIASKSADDIYIGLNGSSPASPIRQDMRANEYANIAQYL

SEQ ID NO: 48909 - DNA, 876 bp, Unknown
  Obtained from environmental sample
  misc_feature (1)..(876): n is a, c, g, or t
atgtcttcgctttacggtaaaaagattcgaatagccatttttgggcaatcgcattccgccgcaataggcgtctccattgacggattgcctgccgggatcaagatcgatatagcggagctgcgcgccttcctgcgccgcagggcccccggacagagcgagctcgcgaccgcgcgcgcggagaacgatatgccggagatcctctcggggctcgtcaataatatcacttgcggcgcgccgcttgcgatgatcatccgcaacaccgacgtgcgctccgccgattacagcgaggtgcgggatacgccgcgcccgtcgcacgccgattataccgcgcatatcaaatttggcggacatcaggatgtggccgagggcgggcatttctcgggcagactgacccgcccccctgtgcgccgccggtggaatatgtttacaaatattgcgcgatattggcgtattcgttggcgcgcatatcctggcggatcggcgatgccggggatgatccatttaatcctatatatatatcgtctgcggatttcgaagcgatcagggacaatcctctgcccgtactccggcgcgaggcgggcgaagccatgcggcagcagatccaggacgcgcgcgataagggcgactccgtcggcggcgtcattgagtgcgccgcgattgggctgcctgccggattgggcgatccgatcttcgacggcatcgagaaccgcgtcgccgcaatcgtctttgggataccggccgtcaaggggattgaattcgggagcggcttcgcgggcgcggcgcggcgcggctcggaaaataacgacggcttgtatatggacggcggcgctgtacggacgcgcacgaataacagcggcggcatattgggcgggataa

SEQ ID NO: 48910 - protein, 291 aa, Unknown
  Obtained from environmental sample
  DOMAIN (9)...(280): Chorismate synthase
  misc_feature (1)..(291): Xaa is any amino acid
MSSLYGKKIRIAIFGQSHSAAIGVSIDGLPAGIKIDIAELRAFLRRRAPGQSELATARAENDMPEILSGLVNNITCGAPLAMIIRNTDVRSADYSEVRDTPRPSHADYTAHIKFGGHQDVAEGGHFSGRLTRPPVRRRWNMFTNIARYWRIRWRAYPGGSAMPGMIHLILYIYRLRISKRSGTILCPYSGARRAKPCGSRSRTRAIRATPSAASLSAPRLGCLPDWAIRSSTASRTASPQSSLGYRPSRGLNSGAASRARRGAARKITTACIWTAALYGRARITAAAYWAG

SEQ ID NO: 48911 - DNA, 357 bp, Unknown
  Obtained from environmental sample
  misc_feature (1)..(357): n is a, c, g, or t
gtgccgatactggccgtggtcggcacagccgccgaaggggagaccgttatcagcggcgccgcgcgattgcgcgcgaaggagagcgacagattggccgccattacctccgtgctcggcggtctcggcgcggatatacgcgaaaccggggatggtctccgtattcgcggctccgcccttgcgggcggcgaagcgtcatcctggggcgatcaccggatcgcgatggcctctgcgattgcggcaacgattgcctccgggccggtggtgatccggggcgcggaagcggtcaataaatcctatcccggattttttgacgatctttgtatactgggcggctcggctgagcggcgcatatcataa

SEQ ID NO: 48912 - protein, 118 aa, Unknown
  Obtained from environmental sample
  misc_feature (1)..(118): Xaa is any amino acid
MPILAVVGTAAEGETVISGAARLRAKESDRLAAITSVLGGLGADIRETGDGLRIRGSALAGGEASSWGDHRIAMASAIAATIASGPVVIRGAEAVNKSYPGFFDDLCILGGSAERRIS

SEQ ID NO: 48913 - DNA, 558 bp, Unknown
  Obtained from environmental sample
  misc_feature (1)..(558): n is a, c, g, or t
atgaccgatgaaaacgatctggttactacagatggttatccaggagaactgcgttcgctctgcggcttgtgggtggaagaaacagacgctctgtcaccggatcagttcaacagactgctttttacagaaggccctcttgccggaacatggaaagccgatttgctctgcgatattatccatcccgaaaacgcccaaactatcgctagttacacggatgatttttacgccggaacacctgccgtttgccgcaacagttatggcaaaggctatgtctggtatttcggctcgcgccccgaagtggccctgctagaccgctttaccgctacaatttgtggcgaatgtggggtaaagccggtatttccacgccaggagggaatcgaagccacccgtagaataaagggagagacggaatttgtctttgtattgaatcacaataaatccgatgtggaaattgtgattccgtttgcctgccgagatttgctggcagataaaaacttctctgcggacagccgctatacccttctcgctgccggggtgttagtactctgtaaaagctaa

SEQ ID NO: 48914 - protein, 185 aa, Unknown
  Obtained from environmental sample
  DOMAIN (1)...(117): Beta-galactosidase trimerisation domain
  misc_feature (1)..(185): Xaa is any amino acid
MTDENDLVTTDGYPGELRSLCGLWVEETDALSPDQFNRLLFTEGPLAGTWKADLLCDIIHPENAQTIASYTDDFYAGTPAVCRNSYGKGYVWYFGSRPEVALLDRFTATICGECGVKPVFPRQEGIEATRRIKGETEFVFVLNHNKSDVEIVIPFACRDLLADKNFSADSRYTLLAAGVLVLCKS

SEQ ID NO: 48915 - DNA, 582 bp, Unknown
  Obtained from environmental sample
  misc_feature (1)..(582): n is a, c, g, or t
atggcggaaactttacggggcggtctttctttgggcctttcaggatttggtttttggagccacgacatcggcggttttgaaggaacccccaacgccgccctgttcaaacgctggcttgcctttggactgctttcctctcattcgcggcttcacggcagtacctcataccgcgttccgtggagcgtggacgaagaatccgccgaggtctgccgcttctttgccgaactgaagcttcgccttaaaccgtatattctgcgatccgcccgcgaagcctgcgagcggggcattccggtgttacgcgcaatgtttctcgagttcccgaatgatcctgcctgcgcatatctggattgccagtatatgcttgggccggatctgctggtcgctcctgtattcagcgaagacggaaaggtttcgtattacctgcccgaaggcgaatggacaagcctcctgaccggggaaaaggttaaaggtgctggctggaagacagagcggcatggttttttaagcctgccgcttttagtacgcggcaacggcggacagagggaattgatcattaatccggtagaaacaaaattttattaa

SEQ ID NO: 48916 - protein, 193 aa, Unknown
  Obtained from environmental sample
  DOMAIN (1)...(180): Glycosyl hydrolases family 31
  misc_feature (1)..(193): Xaa is any amino acid
MAETLRGGLSLGLSGFGFWSHDIGGFEGTPNAALFKRWLAFGLLSSHSRLHGSTSYRVPWSVDEESAEVCRFFAELKLRLKPYILRSAREACERGIPVLRAMFLEFPNDPACAYLDCQYMLGPDLLVAPVFSEDGKVSYYLPEGEWTSLLTGEKVKGAGWKTERHGFLSLPLLVRGNGGQRELIINPVETKFY

SEQ ID NO: 48917 - DNA, 561 bp, Unknown
  Obtained from environmental sample
  misc_feature (1)..(561): n is a, c, g, or t
ttgcaaaacccgccggttttgcaagttgctcattccagcggaatgcactcaccgacaaaaaatgccgaccgattttcggcatgggccgtgcataggaatggcagcgaaaagttcgctgggctatttttgcacaggttccttatgttcgatctgctttcaaaaaacgacctagtcaacacgatggacaagaccatgctggtgtcttcacgccgcacgggactcgtggcatccaacctctccaacatcgacaccccaggctacagaaccagggactttcccttccatgaagtcctgaaggaagtgcttgataacaaaagtgggcactctttgcctatggcgcatacccaccccatgcacatgctgggcggaccgaccacgccgctgccctacgcactcaacagggcgatctcgatgtacgagcgcaacgatggcaacgacgtgaacctggacaaagagggcatgaagttgatgcagatgcaggccacttacacccaagcgagccagttcacccagtcggccctcaagagggtttacggtgcgatccgcgaaggagctaaataa

SEQ ID NO: 48918 - protein, 186 aa, Unknown
  Obtained from environmental sample
  misc_feature (1)..(186): Xaa is any amino acid
MQNPPVLQVAHSSGMHSPTKNADRFSAWAVHRNGSEKFAGLFLHRFLMFDLLSKNDLVNTMDKTMLVSSRRTGLVASNLSNIDTPGYRTRDFPFHEVLKEVLDNKSGHSLPMAHTHPMHMLGGPTTPLPYALNRAISMYERNDGNDVNLDKEGMKLMQMQATYTQASQFTQSALKRVYGAIREGAK

SEQ ID NO: 48919 - DNA, 381 bp, Unknown
  Obtained from environmental sample
  misc_feature (1)..(381): n is a, c, g, or t
gtgtgctacaattgcttggagaaaagttgtcggaggagccgcatcatgaagatgtccacgaaaactgaaaacgatgtcacgattctttgcccagaggggaagataaccctcggcgacggggatcaggaacttggggaggcggtcaggagcgtgctggacggtggctcgcgaaaggtggtcatcgatttctccaaagtgagctacctggactcgtccggcgtgggggaactggttggctgctacacgtcgatcaaaaacaagagcggcgccctgagggtctgcgggatgaaccccaaaattttcggtctgatgaagatgaccagcctgcactccgtgttcgatgtcttcgacacactccaggaggccctcgctggcttttga

SEQ ID NO: 48920 - protein, 126 aa, Unknown
  Obtained from environmental sample
  DOMAIN (17)...(122): STAS domain
  misc_feature (1)..(126): Xaa is any amino acid
MCYNCLEKSCRRSRIMKMSTKTENDVTILCPEGKITLGDGDQELGEAVRSVLDGGSRKVVIDFSKVSYLDSSGVGELVGCYTSIKNKSGALRVCGMNPKIFGLMKMTSLHSVFDVFDTLQEALAGF

SEQ ID NO: 48921 - DNA, 999 bp, Unknown
  Obtained from environmental sample
  misc_feature (1)..(999): n is a, c, g, or t
gtgcttgctgtaaaggcaaattacaggggacggatcagcgggattgtgcatgaagtgtcttccagcgggcagacggtttttatagagcctcttgacgtagtggaaaaaaacaacgatatcctgatggaaaaaagaaaccttgacgcggaagcgcaaaaaatcctgcgggagctaactgaaaaaatcaacgcccacgccgaaaatctaaagacattgcacacaacaattatagaactggaatgtttaaggtcaagggcaaaatactcgcttgcaacaaaggggcatttcgccaaagacgcaaaaggcggtcatgaagcgcttattcttaaaaaagcgcgccatccgttgttaaaaaaagcggttcccatcaatatagaaatgaaaaatactacccgaactcttatcattacaggccctaacacgggcggaaaaaccgtagccttaaaaacattaggccttcttgccatgatgaaccagagcgcgcttgccctgccccttgatgaaggaagcgtccttcccatgtttgacggaatatacgccgacataggcgacgagcagtccatcgaccagtctctttcaactttttccgcgcacatcacaaaaatttccgctattaccgccttcgcaacggaaaattctctggttcttcttgacgaactcggctccggcacggatccggaagaaggcggcgcaatcgcgatggcggtactggattatctgatagaaaaaaattcacgtatgatagttacaactcatcacgggatattaaaaaattacggctacacaaggcagagcgtggaaaacgcttcggttgaatttgacgcgcagactctttcgcccacctacaaaataatcaacgggcttcccggagaaagcagggcgatagacattgccgcatccaacggccttgacggcgcaattgtaaacagcgcgagaaaatacattgatgaaaaaaaatcagacgtctcaggattgataaaaggcctttcggccatctga

SEQ ID NO: 48922 - protein, 332 aa, Unknown
  Obtained from environmental sample
  DOMAIN (91)...(321): MutS domain V
  misc_feature (1)..(332): Xaa is any amino acid
MLAVKANYRGRISGIVHEVSSSGQTVFIEPLDVVEKNNDILMEKRNLDAEAQKILRELTEKINAHAENLKTLHTTIIELECLRSRAKYSLATKGHFAKDAKGGHEALILKKARHPLLKKAVPINIEMKNTTRTLIITGPNTGGKTVALKTLGLLAMMNQSALALPLDEGSVLPMFDGIYADIGDEQSIDQSLSTFSAHITKISAITAFATENSLVLLDELGSGTDPEEGGAIAMAVLDYLIEKNSRMIVTTHHGILKNYGYTRQSVENASVEFDAQTLSPTYKIINGLPGESRAIDIAASNGLDGAIVNSARKYIDEKKSDVSGLIKGLSAI

SEQ ID NO: 48923 - DNA, 699 bp, Unknown
  Obtained from environmental sample
  misc_feature (1)..(699): n is a, c, g, or t
atggccccggacgatacggctgacggtgttgacgcttttgtcttttggacgcgggagccgaagaacattcttgccaaaacggaagaattggaaaaacgcgggtttcgcttctatgtaatggttactattacaggatatcccgccgaacttgagccaaatatgcctgttttatcgaaggttttagttaatatgaaaaaactgtcgcaaaaaatcgggctggatagggtaatttggcgttacgatcctgtcatcttaacaagcgtaacagatgaggattttcattgcaaaaattttgattttttggcgcgggaactttcgggtgctgtccggcgggttattatcagtatttacgatgaatatccggcggcaaaaaagcgccttgaattaaaagaaaagctgggctttctgcgtatgcttgaaattaatgacagccttccccggctgctcggcagttttgcgaaaagcgtgcagaacgcagggatggaaattcaaagctgcgcggaaaaagaagatttttcttcttttggtattaaaggcggcgcttgtatagacgcggcgttaatcaataaattgtggggaattgaaaccggcggaaaagataaaaaccagcggcctgattgcctgtgctgtaagagcgttgatatcggcgcttacggaacttgcgccgcgcattgtgtctattgttactctatacgatga

SEQ ID NO: 48924 - protein, 232 aa, Unknown
  Obtained from environmental sample
  misc_feature (1)..(232): Xaa is any amino acid
MAPDDTADGVDAFVFWTREPKNILAKTEELEKRGFRFYVMVTITGYPAELEPNMPVLSKVLVNMKKLSQKIGLDRVIWRYDPVILTSVTDEDFHCKNFDFLARELSGAVRRVIISIYDEYPAAKKRLELKEKLGFLRMLEINDSLPRLLGSFAKSVQNAGMEIQSCAEKEDFSSFGIKGGACIDAALINKLWGIETGGKDKNQRPDCLCCKSVDIGAYGTCAAHCVYCYSIR

SEQ ID NO: 48925 - DNA, 315 bp, Unknown
  Obtained from environmental sample
  misc_feature (1)..(315): n is a, c, g, or t
ttggaattctcccacacgtttacatccgcgaaccacccgcagagcaacggcaagctggagaggttccaccgcaccttgaaaaccgaacacgtaaggagggcatcgtatttagaatatcaggacgcctgcataagtctggcgaaatggatcgcgtattacaacagcgagaggcttcatagtgcgatctggtatctaacgccgaatgacgttttctacggcaggacggcggtacggcttgcagaacgcaaagaaaagttgcatactgcatatatcaagagacaggaatactggcgaaccaaaaacgccggttcctga

SEQ ID NO: 48926 - protein, 104 aa, Unknown
  Obtained from environmental sample
  misc_feature (1)..(104): Xaa is any amino acid
MEFSHTFTSANHPQSNGKLERFHRTLKTEHVRRASYLEYQDACISLAKWIAYYNSERLHSAIWYLTPNDVFYGRTAVRLAERKEKLHTAYIKRQEYWRTKNAGS

SEQ ID NO: 48927 - DNA, 720 bp, Unknown
  Obtained from environmental sample
  misc_feature (1)..(720): n is a, c, g, or t
atgagccttgaagtacggcagacagccgagcgggaaatacaacgttaccatgccaaaactgggctgcccataaccacccttctgaaatatgcggggatctcgcacaggacatggcgcgaatgggcgcagcggcgcggggccgaaacgaagcacaacaacaacatccccaagtcataccacctgaccccggaagaagtgaaggcgattatcgcttattgtataaataacgctctgaaaggctaccggatgcagtgttgggagatggtggaccggaatgttgcgtttgtgtcatgcagcagcgtttataacgtcataaaacgccataatttggacaaaaagtgggtggaactgaccgaggaagcgaagaaaggttttaaacaaccaacagcggttcacgagcaatggcatatagatttttcgtacatcaaaatacaaaactcgttttattattttatcggaatccttgacggctacagtcggaaattgcttaactggaggctctgtaaaaacatggagggcatcaacgctgaaatactggttgccgaaaccaatgagatgtaccctgaagcggtcagcccgcggctgataagcgataacggcagccagttcatatcaaaaaatttgaagagcttcttgcgcttttggaattctcccacacgtttacatccgcgaaccacccgcagagcaacggcaagctggagaggttccaccgcaccttga

SEQ ID NO: 48928 - protein, 239 aa, Unknown
  Obtained from environmental sample
  misc_feature (1)..(239): Xaa is any amino acid
MSLEVRQTAEREIQRYHAKTGLPITTLLKYAGISHRTWREWAQRRGAETKHNNNIPKSYHLTPEEVKAIIAYCINNALKGYRMQCWEMVDRNVAFVSCSSVYNVIKRHNLDKKWVELTEEAKKGFKQPTAVHEQWHIDFSYIKIQNSFYYFIGILDGYSRKLLNWRLCKNMEGINAEILVAETNEMYPEAVSPRLISDNGSQFISKNLKSFLRFWNSPTRLHPRTTRRATASWRGSTAP

SEQ ID NO: 48929 - DNA, 1245 bp, Unknown
  Obtained from environmental sample
  misc_feature (1)..(1245): n is a, c, g, or t
atgacagttaaaaaatgcgttcttgcctattccggagggttagatacctctgtgataatcccttggctaagagaaaactacaactgcgaggtggtagcctttgccgcagacctcggtcagggcgattgcaacgctgctgcattaaagaaaaaagccattgcaagcggtgcttccaaatgctatgttatggatttgcgcaaagagtttttggaagactacgtttggcccacaatgcaggctggcgcaaaatatgagggcacatatcttttgggaacctcatttgcaagacccttgatcgcaaaatatcaggtgcttgttgcgcaaagagaatatgcagacgcagttgcgcacggagcaacaggcaaaggcaatgaccaagttcgctttgagcttacttatgcagctatggaccctcgcttaaaagtgattgccccgtggaaagacccaaaatggaatattcacagcagggaagaagccattgactatgcgcaaaaaaggcacattcctcttgggggaatttcaaaaaagaaaatatactcagaagacggcaatatttggcatttatcacacgaaggcggaattttggaatacccagaaaaagaacacaaatacgatatgctaaaactctccaatacttttgagaaagcaccaaacaagccggaatatgttaaattgatttttgagaatggaattccagttgcgctgaacaacagaagaatggatgcagttaatctgcttacccagctcaataaaataggcggcaaacatgcctgcggtttgctagacattgttgaaaacaggctggttggtttaaagagtagaggagtttacgaaactccgggtggcacaattttatacaaagcacatgagctattagaatccctagttttagacaaagcaactcttgcagaaaaacaaaaacttgcgcaaacttactcgtttttagtttacaacggcgaatggttctcaccgcttcgtcaagcactggatgcctttgttaaagaaactcaaaaaacagtttcgggcgttgtaactttaaagctctacaaaggaaacataattccagcaggagtagaaagcccctttagcctttacgacccagacttgggcggttttagcgatgttgatttttacgaccaaaaagatgccacaggctttattcgctgctttgggcttccgcttaaaatgaggggaatgttgcttggcaaaaaaagcccggttaaatttgggaaaacattgttgtaa

SEQ ID NO: 48930 - protein, 414 aa, Unknown
  Obtained from environmental sample
  DOMAIN (7)...(400): Arginosuccinate synthase
  misc_feature (1)..(414): Xaa is any amino acid
MTVKKCVLAYSGGLDTSVIIPWLRENYNCEVVAFAADLGQGDCNAAALKKKAIASGASKCYVMDLRKEFLEDYVWPTMQAGAKYEGTYLLGTSFARPLIAKYQVLVAQREYADAVAHGATGKGNDQVRFELTYAAMDPRLKVIAPWKDPKWNIHSREEAIDYAQKRHIPLGGISKKKIYSEDGNIWHLSHEGGILEYPEKEHKYDMLKLSNTFEKAPNKPEYVKLIFENGIPVALNNRRMDAVNLLTQLNKIGGKHACGLLDIVENRLVGLKSRGVYETPGGTILYKAHELLESLVLDKATLAEKQKLAQTYSFLVYNGEWFSPLRQALDAFVKETQKTVSGVVTLKLYKGNIIPAGVESPFSLYDPDLGGFSDVDFYDQKDATGFIRCFGLPLKMRGMLLGKKSPVKFGKTLL

SEQ ID NO: 48931 - DNA, 672 bp, Unknown
  Obtained from environmental sample
  misc_feature (1)..(672): n is a, c, g, or t
gtgccaaaaatgttccgtcagcctgaagaactaaggcgtattctatcaaccgttgttaaataccacgctcttgatgtaagcataaacgcgccgataaaattgccccagcagatgcggccggcgacaggaccgggtataaacggcgaagctctggttccctggctttattatctcagagaaacaaacaaagaaaaatttgaaattattacggattcgctaagatctgcttttcctgatttttatgagcttaggttcccgccggtcgccgccggcatgctcgcgatgacatggaaagataaaaatttcacgaggccgttattccttcatgaactgtcggaaggaagccttcgctttctttggcttgtttcattattgcaaagctcttccctttcagcggttactttgatagacgaacctgatgtcagcctgcatcccgaattaatgcgcatccttgtagaactgatgagggaagcgtcagaaaaaacgcaattagttattgccacacattcggacagtttcgtgcgttttttagaaccacatgagctaaagatatttgatcttgacgagaacggctgtaccaatattattggcgccgacgcccttgatttggagaaatggctttcggaatacaggcttgacgccctgtgggccatgggatgccttaaagcgtga

SEQ ID NO: 48932 - protein, 223 aa, Unknown
  Obtained from environmental sample
  misc_feature (1)..(223): Xaa is any amino acid
MPKMFRQPEELRRILSTVVKYHALDVSINAPIKLPQQMRPATGPGINGEALVPWLYYLRETNKEKFEIITDSLRSAFPDFYELRFPPVAAGMLAMTWKDKNFTRPLFLHELSEGSLRFLWLVSLLQSSSLSAVTLIDEPDVSLHPELMRILVELMREASEKTQLVIATHSDSFVRFLEPHELKIFDLDENGCTNIIGADALDLEKWLSEYRLDALWAMGCLKA

SEQ ID NO: 48933 - DNA, 744 bp, Unknown
  Obtained from environmental sample
  misc_feature (1)..(744): n is a, c, g, or t
atgctgacaatccccacaaaacgcccggttcgcttttttaacaccaccggtccctgtttcccctgggatcactatatgctgccaccggcggatcgccttatcgacgctcagcttgacaggtatatacgggataaactctactgggtgctccatgccccccggcagacgggaaagaccacctttttgcaaaattgggcgcgggagataaactccggtgatgaagcggtcgcctgctatgtgaccatagaaacctgccaaagattaccggaacctgaacgttgtatgccggcattatgcggcgcaattatgcaatccgccgatctttcaaatttacctgttcctgacaagaaaactgatataccaaataatatgttaagtaatattcttgccgattgggctaaaaagacggctccgaaaccgttaataatattatttgatgaagcggatgccttggaaggtgacgctatgatcagcttcttgcgtcaattgcgcggcggcttcatggatcgcggtgttggaaaatttccggtatccatcgcgcttgttggcatgagagaccttaaagactatataacagccgccaaagacggagttcaaccaagcccgttgtccccctttaatattaaaaccgattcaattttactgggaaattttgtacaggatgatgtaaaaaaattgtttgcccagcgcaccgaggaaacaggacaacaaattaccggtgaagcttggaaatcctcgcgataa

SEQ ID NO: 48934 - protein, 247 aa, Unknown
  Obtained from environmental sample
  misc_feature (1)..(247): Xaa is any amino acid
MLTIPTKRPVRFFNTTGPCFPWDHYMLPPADRLIDAQLDRYIRDKLYWVLHAPRQTGKTTFLQNWAREINSGDEAVACYVTIETCQRLPEPERCMPALCGAIMQSADLSNLPVPDKKTDIPNNMLSNILADWAKKTAPKPLIILFDEADALEGDAMISFLRQLRGGFMDRGVGKFPVSIALVGMRDLKDYITAAKDGVQPSPLSPFNIKTDSILLGNFVQDDVKKLFAQRTEETGQQITGEAWKSSR

SEQ ID NO: 48935 - DNA, 345 bp, Unknown
  Obtained from environmental sample
  misc_feature (1)..(345): n is a, c, g, or t
atggatatccaaaataaacgagtgcagattatggataaaacagatgctttagcgattagccgtggctatcttctccggttaaaggatataaatttagatttttcggatgcatggctttttggctcttatgcaaaagggaaccaaagtgaggatagcgatattgatattgctatttttttaaatgataatgcgcctgtttcatttgaaacagaagtaaaactaatgacatgccgaaaaggcaaagaaactttgattgaaccgcatgttttcttaaaaagcgactttgataaatctgaaccattaattgaacaaatcataaaatttggagaaccgatatatttataa

SEQ ID NO: 48936 - protein, 114 aa, Unknown
  Obtained from environmental sample
  DOMAIN (16)...(113): Nucleotidyltransferase domain
  misc_feature (1)..(114): Xaa is any amino acid
MDIQNKRVQIMDKTDALAISRGYLLRLKDINLDFSDAWLFGSYAKGNQSEDSDIDIAIFLNDNAPVSFETEVKLMTCRKGKETLIEPHVFLKSDFDKSEPLIEQIIKFGEPIYL

SEQ ID NO: 48937 - DNA, 417 bp, Unknown
  Obtained from environmental sample
  misc_feature (1)..(417): n is a, c, g, or t
gtgtgccgcctggggagtatgcccgcaagggtgaaactcaaaggaattgacgggggcccgcacaagcggtggagcatgtggtttaattcgatgatacgcgaggaaccttacctgggtttgacatgcaggggaaaggcgccgagatgcgcccgccgggcaaccggcccctgtgcaggtgctgcatggctgtcgtcagctcgtgccgtgaggtgttgggttaagtcccgcaacgagcgcaacccctactgccagttaccagcaagtcaagttggggactctggcggaactgccggtgacaaaccggaggaaggtggggatgacgtcaagtcatcatggcccttatgtccagggctacacacgtgctacaatggacggtacaaagcggagcgaagccgcgaggcgcaagcgaatcgctaa

SEQ ID NO: 48938 - protein, 138 aa, Unknown
  Obtained from environmental sample
  misc_feature (1)..(138): Xaa is any amino acid
MCRLGSMPARVKLKGIDGGPHKRWSMWFNSMIREEPYLGLTCRGKAPRCARRATGPCAGAAWLSSARAVRCWVKSRNERNPYCQLPASQVGDSGGTAGDKPEEGGDDVKSSWPLCPGLHTCYNGRYKAERSREAQANR

SEQ ID NO: 48939 - DNA, 1272 bp, Unknown
  Obtained from environmental sample
  misc_feature (1)..(1272): n is a, c, g, or t
atgttggtgtgcgtgcccgagaaggattatgtaatttcgagtacccgcgccaacattgacgcgggcgcttcgataaaaagccttccctgggatataaacgccgattcgtttgaccttgacggcgttaactatcttggtttcggacgttccatggataacggctggctcttgtccgtgctaattcccaagcccgagatttttaacgaggcggaggaacagaataaccgtttctcgctgattatagcgcttgccatggcggcgatgacgggtctggcgtattaccttatatcaaaatttgtcaacgcgccgataaagaagctgacatcggatgtctcccggctttcgctcggccatcttgatatgcatattgaaataaactcgaatgatgagttgggcttgctggcgcagacctttaataaaatgacttccgatctgaaaaaatctatcgaagaaaatgcccgcgaacgcgcggaaaaagaacggatcagcgccgagcttgacgtggcggcggcgatacaggccagtatgcttcccaatattttcccgcccttccccgaaagaaccgaatttgacctgtacgcctccatgcttccggcaaaagaggttggcggagatttctatgatttttatttaattgataaagataatctggcggtggttatcgccgacgtttccggcaagggcattccggccgcgttattcatgatgattacgaaaaccatgatcaaagacagcagtccgagtaaaaacctcaaagatatttttgaaaccgtgaacagaaaattatgcgaaggtaatgaagcggacatgttcgtcaccgtgttcatgggcatatacaatatcccgggcggaaagtttgtgtttctcaacgcagggcataatccgccgctgttaaaaaaacgagggggcgcttatgaatttctggaaacggaacccggttacgtcctggcatggatgaagagcgcaaaatacaaagaaacggaaatcatccttgaacccggcgacgttctgtatttatatacggacggcgtgacggaagcgatgaaccagcggaaggagctcttcggcgaacaacggctgctttctgtgctgaacgccaacaaaggctgtccgcctaaagaattgttatccgccgtcaagcgggaaattgataattttgaggacggggccgaacaggccgacgatattaccatgctcgccctgaaggtaaacggcgcgttacagagcaacggcgcattgcanagcaatgcggtgaaaaagctggaaaattaa

SEQ ID NO: 48940 - protein, 423 aa, Unknown
  Obtained from environmental sample
  DOMAIN (78)...(147): HAMP domain
  misc_feature (1)..(423): Xaa is any amino acid
MLVCVPEKDYVISSTRANIDAGASIKSLPWDINADSFDLDGVNYLGFGRSMDNGWLLSVLIPKPEIFNEAEEQNNRFSLIIALAMAAMTGLAYYLISKFVNAPIKKLTSDVSRLSLGHLDMHIEINSNDELGLLAQTFNKMTSDLKKSIEENARERAEKERISAELDVAAAIQASMLPNIFPPFPERTEFDLYASMLPAKEVGGDFYDFYLIDKDNLAVVIADVSGKGIPAALFMMITKTMIKDSSPSKNLKDIFETVNRKLCEGNEADMFVTVFMGIYNIPGGKFVFLNAGHNPPLLKKRGGAYEFLETEPGYVLAWMKSAKYKETEIILEPGDVLYLYTDGVTEAMNQRKELFGEQRLLSVLNANKGCPPKELLSAVKREIDNFEDGAEQADDITMLALKVNGALQSNGALXSNAVKKLEN

SEQ ID NO: 48941 - DNA, 822 bp, Unknown
  Obtained from environmental sample
  misc_feature (1)..(822): n is a, c, g, or t
atgcaaaattccgattccctgttatcccggataaacagcccggtggatttaaaagtccttaaacccggggatcttgacaggcttgcccttgagattagggatatcattgtagacagagtttcccggaacggagggcacctttcctccaatctgggcaccgttgaattaagtatagctcttcaccgcgttttcaattcgcccgaagaccaaattgtatgggatgtgggacaccagagctacgcccataaactcttaaccggacgttacgcggccttttccggcctgcgaaaacgacaagggctttccggttttcccaaacgggaagaaagcccccatgatgcctttaataccggccattcctcaacatccatttcagccgccgagggaatccttgtcgcaaaacggctaaaaggtgagaaaggcagggctattgccgttatcggcgacggggctcttacaggcgggcttgcctacgaggccctttcccacgccgggcatctggagcttcccctcatcgtggtactcaacgacaacaatatgtcaataagccccaatgtgggagccttgtccaaatacctcagccgcctgtccatgacatcgaaataccagagtttccgccgccattttgacgccatggcaaaaaaattgccctttataggggacattttttacaatgtggtagtgcgcttaaaacgggcggtaaaggctgtcttttacattgacaatttttttgtcgatctgggctttgagtatgtggggccccataaacgggcacaatatccgcctgctggaaatggtgttcagggacgtaaggcagcttga

SEQ ID NO: 48942 - protein, 273 aa, Unknown
  Obtained from environmental sample
  misc_feature (1)..(273): Xaa is any amino acid
MQNSDSLLSRINSPVDLKVLKPGDLDRLALEIRDIIVDRVSRNGGHLSSNLGTVELSIALHRVFNSPEDQIVWDVGHQSYAHKLLTGRYAAFSGLRKRQGLSGFPKREESPHDAFNTGHSSTSISAAEGILVAKRLKGEKGRAIAVIGDGALTGGLAYEALSHAGHLELPLIVVLNDNNMSISPNVGALSKYLSRLSMTSKYQSFRRHFDAMAKKLPFIGDIFYNVVVRLKRAVKAVFYIDNFFVDLGFEYVGPHKRAQYPPAGNGVQGRKAA

SEQ ID NO: 48943 - DNA, 765 bp, Unknown
  Obtained from environmental sample
  misc_feature (1)..(765): n is a, c, g, or t
ttgatggccgaggatgagcgtgttgataccgaaacggcgattgggctttgctgctgcgcggtacatgggttttattacgctgacggaaggatactgccggaaaaccttttgggcgacgccgccggtattaatcctcagcctttttacaattaccaaaaagaattaccggtgtggaagaaaccaagcgccgaagaagccgccagatacaaagaaacggcaaacaatatagcgcgaaaccccttacggcgttcccctcatttttttgacgctctttggcggatgaacaaccgtgatgaagcgtatcaaagggtaaagacgattcgtttcctcggaaagtccgtaaatattcattatttaattatggaaaatctggctcttgtagaggaacaaatacgcgccgccgcaaaaacagacccgcaggttcaagcatggataaacggcattagcacgctggaaggatggacatggcggaatatcgcccaaacccaatcaagatcgtttcacgcctacgggctggccgtcgatattcttccaaagtcgcttggcggcaaagaaacttactggctttgggcggcgagaaaaaaacccgaatggtggaacatatcatataacgagcgataccatccgccgactgctgtaataaaagcttttgaaacttacggatttgtatggggcggcaaatgggttttctttgacacaatgcattttgaataccgccctgaaattcttatattaggcggtatgccgcccgaaacacgccgttaa

SEQ ID NO: 48944 - protein, 254 aa, Unknown
  Obtained from environmental sample
  misc_feature (1)..(254): Xaa is any amino acid
MMAEDERVDTETAIGLCCCAVHGFYYADGRILPENLLGDAAGINPQPFYNYQKELPVWKKPSAEEAARYKETANNIARNPLRRSPHFFDALWRMNNRDEAYQRVKTIRFLGKSVNIHYLIMENLALVEEQIRAAAKTDPQVQAWINGISTLEGWTWRNIAQTQSRSFHAYGLAVDILPKSLGGKETYWLWAARKKPEWWNISYNERYHPPTAVIKAFETYGFVWGGKWVFFDTMHFEYRPEILILGGMPPETRR

SEQ ID NO: 48945 - DNA, 1194 bp, Unknown
  Obtained from environmental sample
  misc_feature (1)..(1194): n is a, c, g, or t
ttggaaaaccgctacgatttttccgctttagacacccttgtcctgaactggaaactctgtaccgaaaagatcggcggcgacattggtgaaaaaattctctctcaggggagcatggctgttccggctctgaaaccaggcgaaaagcaagagattgaaataacaggcgtggctttggacagtattctggaagaatatccaggtgctgtttatctacatgcggactttgttttgaaagaagccaccccctgcgccaaggcgggccacatagttgcccaaaccgagcgcattttacgcgaagccctaccggtttcgcttcacggcgaattgtgcggcttaagcaacgcggattctacccgggctcttgaaactttcgctaaaagttttggcccctccctgttccgcgttcctgtccaaaacgatggcctaaaaacctatatccatttgcgtggggagcctgccgccgctttttactataataaaaaggcaatgtatccctggcttgaccttgatttactgcatctgcgtttgcttgaggaaaaaactgaaaatataacgtttgaaggccgcccggccagccgctataccgtccttcttgtagcgggtaaggacgcggtagacgcttcccgcaaattgggccgctacacctgcgtcattattcctggcagtccccttgttatggacatctgctttgaccttgatccaacgctaccggaactgcccaaggttggcatcagtgcgaaagtaccggcttattacgattcaatttcctggtttggagcgggaaacgaggaatcctatcccgaccgtttggcggcggcctttttaggcgaataccacggaagctcggcggaactggaagtgccttacatcgtgccccaggacaacggcaaccggagtggcctccgccgcttgaccctttcgggcgacgtggttccgcagggaaagccgcgttcgttgagcatccgccccgacggaccgcttaacttcagcgtcagccgctatacacaggaaaacctctttaaagccctgcacaccattgacctggttgatgtcagcgagggcgagaatggctattacttcctcaacatcgacatagcacagcgcggggtgggaaccgcaacatgcggccccgatacccgaccggagtaccgcgtctggggcgggctgtacagggcaaagctgtatatcagttag

SEQ ID NO: 48946 - protein, 397 aa, Unknown
  Obtained from environmental sample
  DOMAIN (102)...(397): Beta galactosidase small chain
  misc_feature (1)..(397): Xaa is any amino acid
MENRYDFSALDTLVLNWKLCTEKIGGDIGEKILSQGSMAVPALKPGEKQEIEITGVALDSILEEYPGAVYLHADFVLKEATPCAKAGHIVAQTERILREALPVSLHGELCGLSNADSTRALETFAKSFGPSLFRVPVQNDGLKTYIHLRGEPAAAFYYNKKAMYPWLDLDLLHLRLLEEKTENITFEGRPASRYTVLLVAGKDAVDASRKLGRYTCVIIPGSPLVMDICFDLDPTLPELPKVGISAKVPAYYDSISWFGAGNEESYPDRLAAAFLGEYHGSSAELEVPYIVPQDNGNRSGLRRLTLSGDVVPQGKPRSLSIRPDGPLNFSVSRYTQENLFKALHTIDLVDVSEGENGYYFLNIDIAQRGVGTATCGPDTRPEYRVWGGLYRAKLYIS

SEQ ID NO: 48947 - DNA, 993 bp, Unknown
  Obtained from environmental sample
  misc_feature (1)..(993): n is a, c, g, or t
atggtatacattcaacaacacgcaggcaaggccgccgaggtaagtttggaactcgtctccaaggcgcgagagctcgcggacaagctgggggcggaggttagcgccgcgcttttcggcgacaaggtgtcgggggaagctgctcgccttgccggctacggggccgaccgcgtgtatgttatggaagacccccgcctcaaattttacacgcccattccctacagcaagctgatgatacaggtggtctccgagatgaagccgcagatcgtattgtacggcgcaaccaccgagggtagagaccttgcgccgcgtgtcgcctcacatctgaaagtgggattgacagcggactgtaccgacctgcagatcggggatcataaacagcaggataccgaatacaaaaatatcctttaccagatacgccccgcttttgggggcaacataatcgccacaatcgtatcgccggagaaaaagcctcagatggcgacggtccgcgagggcgttatgcgaatggcagtgcccaatacttcacgcaaggccgaagtcgtgaatattaccgcgaaactcaacccggaagattttccgagcgagataatcgaacgtgttatggaagaaaagagtgtcaacctgaaaggggcgcagattatagtgtccggcggcatgggagtgggaagcaaagaaaatttcgcacttatccgggaacttgcccaaaccttgggagccgaagtaggcgcttcccgcgccgcagtcgatcanggctttatcggcaaggaacaccaggtggggcagacgggaaccacggtcagaccgaagctgtacattgcctgcggcatttccggggctattcagcacagggcgggcatggacgcttcttcacgaataattgcgattaacaatgatcctgaagcgccgattttcggcattgcccattacggaatagtgggagacctgaacgaggttatccccctgatgatcaaagcgtacaaggccagagtctag

SEQ ID NO: 48948 - protein, 330 aa, Unknown
  Obtained from environmental sample
  DOMAIN (2)...(196): Electron transfer flavoprotein domain
  misc_feature (1)..(330): Xaa is any amino acid
MVYIQQHAGKAAEVSLELVSKARELADKLGAEVSAALFGDKVSGEAARLAGYGADRVYVMEDPRLKFYTPIPYSKLMIQVVSEMKPQIVLYGATTEGRDLAPRVASHLKVGLTADCTDLQIGDHKQQDTEYKNILYQIRPAFGGNIIATIVSPEKKPQMATVREGVMRMAVPNTSRKAEVVNITAKLNPEDFPSEIIERVMEEKSVNLKGAQIIVSGGMGVGSKENFALIRELAQTLGAEVGASRAAVDXGFIGKEHQVGQTGTTVRPKLYIACGISGAIQHRAGMDASSRIIAINNDPEAPIFGIAHYGIVGDLNEVIPLMIKAYKARV

SEQ ID NO: 48949 - DNA, 720 bp, Unknown
  Obtained from environmental sample
  misc_feature (1)..(720): n is a, c, g, or t
atgacgcggatagcggtccttgtaagcggcggcggcacaaaccttcaggcattgattgacgcgcgtgataggggagagctgggggaaggggttctttcgcttgttatttcaacgaagacggaagtcaaagcgcttgaacgggcgcaaaaagcaggaataaaaacaaaaactatagaaagaaaaaaatattccgatccggaagaatatgacgccgcctttgccgatacgttatctgaagagagaatagatcttgttatccttgcgggatttttatcaatactaggccctaaaacgcttaagttatatgaaaacagaattatcaacgttcatccggccctgataccgtctttttgcggaaagggattttacggccttcatgttcatgaggaagtccttaaatacggcgtgaaagttacgggcgcgacagtccattttgtaaacgacgtaatagacggcggaaaaattattcttcaaaaagcggttgacgtgcttccgtatgacacgccagaattatgcagcagcgcgttatgcccaaagcaaaatgggtattgcttcccaaagctgcccccttgttttgcaaggaaaaaaaaaaggaaggttccgggaataagccccggaagggggggaaccccccctaaaaaagggcccctaaaaaaaaaacccccaaaaaaaaaaaataacccccgcctcccgggaaaaccgccgaaaaaacccctttaa

SEQ ID NO: 48950 - protein, 239 aa, Unknown
  Obtained from environmental sample
  DOMAIN (2)...(176): Formyl transferase
  misc_feature (1)..(239): Xaa is any amino acid
MTRIAVLVSGGGTNLQALIDARDRGELGEGVLSLVISTKTEVKALERAQKAGIKTKTIERKKYSDPEEYDAAFADTLSEERIDLVILAGFLSILGPKTLKLYENRIINVHPALIPSFCGKGFYGLHVHEEVLKYGVKVTGATVHFVNDVIDGGKIILQKAVDVLPYDTPELCSSALCPKQNGYCFPKLPPCFARKKKRKVPGISPGRGGTPPKKGPLKKKPPKKKNNPRLPGKPPKKPL

SEQ ID NO: 48951 - DNA, 309 bp, Unknown
  Obtained from environmental sample
  misc_feature (1)..(309): n is a, c, g, or t
gtgcgttcgttatgccacataacaggcggcggcttttacgaaaacattcctcgcgctttcggtaaaaatgcgggagcacttataaaaaagaacgcgctgaacattccgccgatttttaatattatcgcgtcacagggaaaaattccggaaagggatatgttcaatacatacaacatgggtataggaatgtgcgcctttgttcaggcgcaggacgcggacgaagcggtgcgtatccttaaatcatccggcgaaagcgccgccgtaataggtgaaataaagagcggtatatccggagtaattgtagaatga

SEQ ID NO: 48952 - protein, 102 aa, Unknown
  Obtained from environmental sample
  misc_feature (1)..(102): Xaa is any amino acid
MRSLCHITGGGFYENIPRAFGKNAGALIKKNALNIPPIFNIIASQGKIPERDMFNTYNMGIGMCAFVQAQDADEAVRILKSSGESAAVIGEIKSGISGVIVE

SEQ ID NO: 48953 - DNA, 324 bp, Unknown
  Obtained from environmental sample
  misc_feature (1)..(324): n is a, c, g, or t
atgatgcaaataatagaatggcggcagtttttagaaaaaggattaatctctaacggaaaactttcctctatgacggtcggcgtttttgacggcgtacatagaggacatcaagagctgttaaagcgtattgtttcacataacgcagataaaatacccgtagttatcacttttaaggataatcataaaattgagagcggacacattttaaatttcaaacaaaaactggctgtttttgaaagtttaggaatacaaataacgattgttattgattttaccgaagaagtaaaacaaatgtccggcattgaatttctggaaattttataa

SEQ ID NO: 48954 - protein, 107 aa, Unknown
  Obtained from environmental sample
  DOMAIN (20)...(107): FAD synthetase
  misc_feature (1)..(107): Xaa is any amino acid
MMQIIEWRQFLEKGLISNGKLSSMTVGVFDGVHRGHQELLKRIVSHNADKIPVVITFKDNHKIESGHILNFKQKLAVFESLGIQITIVIDFTEEVKQMSGIEFLEIL

SEQ ID NO: 48955 - DNA, 732 bp, Unknown
  Obtained from environmental sample
  misc_feature (1)..(732): n is a, c, g, or t
atggcgttccgtctcggagaatatgataaggcggaagagtttataaacgctattcttgaacaatggccggattccgccgaggggaaaatagcgcacaaggaaaaaataagaattttaagcgagttaaataaatttgccgaattaaatgaattctttgttaacaatccttttaaaatagaaaaagaccttgactactacatacttctggcaaaatgccgatgggaactaaaaaattacgccgattccgccgaggcgtgggacatggctttcgcaatgaaaacagataacggcgtttacgccgttaatgcggctaacgctcacgaaatggcgggaaacaatgatgcggcgttggagcgttatatagcagccggaaaactttttataaatcaggacaatatgccggaacttgccgctcttgtgcaaaaattgtccgtacttggaaaagacagctgggaagcccacgcactcgcgggaaaatgggcgttcagtattgaggattacgacagatgcgcgaaagaatttgagatttcacacaaaataagatgcgccctaagacctcggccgaaagcggatccggctctttattatttatgggggcttgttttttatatcaagggaaaaatcggaaccgcgatacgtttaataaaaagagccgtttctcttgccccggactatgatcttttccgcaagaaacttaaagaactaataaaaatcagcgaaaaaaagaaatga

SEQ ID NO: 48956 - protein, 243 aa, Unknown
  Obtained from environmental sample
  DOMAIN (192)...(225): Tetratricopeptide repeat
  misc_feature (1)..(243): Xaa is any amino acid
MAFRLGEYDKAEEFINAILEQWPDSAEGKIAHKEKIRILSELNKFAELNEFFVNNPFKIEKDLDYYILLAKCRWELKNYADSAEAWDMAFAMKTDNGVYAVNAANAHEMAGNNDAALERYIAAGKLFINQDNMPELAALVQKLSVLGKDSWEAHALAGKWAFSIEDYDRCAKEFEISHKIRCALRPRPKADPALYYLWGLVFYIKGKIGTAIRLIKRAVSLAPDYDLFRKKLKELIKISEKKK

SEQ ID NO: 48957 - DNA, 1071 bp, Unknown
  Obtained from environmental sample
  misc_feature (1)..(1071): n is a, c, g, or t
atgaataaactgattaaacgcaaacgatatctggcacagcttgacatgtggcgtgaggaaaaaatgattaaagtcattaccggcatacgcagatgcggcaaatcgacactgtttgagctgtatatcgaacaattaaaggccggcggtgtgcctgatgatcagattatctttatcaatttggaagatgaggatttttccgggcttttggatcataagaaactgcacgagtatataaaggttcgcatcctgaaagacaaatggatgtatatttttattgacgaaattcaaaactgtaaaaattacgaaaaggcggtttcgagtctttatcttaaaaaaaacatcgatatatacctcaccggctcaaacgcctatattctctctggcgaacttgctaccaaactcactgcccgctacattgagattgatatgcttccgctttcttttgaggaatacagtgaagcggtgaaaatccccgataagcgggaacgttttaaccaatttatgaacagaggcgcattcccttatgctacccgttttatagacaattcaacggcgcacagccagtatttagaaggggtttataacactgttctggttaaagatgttatgacaaataaaaatttaaaagatataaccctgattaaatcaataataagttttttggccgacaatgtgggaagtccggtttccgcaaagaaaatcaccgatacgctaagctccggcggccgccctacaggttccgctacggtcgatacttatttggaagcgctttgtgacgcataccttttctataaggtcaaccggtatgacattaaagggaagatgcaccttaaatctgaaagcaagtattatatttgcgacacgggtttacgaaatatgatactgggaacaacaaacaaagatatagggcaccagatagaaaatatcgtttttttggaactattaaggcgcgggtattcaattaatatcggtaaatcaggacgtggtacggaggttgattttgtcgctgtccgtaacaataaacctgagtattatcaggtttccgcgtcggtgttagacgaaacacattga

SEQ ID NO: 48958 - protein, 356 aa, Unknown
  Obtained from environmental sample
  DOMAIN (3)...(179): Archaeal ATPase
  misc_feature (1)..(356): Xaa is any amino acid
MNKLIKRKRYLAQLDMWREEKMIKVITGIRRCGKSTLFELYIEQLKAGGVPDDQIIFINLEDEDFSGLLDHKKLHEYIKVRILKDKWMYIFIDEIQNCKNYEKAVSSLYLKKNIDIYLTGSNAYILSGELATKLTARYIEIDMLPLSFEEYSEAVKIPDKRERFNQFMNRGAFPYATRFIDNSTAHSQYLEGVYNTVLVKDVMTNKNLKDITLIKSIISFLADNVGSPVSAKKITDTLSSGGRPTGSATVDTYLEALCDAYLFYKVNRYDIKGKMHLKSESKYYICDTGLRNMILGTTNKDIGHQIENIVFLELLRRGYSINIGKSGRGTEVDFVAVRNNKPEYYQVSASVLDETH

SEQ ID NO: 48959 - DNA, 1050 bp, Unknown
  Obtained from environmental sample
  misc_feature (1)..(1050): n is a, c, g, or t
gtgaacggtcagtttacaagcgatggcggaacccacctttcggcatttaaggaaggctttttgaaggggattcaggcttacttcaagaaagattaccgcagcgaagacatacgcgaagggactctggcggcggtggcggtgaagctgaaaaacccggtctttgaaagccagacaaaaaacaaacttggaaactcggatatacggagctggatagtccaggaagtaaaggacgctaccgaggactggcttcataaaaataccgaggcggccaaaaagctggagcgcaaaattctggccaacgaaagcctccgcaccgagcttaaccaggttaaaaaagaagcccgcgaggccgcgaaaaaaatcgcccttaagatccccaagcttaaggactgcaagtaccaccttgaagacggcgaggaaggggagctttctaccatctttattacagagggagattccgcggcaggctccatggtgtcaagcagggacgtgatgacccaggctatctttgccctccgaggcaaggttgaaaacgtgttcggcaaaaagcgggcggccatttacaagaacgaagagctgtacaacatgatgatggcgctgggaatagagaacgacgtttccggcttacgttacgccaggattgtgatcgcgaccgacgcggattttgacggctttcatatcagaaaccttcttttaacttttttcctttcttattttgaagaactcgtaacctcaggcaggatatatatccttgagactccccttttccgggtgaggaataaaaaagaaaccagttactgctacaatgccgacgaaagggacgcggcggtttacgctctgggcagccaggccgaggtaacccgctttaagggccttggggaaattaacccgaaggaattcggccagtttatcggcgaagacatgcgccttgtaccggtgtcagtgagcaccctaaaaaccgttccgcaagtattgaatttttacatgggaaagaacacccccgagcgaagagaatatataatgaaaaatttgattgaggacgcgggatga

SEQ ID NO: 48960 - protein, 349 aa, Unknown
  Obtained from environmental sample
  DOMAIN (277)...(341): DNA gyrase B subunit, carboxyl terminus
  misc_feature (1)..(349): Xaa is any amino acid
MNGQFTSDGGTHLSAFKEGFLKGIQAYFKKDYRSEDIREGTLAAVAVKLKNPVFESQTKNKLGNSDIRSWIVQEVKDATEDWLHKNTEAAKKLERKILANESLRTELNQVKKEAREAAKKIALKIPKLKDCKYHLEDGEEGELSTIFITEGDSAAGSMVSSRDVMTQAIFALRGKVENVFGKKRAAIYKNEELYNMMMALGIENDVSGLRYARIVIATDADFDGFHIRNLLLTFFLSYFEELVTSGRIYILETPLFRVRNKKETSYCYNADERDAAVYALGSQAEVTRFKGLGEINPKEFGQFIGEDMRLVPVSVSTLKTVPQVLNFYMGKNTPERREYIMKNLIEDAG

SEQ ID NO: 48961 - DNA, 369 bp, Unknown
  Obtained from environmental sample
  misc_feature (1)..(369): n is a, c, g, or t
atgaaaacagtaatggtggttgatgattccagggttatgcggaatattgtgataaaaacattcgaagagctaaaaatacctgttcaatttcttgaagctccggacggccaaaaagctttgcaggttttattgagcaaccaggttgaccttgttcttttggactggaatatgccgaacttgtcgggaattgattttcttaagcaggtcagggcgatggacaggtataaaaatactcccatcattatggtaaccagcgaagcgtcaaaaataaatattgtagaagcggtcagagaaggggtaacggcgtatataaccaagccttttaatcatggcgtttttatggataagctttccaaaataaacttttaa

SEQ ID NO: 48962 - protein, 122 aa, Unknown
  Obtained from environmental sample
  DOMAIN (2)...(118): Response regulator receiver domain
  misc_feature (1)..(122): Xaa is any amino acid
MKTVMVVDDSRVMRNIVIKTFEELKIPVQFLEAPDGQKALQVLLSNQVDLVLLDWNMPNLSGIDFLKQVRAMDRYKNTPIIMVTSEASKINIVEAVREGVTAYITKPFNHGVFMDKLSKINF

SEQ ID NO: 48963 - DNA, 627 bp, Unknown
  Obtained from environmental sample
  misc_feature (1)..(627): n is a, c, g, or t
atggttctgttaataattcggatattgatttttgcttctctcgttctttcggcttatataattgttatcactcttgaaagatgcagaagcgaaaaacgttacgcttttgtatactgtgttataactatttttctttatacgctgggttactttatcgaggtaacatgcggaaacaccggcggtggaattatcgcggttaaggtaatgtatgcgggaggctgctttatgtctccctttttctttttatttgttgccgattactgcgaattacagataccaaaaaaatattactcctttcccatacttgtaattccggttcttttttatcttgtggttttatcttttgaccatcaccatttgctatatctagattatttttacgataacgcgaagacaatccccagtttaactgtcgaacctggccctttgtatcttatcggcactttttatccgcttttttgcatcgccgttacctgtgtagttcttgtacgcagcatagtttctcagagcagggggcggcgcttcggccttgtcctgcttttggtaagctcccttgccccattgatcgcgaattttgcctatgtgagcctttcgttcttttttaagagcngcgttgtcgggaattaa

SEQ ID NO: 48964 - protein, 208 aa, Unknown
  Obtained from environmental sample
  misc_feature (1)..(208): Xaa is any amino acid
MVLLIIRILIFASLVLSAYIIVITLERCRSEKRYAFVYCVITIFLYTLGYFIEVTCGNTGGGIIAVKVMYAGGCFMSPFFFLFVADYCELQIPKKYYSFPILVIPVLFYLVVLSFDHHHLLYLDYFYDNAKTIPSLTVEPGPLYLIGTFYPLFCIAVTCVVLVRSIVSQSRGRRFGLVLLLVSSLAPLIANFAYVSLSFFFKSXVVGN

SEQ ID NO: 48965 - DNA, 351 bp, Unknown
  Obtained from environmental sample
  misc_feature (1)..(351): n is a, c, g, or t
ttgggattgaactgcgtgaagagcaagcgggattctaactggcttttggaagggatagcgaactggaaacaggaacggcttaaaacgccgagggctgtactgtttgccacagacgagtacaggggggaaatggacgttatcggaaatttcatcacggaaaaatgcgaccaaaaaaaggaaatggcaatcttgttaaaaaaactatacaaggcttattctgactggtgcgaggaaaacaacgaacaccctgtaagcgaaaggttttttacactgcggcttaaagagatgggcttcaagcagggaagaacgtctactgaaagattttggctgggaattgggttggtggaatga

SEQ ID NO: 48966 - protein, 116 aa, Unknown
  Obtained from environmental sample
  misc_feature (1)..(116): Xaa is any amino acid
MGLNCVKSKRDSNWLLEGIANWKQERLKTPRAVLFATDEYRGEMDVIGNFITEKCDQKKEMAILLKKLYKAYSDWCEENNEHPVSERFFTLRLKEMGFKQGRTSTERFWLGIGLVE

SEQ ID NO: 48967 - DNA, 945 bp, Unknown
  Obtained from environmental sample
  misc_feature (1)..(945): n is a, c, g, or t
atgaatttttttgataaaggacagccgttggttagtaataagccaatgaaaatgaaaccggatttttctttgatattgcttcagcttgtgatattgattgtcgcgtccgctgcgcttgcagtgatatttctcaaaaccgcatccgtggagaattatacggatatttgcatctatattaccgtttttattattgtgttaatcttgacattttgcatccgcaaaaataacgaatgggaacgcgccattgttcttcgattcggtaaatttaaaaaggttagggggccggggctgtttttccttctgcccatagccgaccgtgttgctcaaatagtcgatatccgaatcagggtgtcggatttttccgcgcagaaaactttaactggcgattccgtaaccgttgatgttgacgctatatgtttctggctggtttgggatcctcaaaaagcggttcttgaagttgaaaattatattgacgcggtggtgtattcctccaagacggcgttgcgtaacgcggtttcaagtcatgatcttacaacttttcttgaacgcagtgacgtaattgaaaaacaaattcaggaggaggttgacaaaaaaactactgattgggggataacagttcttcatatcgagataacggatattcaaatacccgaacatttgcaggattcgctttcgcgtgtcgcgcaggcggaaagggaaaagaaggggcgtattcttcttgccgaagctgaaattgagattgcaaaaaaactggaagaggcgatttcgatttacgctaagaatgagggagctatgaaacttaaaatcctttctattttgaacgagggcttaaaagcgggtaattcaatgatgctggttcccaactcaatagcggaagaactgaaaacgaaagatatattcggtttacaagcgttaaatgaaattaaaaaggaggcaaataaatga

SEQ ID NO: 48968 - protein, 314 aa, Unknown
  Obtained from environmental sample
  DOMAIN (71)...(245): SPFH domain / Band 7 family
  misc_feature (1)..(314): Xaa is any amino acid
MNFFDKGQPLVSNKPMKMKPDFSLILLQLVILIVASAALAVIFLKTASVENYTDICIYITVFIIVLILTFCIRKNNEWERAIVLRFGKFKKVRGPGLFFLLPIADRVAQIVDIRIRVSDFSAQKTLTGDSVTVDVDAICFWLVWDPQKAVLEVENYIDAVVYSSKTALRNAVSSHDLTTFLERSDVIEKQIQEEVDKKTTDWGITVLHIEITDIQIPEHLQDSLSRVAQAEREKKGRILLAEAEIEIAKKLEEAISIYAKNEGAMKLKILSILNEGLKAGNSMMLVPNSIAEELKTKDIFGLQALNEIKKEANK

SEQ ID NO: 48969 - DNA, 666 bp, Unknown
  Obtained from environmental sample
  misc_feature (1)..(666): n is a, c, g, or t
atgacagttgtaaaagcggttgatgtgataaaagattacggcctcaataatcagacggtacacgcattgcgcggggttaatcttgaatttcaaggcggtgaatttaccgctatcgcggggccttcgggaagcggcaagtctacgtttcttcatcttataggctgtcttgacacattaaccgacggcagtatgcaggttggcgggactgacacgggaaaaatgtcacgccagcagttggcgctccttaggaggcacagcataggttttatttttcaggcgtataatttaattcccgtgctttcggcggaagaaaatatttcctttccgcttactcttattggcataaatccgaaagaaatcaaggaacgtacctcgcgggtgttacatgatgtcggtcttgatggcatggaaaaacgccgtccgaaagaaatgtccggcggccagcagcagagagtcgctatcgcgcgcgcccttgtaaaaaagccagctctcattttagcggatgagccgactgccaaccttgactccgctgtcggacgcgaaatactggaattgatgcttgcgttgaacaagtccgaaggcactacgttcattttctccacgcatgatcagatggtcatggattacgcgcgccgctcttgtgcgtatccgcgacgggcggattga

SEQ ID NO: 48970 - protein, 221 aa, Unknown
  Obtained from environmental sample
  DOMAIN (33)...(219): ABC transporter
  misc_feature (1)..(221): Xaa is any amino acid
MTVVKAVDVIKDYGLNNQTVHALRGVNLEFQGGEFTAIAGPSGSGKSTFLHLIGCLDTLTDGSMQVGGTDTGKMSRQQLALLRRHSIGFIFQAYNLIPVLSAEENISFPLTLIGINPKEIKERTSRVLHDVGLDGMEKRRPKEMSGGQQQRVAIARALVKKPALILADEPTANLDSAVGREILELMLALNKSEGTTFIFSTHDQMVMDYARRSCAYPRRAD

SEQ ID NO: 48971 - DNA, 330 bp, Unknown
  Obtained from environmental sample
  misc_feature (1)..(330): n is a, c, g, or t
gtggagaaaatgaacgtagtgccttcggacttgttcaacgcaagcatcaattccagtatttcgcgtccgacagcggagtcaaggttggcagtcggctcatccgctaaaatgagagctggcttttttacaagggcgcgcgcgatagcgactctctgctgctggccgccggacatttctttcggacggcgtttttccatgccatcaagaccgacatcatgtaacacccgcgaggtacgttccttgatttctttcggatttatgccaataagagtaagcggaaaggaaatattttcttccgccgaaagcacgggaattaaattatacgcctga

SEQ ID NO: 48972 - protein, 109 aa, Unknown
  Obtained from environmental sample
  DOMAIN (32)...(70): Protein of unknown function (DUF1602)
  misc_feature (1)..(109): Xaa is any amino acid
MEKMNVVPSDLFNASINSSISRPTAESRLAVGSSAKMRAGFFTRARAIATLCCWPPDISFGRRFSMPSRPTSCNTREVRSLISFGFMPIRVSGKEIFSSAESTGIKLYA

SEQ ID NO: 48973 - DNA, 1386 bp, Unknown
  Obtained from environmental sample
  misc_feature (1)..(1386): n is a, c, g, or t
gtgtacaacgtttcttccagtgcggtaaccatctccggcggctccgtttcggcgccaacgggcactgcggtgctgaacaacgccgccggcacggtaaccatttccggcggcaacgtttatgcgacgacaacgggcacggcggtgctgaacaacgccgccggcacggtaaccatctcaggcggcaccgttaatacgggaacgggcactgcggtgctgaacaacggcaccggcgcggtaaccgtctccggcggcacggttcaggcgtcaacgggcactgcgatttacaacgccagcaccggtaaaatcaccgtgtcgcaaccgtcagggtccacgacgaagattacctcggcaggaacaggcacagacaccgcacaaggcacgattatcattgcgtccagcggaaccgccaccgacgcacggcttgaaattatcggcggcacggtagaaaccaccggcactaaccagaactccaaagcaatttacaacgcttccagcggcggggtaaccatttccggcggcaccgtttcggcaactaccggcatcgcggtgtacagcgccggcaccggcgcaatcaccgtgtcgcaaccgtcaggggccacaacgatagtcacttcggcaaacgtgaccgcgacattgggcacggtttaccttgcaagcggaagcgtcgtgctgctcggcggcacggtaagaaacaccgccagcaatacaaatgcgcagacaatatacaacgcttccagcggcacggtaaccatttccggcggcacggtttcggcgacaacgggcactgcggtgcggaacaacagcaccggcgcggtaaacatcttaggcggcacggttcaggcgacaacgggcactacgatttacaacgccaacaccggtaaaatcaccgtgtcgcaaccgtcaggggccacgaccttggttacatcggcaagcacgaacaaggagtatggcacgatttaccttctaggcggaaccacaaccggcgtgcggcttacagtaagcggcggcacagtggagaacaccggcagcggaaacgataccagggcgatttacaacgattcacccggcggggtaacgatttccggcggcacggttaaggcgacaatcggcgtcgcggtgtacaacggcggcaccggcgcaatcaccgtgtcgcaagcggcaggggctacgacgctagttacttcgggaaacggactcaccactgcagtagccagtgcaccgggcacgatttaccttgcaaacagcggaaccgcgaccaccgtgcggcttacagtaagcggcggcacggtaagcaacacctccccgaacggctatgccatttacaacgcttcccccggcggggtaagcgtcaccggcggcacggttaccggcccccggtatccgtaa

SEQ ID NO: 48974 - protein, 461 aa, Unknown
  Obtained from environmental sample
  SIGNAL (1)...(18)
  misc_feature (1)..(461): Xaa is any amino acid
MYNVSSSAVTISGGSVSAPTGTAVLNNAAGTVTISGGNVYATTTGTAVLNNAAGTVTISGGTVNTGTGTAVLNNGTGAVTVSGGTVQASTGTAIYNASTGKITVSQPSGSTTKITSAGTGTDTAQGTIIIASSGTATDARLEIIGGTVETTGTNQNSKAIYNASSGGVTISGGTVSATTGIAVYSAGTGAITVSQPSGATTIVTSANVTATLGTVYLASGSVVLLGGTVRNTASNTNAQTIYNASSGTVTISGGTVSATTGTAVRNNSTGAVNILGGTVQATTGTTIYNANTGKITVSQPSGATTLVTSASTNKEYGTIYLLGGTTTGVRLTVSGGTVENTGSGNDTRAIYNDSPGGVTISGGTVKATIGVAVYNGGTGAITVSQAAGATTLVTSGNGLTTAVASAPGTIYLANSGTATTVRLTVSGGTVSNTSPNGYAIYNASPGGVSVTGGTVTGPRYP

SEQ ID NO: 48975 - DNA, 825 bp, Unknown
  Obtained from environmental sample
  misc_feature (1)..(825): n is a, c, g, or t
atgccctggcagggaattgactcctgtgtttcagacgaatattttctgagtgaaaaagaaaaatctgacaattcacgcctgaccccttcatgcaaggaaaaatgctgcttatgcggggtatgcggtaaagaaataaaaattattgaaaattccgatattaaatcttctacagaaataaaattgtcaaatacagctataaacgataatccgcccttcaatcctgtttctgatgttaaccttcaaattgataaggtttacaaaaataaaatggatcctgacatatacagattattgtttagtttcagcaagaccggcagcgccgtctttcacggtcatttaagccttatagaattgttttccatgacttttatcagaggcagcattccagtaatttatacaaaaggctttaatcctatcgttaaaatggaatttgcttctccgttgtctaccggaataagcgccggtaatgagacagcctcggtagacttttcagaaccatttttgccggaaatatttataaaagaaatgaacttaaaattaccgcagggtttccatattgaaaacgccgtatgttactacattccgtcaggaatgaaaaaacattcgttgtcatcgttattatggggtttcggctatgaaaataagaatgcgactgattatgttcgcgccgccgaggaaaaaacctacaggcaggaacgcctgaaagaatgtaaatcgccgttttacctgaaacgtaatttagtccttgcgcgtaatgttaacggaaactctgatgaatggttatcattttttgacgcttataattccctttataaccccatataa

SEQ ID NO: 48976 - protein, 274 aa, Unknown
  Obtained from environmental sample
  misc_feature (1)..(274): Xaa is any amino acid
MPWQGIDSCVSDEYFLSEKEKSDNSRLTPSCKEKCCLCGVCGKEIKIIENSDIKSSTEIKLSNTAINDNPPFNPVSDVNLQIDKVYKNKMDPDIYRLLFSFSKTGSAVFHGHLSLIELFSMTFIRGSIPVIYTKGFNPIVKMEFASPLSTGISAGNETASVDFSEPFLPEIFIKEMNLKLPQGFHIENAVCYYIPSGMKKHSLSSLLWGFGYENKNATDYVRAAEEKTYRQERLKECKSPFYLKRNLVLARNVNGNSDEWLSFFDAYNSLYNPI

SEQ ID NO: 48977 - DNA, 675 bp, Unknown
  Obtained from environmental sample
  misc_feature (1)..(675): n is a, c, g, or t
gtgccgattctgccggttaacatgggttcgttgggttttatcgctgaagtggacagaaacgactggctttctacctacgaaaaatgggaaaaaggcgaaatatccgtatccaaacgctgtatgctggaaatttcagtagaacgcgccggcgaaatcattatgaaaaatatttgccttaacgacgcggttatttccgcctcgggaatcgccaaacttataaatcttgaagtatcaataaacaggggagaatgtgatgccgccgcaggagtcgccctcggttcataccgctgtgacgggcttatagtcgcgactcctacaggttctacagcatactcaatggcggcgggaggccctattcttgatcctgagatggaagcggtaatacttaaccctatttgcccgtttgctttatccaaccggccctttgttcttccttccggtctgccgctggttataacagtgcctgaacagcttcgttccggcgtactgttaaccgttgacgggcaggatacctgtgatcttaaaagcgcggataaaattttcattaatcaggcggcgaagcctgcgctgttaatttttgcggacaggcacgcttattattccgcgttaaggtctaaacttttctggtcgggtaatctttgggagcagtctcccttggagcgaaccaatgcttga

SEQ ID NO: 48978 - protein, 224 aa, Unknown
  Obtained from environmental sample
  DOMAIN (1)...(194): ATP-NAD kinase
  misc_feature (1)..(224): Xaa is any amino acid
MPILPVNMGSLGFIAEVDRNDWLSTYEKWEKGEISVSKRCMLEISVERAGEIIMKNICLNDAVISASGIAKLINLEVSINRGECDAAAGVALGSYRCDGLIVATPTGSTAYSMAAGGPILDPEMEAVILNPICPFALSNRPFVLPSGLPLVITVPEQLRSGVLLTVDGQDTCDLKSADKIFINQAAKPALLIFADRHAYYSALRSKLFWSGNLWEQSPLERTNA

SEQ ID NO: 48979 - DNA, 1185 bp, Unknown
  Obtained from environmental sample
  misc_feature (1)..(1185): n is a, c, g, or t
atgagtaaaggacgattcggcgattacggcgggcagtacattcccgagactttgatgaacgagatcatcagtctggaaaaagctttcaatcactataaagatgacgccgcgtttaaggcggaactggacgatctgcttagaaattacgcaggccgcccatcgctgttgtatttcgcgcagaagatgagccaagatctgggcggtgcgaaaatttatcttaaacgggaagatttgaaccacacaggttcgcataaaatcaacaatgtactaggccaaaccctgctcgcgaaaaaaatgggcaagaccagaattatcgctgaaaccggcgcgggccagcacggcgtagccgcggcaactgcggcggccctgctgggaatggaatgtgaaatctttatgggcaaggaggacacggagcgccaggccctcaacgtgtaccgcatggaactgttaggcgctaccgtccatcctgttatgtcgggaacccaaacgctgaaagacgcggttaatgaaaccatgcgggaatggacaagcagagttcatgacacccactacgtgcttggttccgtcatggggccgcatccctttccggtcatggtgcgggagtttcaaagcgtaatcagcagggaagcgcgtgaacagatactggaaaaggaaggccagcttccctcggctgtactggcctgtgtcggcggcggaagcaacgcgatgggcatttttcaccattttatcccatctccggaagtacggctgatcggctgcgaggcggcgggccttggtgtggatacggaacagcacgccgctacaattgcgaaaggctcggtagggattttccacgggatgaaatcctatttctgccagaactccgagggccagattgctccggtatattcaatttcggcaggcctggactatccgggcatagggccggaacacgcctggcttaacgacagcaagcgcgccacatatgtacccgttaccgacgaagaagcggtagacgcgtttgagtacctcgcgcgtaccgaggggatcatctgcgcagtggaaagcgcccacgcgatagcccacgcaaaaaaaattgcgcgtaacttcggaaaaaacgaaaacatcattatttgcctttccggcagaggggacaaggacgtctcggcaatcgcacgataccgagggaaaaagatacatgaataa

SEQ ID NO: 48980 - protein, 394 aa, Unknown
  Obtained from environmental sample
  DOMAIN (47)...(376): Pyridoxal-phosphate dependent enzyme
  misc_feature (1)..(394): Xaa is any amino acid
MSKGRFGDYGGQYIPETLMNEIISLEKAFNHYKDDAAFKAELDDLLRNYAGRPSLLYFAQKMSQDLGGAKIYLKREDLNHTGSHKINNVLGQTLLAKKMGKTRIIAETGAGQHGVAAATAAALLGMECEIFMGKEDTERQALNVYRMELLGATVHPVMSGTQTLKDAVNETMREWTSRVHDTHYVLGSVMGPHPFPVMVREFQSVISREAREQILEKEGQLPSAVLACVGGGSNAMGIFHHFIPSPEVRLIGCEAAGLGVDTEQHAATIAKGSVGIFHGMKSYFCQNSEGQIAPVYSISAGLDYPGIGPEHAWLNDSKRATYVPVTDEEAVDAFEYLARTEGIICAVESAHAIAHAKKIARNFGKNENIIICLSGRGDKDVSAIARYRGKKIHE

SEQ ID NO: 48981 - DNA, 495 bp, Unknown
  Obtained from environmental sample
  misc_feature (1)..(495): n is a, c, g, or t
ttgccgttgcaatcgcgcgctacagaggaaaaaagatacatgagtaatatagccaaagccttcgataataataacggcaaagcctttatcggctttgttaccggcggggatccccgcattgaaaaaacaaaggaattcatactggagatgttccgcgccggttcaaatctggttgaaatcggaatccccttttccgatccgatagccgaaggccccgttatccaggaggcaaacatccgcgccctacgcgctggagccaccgtagaaaagcttttcacgcttgttgaagatgtccgcaccgttaccgatgcgccgctggtgtttctgacttacctcaacccggtctttcattacggatacgacgctttttttaagcgttgcagcactgtcggccttgacggaatcatcatccccgatcttccctttgaggagcaggccgacgtgcgggaggcggcgtcaaaatacggcgtagacctcatctctcggccgatctga

SEQ ID NO: 48982 - protein, 164 aa, Unknown
  Obtained from environmental sample
  DOMAIN (21)...(163): Tryptophan synthase alpha chain
  misc_feature (1)..(164): Xaa is any amino acid
MPLQSRATEEKRYMSNIAKAFDNNNGKAFIGFVTGGDPRIEKTKEFILEMFRAGSNLVEIGIPFSDPIAEGPVIQEANIRALRAGATVEKLFTLVEDVRTVTDAPLVFLTYLNPVFHYGYDAFFKRCSTVGLDGIIIPDLPFEEQADVREAASKYGVDLISRPI

SEQ ID NO: 48983 - DNA, 729 bp, Unknown
  Obtained from environmental sample
  misc_feature (1)..(729): n is a, c, g, or t
gtggatgaacttatggatgagcacggcttttcggcggtattcataggttccggcgcggggctgccccgctttatgcacattccaggcgaagatctgaacggcgtgtttgctgcaaatgattttttaacccgcatcaatttgatgaaagcttatgtggaaggaagctccacgcctattcaaagggcaaaaaaaaccgccgttataggaggcggaaacgtggcgatggattcagcccgttgcgcgaagcggcttggctctgatgttaccattgtctaccgccgcaccgaaaaagagcttcccgcccgtgttgaggaagtgagaaacgcgaaggaagaaggcattcattttatgttccttaccgagccggtaaaaatcgcgggcgatgaaagaggctgggtcaagatgcttatctgcgagaagatgaccttgggcaaacccgacgcatcaggcagagccgggacgattcccatacccggaagcgaaatcgacatagctgtcgatagcgttatcatggctattggcacttcgcccaatccgcttatcagaaactcaacaaagggactggatacgcaaaagtggggcggcattatcgccgatgaggctaccggtaaaaccagccttgagggagtctacgccggaggtgatgcggtaaccggagcggccacagtgattctcgccatgggtgcggggaaaaaggccgccgaagcaattgatgcgtatctacagtaa

SEQ ID NO: 48984 - protein, 242 aa, Unknown
  Obtained from environmental sample
  DOMAIN (64)...(221): Pyridine nucleotide-disulphide oxidoreductase
  misc_feature (1)..(242): Xaa is any amino acid
MDELMDEHGFSAVFIGSGAGLPRFMHIPGEDLNGVFAANDFLTRINLMKAYVEGSSTPIQRAKKTAVIGGGNVAMDSARCAKRLGSDVTIVYRRTEKELPARVEEVRNAKEEGIHFMFLTEPVKIAGDERGWVKMLICEKMTLGKPDASGRAGTIPIPGSEIDIAVDSVIMAIGTSPNPLIRNSTKGLDTQKWGGIIADEATGKTSLEGVYAGGDAVTGAATVILAMGAGKKAAEAIDAYLQ

SEQ ID NO: 48985 - DNA, 714 bp, Unknown
  Obtained from environmental sample
  misc_feature (1)..(714): n is a, c, g, or t
atggcgcagatcaacgacatttcctttaccgtcgacaaccgcctggtcgttctcattgaacaccagtccactataaaccccaacatgcccctgcgcctgctgatgtacatagcgcacatctacgagaagataaccggccgccgcaagctgtacgcgacgaagcccgaaaagatcccggcgcccgaattcatcgttttgtacaacggcaaggaaccgtaccccgaccgcgggacgctcaggctttcggacgcgttcaaggaggcttgcgggctgcggggaatggaaagccctgcgcagccgctggagttggttgcgcaggtgtacaacatcaaccgggggcacaacgcggaaatgctgggaaggagccggagattgagcggttacagcgttttcgtggaaaaagtgcgggaatacgcgcaaacattgacctttgaagaggcgatgaagcaagcggtcaagcattgcatggacaacaacatacttaaaacgtttttagaaacgcacagttcggaggtatttaacatgctgttaacggaatgggacacggaagaggcaaaagaggtttggtacgaagaaggcatggagaagggccgcgaagaaggccgcgaagaaggccgcgaaaaagaacgccaattttttcttgaactgctcagtcaaggtttgacaacggaggaaattaaacagcgcctttcggggtcagccacaacattgtaa

SEQ ID NO: 48986 - protein, 237 aa, Unknown
  Obtained from environmental sample
  misc_feature (1)..(237): Xaa is any amino acid
MAQINDISFTVDNRLVVLIEHQSTINPNMPLRLLMYIAHIYEKITGRRKLYATKPEKIPAPEFIVLYNGKEPYPDRGTLRLSDAFKEACGLRGMESPAQPLELVAQVYNINRGHNAEMLGRSRRLSGYSVFVEKVREYAQTLTFEEAMKQAVKHCMDNNILKTFLETHSSEVFNMLLTEWDTEEAKEVWYEEGMEKGREEGREEGREKERQFFLELLSQGLTTEEIKQRLSGSATTL

SEQ ID NO: 48987 - DNA, 861 bp, Unknown
  Obtained from environmental sample
  misc_feature (1)..(861): n is a, c, g, or t
atgaaaaacacggtcaaaaccagctctgaaaagcatgaagatatacttcaaatttatttcaatcaaatcaaggcatacccgcttttgaaacctgaagaagaattggaacttgcccggcttatccagcagggagatcagaacgccctccacagattgataaaagccaacttgcggttggtggttaagattgcccgtccttatggagcgccggatattccctttatggaccttattcaggaaggaaacatgggcctgatgcacgccgctgaaaaattcgaccctgaaaagaaactccgtttttgtacctatgcaggctggtggattcgccaattcattatccgctacctgaccaataagcgccgtgtcgtccggctgccccaccggaaagaagagattctccgcagaattcagcacacataccataccctcagccaaacccttatgcaccaaccccggacagcggatattgccggtgaattgggaatttcggtacgggacattgattttatcgtcaacatgagttccggccccctgtctctggaactggataccggcagggaggacaatgctacggtgatggaaatgcacgaagattatacctacagtccggagcgggcgctgtttcgccaatattaccgcgatggagcgcggcgttttcttgaacggctgaaagacagggaaaggaaggtgatttcttaccgctaccagcttgaagatgacaaacaatatacattcaaggaaatcggcgtaaaaatggacttatccccggaaatggtacgccagattgaactgaaagccctggcaaagatccgccgccacgcaaacgaactggattattacgattaccaggaagccatttaa

SEQ ID NO: 48988 - protein, 286 aa, Unknown
  Obtained from environmental sample
  DOMAIN (13)...(49): Sigma-70 factor, region 1.2
  misc_feature (1)..(286): Xaa is any amino acid
MKNTVKTSSEKHEDILQIYFNQIKAYPLLKPEEELELARLIQQGDQNALHRLIKANLRLVVKIARPYGAPDIPFMDLIQEGNMGLMHAAEKFDPEKKLRFCTYAGWWIRQFIIRYLTNKRRVVRLPHRKEEILRRIQHTYHTLSQTLMHQPRTADIAGELGISVRDIDFIVNMSSGPLSLELDTGREDNATVMEMHEDYTYSPERALFRQYYRDGARRFLERLKDRERKVISYRYQLEDDKQYTFKEIGVKMDLSPEMVRQIELKALAKIRRHANELDYYDYQEAI

SEQ ID NO: 48989 - DNA, 621 bp, Unknown
  Obtained from environmental sample
  misc_feature (1)..(621): n is a, c, g, or t
atgtggtgtaacggttatcacggccccaacctgggtatcggctatacatttgactttgaaaaattctatcaaatggaaaacgctttaatgccctataaccgtaacggcgcgctcttcccgcgcaaaatcgggaaaaattacgccatgtacagccgcccgagcgattcggggcatacaccgtttggcgacattttctattcggaaagccccgaccttatatactggggaaagcaccgccatgtcatggcgcctaacgaaggctggcaaagcaccaaagtcggagccggaccctgtccgatagaaacaagcgagggctggctcttgttctaccacggagttttgacaagctgcaacggttttgtttactctttcagcgcggcgctgctggatctggacaagccctggaaagtaatcgcccgcccgcgtccgtacattattaatccgcgcgaaatctacgaattggcgggggatgttccaaacgtaacattccctgtcgccgcgcttgtcgacaaggacacaaacagagtagcgatttactacggctgcgccgacaccgtaacaggcctggtcttcggaaaagtggatgaaatcgttgattgggtgaagaaaaataataaataa

SEQ ID NO: 48990 - protein, 206 aa, Unknown
  Obtained from environmental sample
  DOMAIN (2)...(203): Domain of unknown function (DUF377)
  misc_feature (1)..(206): Xaa is any amino acid
MWCNGYHGPNLGIGYTFDFEKFYQMENALMPYNRNGALFPRKIGKNYAMYSRPSDSGHTPFGDIFYSESPDLIYWGKHRHVMAPNEGWQSTKVGAGPCPIETSEGWLLFYHGVLTSCNGFVYSFSAALLDLDKPWKVIARPRPYIINPREIYELAGDVPNVTFPVAALVDKDTNRVAIYYGCADTVTGLVFGKVDEIVDWVKKNNK

SEQ ID NO: 48991 - DNA, 1026 bp, Unknown
  Obtained from environmental sample
  misc_feature (1)..(1026): n is a, c, g, or t
atgatagatttaaccattgataaatcgacgcttgaaaaaaatataaaaaaggcaaaggaaaacgggatcgtcgttccgacattcagccagatgaaggatccctcggctgtcccgtcattcatcaaagaaaaattgaaaaaaacgggattgtgggatgtcgatcctgctaatttgtttcgcatcacatggaaaaacgaggctaagaaatcgggcgggctgttttgcgctccaaattatattgaactgccgtcaaaactgaccggggtggcggcaaggattatttgcctggtggggaaatattttccgacaggctgccacaaagtgggagcttcattcggctgccttgtgccaatgttggtgaccgggcagtttgacgcaaccgctcaaaaagccgtttggccgtctaccggcaattactgccgaggcggcgcgtttaattcaaaactgctggcagtggactctgtggctattcttcccagggggatgagccgcgagcgatttgactggcttaagactattgccaccgagatcatcgcaacgccgggaacagagtccaatgttaaagaaattttcgataaagtaaacgaactgaaagcgacgcgaaaagatgtaatgatttttaaccagtttgacgaattgggcaattacctttggcattacagcgtgacaggcccggcaatcgccgaagcgttcgagaatctggcgcaaagcggcaggagtttgaatttttccggagcgtgctttacctccggttccgccggcacgcttgcttccggcgattttctcaaacagcgttatgtgaagagcaggcttgccgtcggcgaggcgctgcagtgccctacaattctgaacaacggctttggctcccaccgcattgaaggcataggcgacaagcacatcccctgggtgcataatgttaaaaataccgacatggcaatcgccattgacgaacacgactgcatggccttactgcggctgtttcaacgagaagcgggcaaagctttcttgtttccgaagcgggtttag

SEQ ID NO: 48992 - protein, 341 aa, Unknown
  Obtained from environmental sample
  misc_feature (1)..(341): Xaa is any amino acid
MIDLTIDKSTLEKNIKKAKENGIVVPTFSQMKDPSAVPSFIKEKLKKTGLWDVDPANLFRITWKNEAKKSGGLFCAPNYIELPSKLTGVAARIICLVGKYFPTGCHKVGASFGCLVPMLVTGQFDATAQKAVWPSTGNYCRGGAFNSKLLAVDSVAILPRGMSRERFDWLKTIATEIIATPGTESNVKEIFDKVNELKATRKDVMIFNQFDELGNYLWHYSVTGPAIAEAFENLAQSGRSLNFSGACFTSGSAGTLASGDFLKQRYVKSRLAVGEALQCPTILNNGFGSHRIEGIGDKHIPWVHNVKNTDMAIAIDEHDCMALLRLFQREAGKAFLFPKRV

SEQ ID NO: 48993 - DNA, 387 bp, Unknown
  Obtained from environmental sample
  misc_feature (1)..(387): n is a, c, g, or t
ttgtccctgtttcttaatcctcttgacaccgagaagatctcatcgacaaggatgggggcaagccccatagacggttcatcaaggagcagcagacggggacttgccatcagcgctcgtcccatagccagcatctgctgttcgccgcctgaaagcgttcccgccacctggcgtatgcgttcttttaacctgggaaaaacattaaacactttttccatatctgtttttatagcctgtttttcggctttggtaacagagcgtcgtgaatacgctcccatttccagattatcacggacgctgagattggcaaagatacgccgaccctccggaacctgcaccaggccggaagcgacaatgctgtcaggcggaacagagcttatatcccgctga

SEQ ID NO: 48994 - protein, 128 aa, Unknown
  Obtained from environmental sample
  DOMAIN (25)...(63): Protein of unknown function (DUF1602)
  misc_feature (1)..(128): Xaa is any amino acid
MSLFLNPLDTEKISSTRMGASPIDGSSRSSRRGLAISARPIASICCSPPESVPATWRMRSFNLGKTLNTFSISVFIACFSALVTERREYAPISRLSRTLRLAKIRRPSGTCTRPEATMLSGGTELISR

SEQ ID NO: 48995 - DNA, 801 bp, Unknown
  Obtained from environmental sample
  misc_feature (1)..(801): n is a, c, g, or t
atgaacagggatcaactgcgcttaagagtacatggcctctccattgattttggagggcttaaagccgtcagcgaattttcctgcgagctgtaccacggagaactggtcgggcttataggcccgaacggggctggaaagacaacggtattcaatatgctttccggcatatacgccccgacaggaggggaaattgaattccgtgaccgcaaaggcggcctctgtctagtgaaaaatcttaaccccgccaggatgaaccgtatcggccttgccaggacttttcagaatatacgcctgttttccaacctttccgtcgaggacaatatacgcatagcgttacattcaggcaggataagcggtcctatcgacgcgctgctgcgccttaagcgtttccgtattgatgaggaacgtatgcgcgcgcaggcggacgaactgctttccctcttcaagattgaaaaaaagaaggatgaactggcccgcaatcttccatacggcgaacagcgcaagctggagatagcccgcgctctggcttcaaatccctgccttctcttgctggatgaacccgccgcagggatgaacccccaggaaaccgaagacntgatgaagataatcagatttatcagaaatgaatttcacctgacgatccttttaatcgaacacgatatgcggctggtaatgggaatatgcgagcgtcttatagttctggattacgggcggacaatcgccgccggttccccggaagaaatcaggcggaatcctgcggtgatcaaggcttaccttggaacggaggccgccattgcctaa

SEQ ID NO: 48996 - protein, 266 aa, Unknown
  Obtained from environmental sample
  DOMAIN (33)...(237): ABC transporter
  misc_feature (1)..(266): Xaa is any amino acid
MNRDQLRLRVHGLSIDFGGLKAVSEFSCELYHGELVGLIGPNGAGKTTVFNMLSGIYAPTGGEIEFRDRKGGLCLVKNLNPARMNRIGLARTFQNIRLFSNLSVEDNIRIALHSGRISGPIDALLRLKRFRIDEERMRAQADELLSLFKIEKKKDELARNLPYGEQRKLEIARALASNPCLLLLDEPAAGMNPQETEDXMKIIRFIRNEFHLTILLIEHDMRLVMGICERLIVLDYGRTIAAGSPEEIRRNPAVIKAYLGTEAAIA

SEQ ID NO: 48997 - DNA, 777 bp, Unknown
  Obtained from environmental sample
  misc_feature (1)..(777): n is a, c, g, or t
atggcgccccgattcccgttccgttcaaccataatactcggcgccgctggaatcctggcaatagtcatccctctcctgctgatgaagataggcgtcatcgatccttataccacccgcatccttacaatgggcggggtaaacgcgataatggcaatgtcggttaacatgatcgtcggcattaccgggcagctttccctgggtcaggcgggtttcctcgcgataggcgcctattcctgcatttttttcaattttgacgcggggctgcccctgccactcgcggccctctgcgccgttcttgtaaccacgctcgccggttttctcatcggttttccggtgcttaagctgaccggggattaccttgctattgtcacccttggcttcggcgaaattatccgcgtggtatttatcaacctgaaatcccttacaggcgggcctaacggaagggtgtttcccacaaaaatcgtgttgaactacgagttggcctttatactcacgacaataacgctgatcgttatacttgcccttctgcagaattttctccgttccagctacggacgggcgattaaggcgtgcagggaagatgaaatagcggctaacgcaaacggaattaccattttccgatacaagatgctcggattcgtcattgccgcttttatcgccggcataggcggctgcttatacgcgatggttaacggctttgttaagccggacgcggcgcagttcctcagatccattgactaccttattatgtcgttctgggcggaatgggttccatga

SEQ ID NO: 48998 - protein, 258 aa, Unknown
  Obtained from environmental sample
  DOMAIN (36)...(258): Branched-chain amino acid transport system / permease component
  misc_feature (1)..(258): Xaa is any amino acid
MAPRFPFRSTIILGAAGILAIVIPLLLMKIGVIDPYTTRILTMGGVNAIMAMSVNMIVGITGQLSLGQAGFLAIGAYSCIFFNFDAGLPLPLAALCAVLVTTLAGFLIGFPVLKLTGDYLAIVTLGFGEIIRVVFINLKSLTGGPNGRVFPTKIVLNYELAFILTTITLIVILALLQNFLRSSYGRAIKACREDEIAANANGITIFRYKMLGFVIAAFIAGIGGCLYAMVNGFVKPDAAQFLRSIDYLIMSFWAEWVP

SEQ ID NO: 48999 - DNA, 1641 bp, Unknown
  Obtained from environmental sample
  misc_feature (1)..(1641): n is a, c, g, or t
ttgcttttgttcctgtccatccgttttggtttcttttggctttacttgatcagaaaagatccgcgaaaaaaagcgctctgcctatgggcgcatgtaaaacgccgtatggctctcgccggctttaggaaacccaatgcctccggcgttgctgagtgggcaagaaccggtgacaatgtttttggcggactctatatgctttatttggataccgccgccgctcgcttcgcccccggttttacttttgacgacagcaaaaaaatggaagcgcgctaccgccatttcaatgacgaatacaaaaagactgttatgctcttgaggcggcttttggcttgcctcctgccgcctttagcgctggcccttgggcaaacgaagcggcggcccccgtccggagcaaaaatcacaagcgctgttctcatcgtcatttttattttcttgttccgcatggataccatggcacagactgatccggattctttgccattggacagaagctctgattttatttttaatagcgcaacagccgcgcaaagggctgaaaattgggaacgggctatagaactctttaatgaaggggcgaaattctatcctgacgattttcgtttcccatggtcattggggaacctttactattaccgcaggctttaccatctggcctgggacgaataccgccgggccgaaaaaattatcccctgggaaacggatttacttttaaagcttgcaaacaccgcangttatctgaatagaaacgaggtttccgctttttattatgagcgccttctggcccttgatcctgataacatggaagctattggcagtcttgcgtggatgtactttaagctccaccgccttcaggagggtgagacgcttttactggacgccatggactatcttggcgaagatatggatttcgccatgactttgggaaccatctactcaggaatgctccgttatgcggaaggcaaggacgcataccaaagagctatccagatcgcggaaatcgtcggggatcggcttttcgcggctttatcctattataacctctccattcttgaggccagattttaccagttcgcgctggctttcgattgcaccaacgcctcccttgaaacgttggatcgcgcttccggcagacttgcaaggggcgagctgtaccttgcgcgtctggaattatcccgcgcccttgccgattaccaggaagcttaccaaacggacagctcccctctttcaaaactgaaccttgccgaggcgttccagatcggcggacgtttgagcgaggccgccgcttacgcaagcgactgcctaaaggcgggggacgaatcctggatgatgtattacggcatcgatcctgtccgttacaaacgggatatccatgaaattctgaaagatacctataagggccttttaaatgccgagaccttttcatgcccgggcagtttgaaggagaaagtacagagcctgttccgaaaaatctcatatcgattccgtttcgccatccacacgcatttatttcgcaaatactgtcttctttcggcggacgcctttgactggcccggaggggcttctgaccaaaacggcgattcccgggtggagcagttgatgcaatattacaacgcttttgaaaattacccgcgtcgtgcttga

SEQ ID NO: 49000 - protein, 546 aa, Unknown
  Obtained from environmental sample
  misc_feature (1)..(546): Xaa is any amino acid
MLLFLSIRFGFFWLYLIRKDPRKKALCLWAHVKRRMALAGFRKPNASGVAEWARTGDNVFGGLYMLYLDTAAARFAPGFTFDDSKKMEARYRHFNDEYKKTVMLLRRLLACLLPPLALALGQTKRRPPSGAKITSAVLIVIFIFLFRMDTMAQTDPDSLPLDRSSDFIFNSATAAQRAENWERAIELFNEGAKFYPDDFRFPWSLGNLYYYRRLYHLAWDEYRRAEKIIPWETDLLLKLANTAXYLNRNEVSAFYYERLLALDPDNMEAIGSLAWMYFKLHRLQEGETLLLDAMDYLGEDMDFAMTLGTIYSGMLRYAEGKDAYQRAIQIAEIVGDRLFAALSYYNLSILEARFYQFALAFDCTNASLETLDRASGRLARGELYLARLELSRALADYQEAYQTDSSPLSKLNLAEAFQIGGRLSEAAAYASDCLKAGDESWMMYYGIDPVRYKRDIHEILKDTYKGLLNAETFSCPGSLKEKVQSLFRKISYRFRFAIHTHLFRKYCLLSADAFDWPGGASDQNGDSRVEQLMQYYNAFENYPRRA

SEQ ID NO: 49001 - DNA, 684 bp, Unknown
  Obtained from environmental sample
  misc_feature (1)..(684): n is a, c, g, or t
ttgaaggatatcaatttaccgcgagagagcggacaaacaaccgctattatcggcgcgacgggttcaggaaagtcaacaatagcaaatctatttctgcgcttttacgatgttacggatggaagtatagcagttaacgatgtggatgtaagagaattgtcccaaaaagagctccggggaggaatcggttatgtgccgcaaaagagcgtccttctntccgggccggtgtctttcaacctccgttacgggaaaaccgacgcgtccgattcggagattcgcgaaggagcggaaatagcgcaaatacttgattttatcgaatcaaggccggagggctttgattcggttattgcgcaaggaggcgctaatgtttcgggcggacagaaacagcggctttcgattgcgagggctttagtccgcgatccggagattcttatttttgacgacagtttttccgccctggactttgccactgacgcgcggctgaggcaggcgctggaagaaaagaggaaacctgtcacaaagattatagtcgcccagcgggtgggaaccatcatgaacgccgacaagatcatcgtgttggaaaagggcagaatcgcaggcatgggtaagcacagtgagcttctggaaacctgcgtcgaataccgggagattgccgaatcccaattatctcaggaaggcctgtcatga

SEQ ID NO: 49002 - protein, 227 aa, Unknown
  Obtained from environmental sample
  DOMAIN (11)...(195): ABC transporter
  misc_feature (1)..(227): Xaa is any amino acid
MKDINLPRESGQTTAIIGATGSGKSTIANLFLRFYDVTDGSIAVNDVDVRELSQKELRGGIGYVPQKSVLLSGPVSFNLRYGKTDASDSEIREGAEIAQILDFIESRPEGFDSVIAQGGANVSGGQKQRLSIARALVRDPEILIFDDSFSALDFATDARLRQALEEKRKPVTKIIVAQRVGTIMNADKIIVLEKGRIAGMGKHSELLETCVEYREIAESQLSQEGLS

SEQ ID NO: 49003 - DNA, 1077 bp, Unknown
  Obtained from environmental sample
  misc_feature (1)..(1077): n is a, c, g, or t
atgagcgataacagaaattctgtcggcaggcccacagggattcgcggcccgggactcagcaggggcgggcccggaggaatgttcgcggctatgggctctaaagcaaaggactttaagggcactatgaggcagcttgcctcctacctgaaaccattccgcctgacaatcattgtggtatggattctggctttagcttccacggcctttacgattgtcggcccctggatcatgggaaaggttacggacgaactggtaacgggaatttcacggcaagtatccgggattggttttatcaactttgacataattgcctcaacccttattaaacttttgagcctctacctgataagcgcgttttgttcgtggatacagggttttttgatgaccaatgtgagcgttaaggtaacctatacattaagggacgatatcaataagaagctccacctgttgccttttagttattttgacggcgtgagtcacggggaagtgctttcccggcttaccaacgatgtggacacggttaaccaaaccctcaacatgagccttacccagatcatcacgtctgtcagttccgtggtcggaatcctgtgcatcatgttttcggtaaactggattctcacccttatcgcgatttgctttctttctctttcgattatttttatcacacttattgtcaaacaatctcaaaagttttttaaagcccagcagaagtgcctgggggatgtgaacggacacattgaggaaatgttttcaagccacatagtagtcaaagctttttgcggcgaggctgattcggtaaagacttttgattccctgaaccgtaatctttaccagtccgcgtggaaggctaacttcctttccggcctcatgatgcctatcaccgcttttgtggggaacctgacatacgttgtgatttgcgccgcgggaggcctttttgtcctgcggggaatgattaccattggcggtattcaggcctttctgcagtacatccgttcgttcaaccatcccctcactaatatcgccaatatttcaaatatacttcaacagaccgccgcggccgccgaagagggtttttga

SEQ ID NO: 49004 - protein, 358 aa, Unknown
  Obtained from environmental sample
  DOMAIN (56)...(337): ABC transporter transmembrane region
  misc_feature (1)..(358): Xaa is any amino acid
MSDNRNSVGRPTGIRGPGLSRGGPGGMFAAMGSKAKDFKGTMRQLASYLKPFRLTIIVVWILALASTAFTIVGPWIMGKVTDELVTGISRQVSGIGFINFDIIASTLIKLLSLYLISAFCSWIQGFLMTNVSVKVTYTLRDDINKKLHLLPFSYFDGVSHGEVLSRLTNDVDTVNQTLNMSLTQIITSVSSVVGILCIMFSVNWILTLIAICFLSLSIIFITLIVKQSQKFFKAQQKCLGDVNGHIEEMFSSHIVVKAFCGEADSVKTFDSLNRNLYQSAWKANFLSGLMMPITAFVGNLTYVVICAAGGLFVLRGMITIGGIQAFLQYIRSFNHPLTNIANISNILQQTAAAAEEGF

SEQ ID NO: 49005 - DNA, 942 bp, Unknown
  Obtained from environmental sample
  misc_feature (1)..(942): n is a, c, g, or t
atggcagatcggccgagaaaactaacccaatatgcttgtccgagggagggctcggagggcggaatggggttatccatgcaagaaaaaaaggcgcttacaagggaaataagcaagcggtatcagaaagcggggaaaaaagagaagaccgaaattcttaacgagctggtcaaaacaaccggctacaaccgcaagtacgctttgcacatcctggccaattggggaaaaaccgtcgtcgcaggcatcgacggaaaaccggccaaggttgcggcttcgcacggcaagcggcgtaagggcggcggcaggaagccgaagtactcaggcgactttgtaatcgccttgcggaagatatgggcgttcttctggtaccggtgcgggaaaatacttgccccgttcatgcgggaacagatgcgcttcctggaacggccgtttcacataacggaaaaggacaaggaactgctgctgtcggtcagcccgtccaccatcgaccggcttttgaagcaggacaggaaaaagcttgcccttaagggaaaaagcgggacaaggccgggcaagcttcttaaaaagcaaattccagtccgcacctattacgccgacgccgacaaaaagcccgggttttttgaaattgacaccgttcaccattgcggaacttcggattcgggcgagttctgcctaacccttaccgccaccgacgtgtattcaggctgggtagaactgcgcccgaccctcaacaaagcccacaaatgggtttttgaagccctgctggacataaagtcttcactccctttcccgcttgctggcatagacagcgacaacggctcggaattcatcaattccgccctgctcaaatggtgccaacaggagcgcatccgtttacccggtctcgggcctaccgcaaaaacgacaactgttttgtcgagcaaaaaaactttacctgcgtcatga

SEQ ID NO: 49006 - protein, 313 aa, Unknown
  Obtained from environmental sample
  misc_feature (1)..(313): Xaa is any amino acid
MADRPRKLTQYACPREGSEGGMGLSMQEKKALTREISKRYQKAGKKEKTEILNELVKTTGYNRKYALHILANWGKTVVAGIDGKPAKVAASHGKRRKGGGRKPKYSGDFVIALRKIWAFFWYRCGKILAPFMREQMRFLERPFHITEKDKELLLSVSPSTIDRLLKQDRKKLALKGKSGTRPGKLLKKQIPVRTYYADADKKPGFFEIDTVHHCGTSDSGEFCLTLTATDVYSGWVELRPTLNKAHKWVFEALLDIKSSLPFPLAGIDSDNGSEFINSALLKWCQQERIRLPGLGPTAKTTTVLSSKKTLPAS

SEQ ID NO: 49007 - DNA, 480 bp, Unknown
  Obtained from environmental sample
  misc_feature (1)..(480): n is a, c, g, or t
atggtgccaacaggagcgcatccgtttacccggtctcgggcctaccgcaaaaacgacaactgttttgtcgagcaaaaaaactttacctgcgtcatgaacttcgtgggctattaccgcttttgcgcggcggcggagcgggacgccctcgccgatgtctaccgctccctctgccctctgctgtactttttcatgcccactgtcaaactgataagtaaaacaagggttggtacaaaaataaaaaaggcgtatgataaaaatatcataagcccttaccaacggcttatggcttcgcccgatctttccgaagaagctaaagctgaactgatcaggcgttttgccctgtacgatccggtcaagctccagtgggaattccgcaaggcagtcgatgctctggtgccgcataacaaggctgtgaatcttgaaggggggaaagccctgcgccaacttgttggcgacatttccgcccttcatgccgtttga

SEQ ID NO: 49008 - protein, 159 aa, Unknown
  Obtained from environmental sample
  misc_feature (1)..(159): Xaa is any amino acid
MVPTGAHPFTRSRAYRKNDNCFVEQKNFTCVMNFVGYYRFCAAAERDALADVYRSLCPLLYFFMPTVKLISKTRVGTKIKKAYDKNIISPYQRLMASPDLSEEAKAELIRRFALYDPVKLQWEFRKAVDALVPHNKAVNLEGGKALRQLVGDISALHAV

SEQ ID NO: 49009 - DNA, 900 bp, Unknown
  Obtained from environmental sample
  misc_feature (1)..(900): n is a, c, g, or t
atggccgaggtaaatgcgtatgtatacaaattgatggtgtatgcgcccgngaggtacatgacaatgggtctaaaaaaaattatcggaaaaatatatagaaaatcgtgtcaattttatttcatgaatatagataaacatttcaatcttgaagtgcagcttgcggatcattgtaatttgaattgcgcaggttgcagccatttttctcctgttgccgaggaacattttcttgatgtggatacttacagaaaggatagcaggagattttctgaattgaccggaaaatatgtacgcgaaataagtttgatgggaggagagccgctattgcataaaaatattgtggatattatggagattacccggagtaattttaagaatagcattatacaaatagttacgaacggtattttacttgataaaatgggggaagaattctgggatgcctgtaataaaaataacattgttatttgtataacccaatatccggtaaatttaaatgtaaagagattttctgaacttgcatggcagtataatataaatattaaaaatcacgataatggttataagatgaattttagaaaagatgtatatgatattgaaggaaatcaaaataaaaaagaaaactttaaaaaatgcgtaaaatcagtctgtcatcatttatatgaaggtaaattttatatgtgtccaattcctgcatatattaaatatttcaataaaaacttttccaaaaaatttgaagtttcacccaaagactatattgacatatataaaataaaaaatatcaaaactttgttgaaatatttaagaaaaccgataccgttttgtcgttattgtaacataaatgcaactgataatgacattatatggagtatatcgaaaaaagaaatatcagaatggatgtaa

SEQ ID NO: 49010 - protein, 299 aa, Unknown
  Obtained from environmental sample
  DOMAIN (51)...(215): Radical SAM superfamily
  misc_feature (1)..(299): Xaa is any amino acid
MAEVNAYVYKLMVYAPXRYMTMGLKKIIGKIYRKSCQFYFMNIDKHFNLEVQLADHCNLNCAGCSHFSPVAEEHFLDVDTYRKDSRRFSELTGKYVREISLMGGEPLLHKNIVDIMEITRSNFKNSIIQIVTNGILLDKMGEEFWDACNKNNIVICITQYPVNLNVKRFSELAWQYNINIKNHDNGYKMNFRKDVYDIEGNQNKKENFKKCVKSVCHHLYEGKFYMCPIPAYIKYFNKNFSKKFEVSPKDYIDIYKIKNIKTLLKYLRKPIPFCRYCNINATDNDIIWSISKKEISEWM

SEQ ID NO: 49011 - DNA, 855 bp, Unknown
  Obtained from environmental sample
  misc_feature (1)..(855): n is a, c, g, or t
gtgcggcccgcttacgcggttgaatacgattaccttgatcctcttgacctgtaccccagtctggaatccaaaaggctttccggtttttttacagccggacagaccaacggtagttccggttatgaggaagccgctgcccaggggcttatggcgggcataaacgctgcgatgaaactattgggccgtccgccgctggtgctgacaagagcggaagcctatatcggcgtattggtcgatgatcttaccacgctgggaacgaaagagccgtaccgaatgtttaccagccgcgccgaacaccgcctcgttctgcgccacgataccgccgatacaaggctttgtcccaaaggccgcgatgtcggcttagttgacgatgaacgctgggaaattttccaaaagaaaaccgaggcgttagacgaaatcagggaacttttgtcgcagagaaaattttctccttccgcccaaaccgaaaacgctgcccttgtttcccacgcgggagagagccttgagcgctgccttaccgatacccgcgtcgagttagccgacattctcccctttgcaccggagctttccgcttaccccgccgaatggcttgaacgtgccaggctggacatccgctacgcgggttatattgaaaaagaaaaccgtgccgtggcaaaggcggcaaaaatggacgcgataaagctggaccccggactggactacgcggcaattaacggcctttcctcggaggcaagggaaaaattaataactgtaaggcccatcaccgttggacaggcggcgcgcatacccggcgtaaggcagggagatattgcgctgttgatattttggcgaataagaggggcgcaaaatgattaa

SEQ ID NO: 49012 - protein, 284 aa, Unknown
  Obtained from environmental sample
  misc_feature (1)..(284): Xaa is any amino acid
MRPAYAVEYDYLDPLDLYPSLESKRLSGFFTAGQTNGSSGYEEAAAQGLMAGINAAMKLLGRPPLVLTRAEAYIGVLVDDLTTLGTKEPYRMFTSRAEHRLVLRHDTADTRLCPKGRDVGLVDDERWEIFQKKTEALDEIRELLSQRKFSPSAQTENAALVSHAGESLERCLTDTRVELADILPFAPELSAYPAEWLERARLDIRYAGYIEKENRAVAKAAKMDAIKLDPGLDYAAINGLSSEAREKLITVRPITVGQAARIPGVRQGDIALLIFWRIRGAQND

SEQ ID NO: 49013 - DNA, 624 bp, Unknown
  Obtained from environmental sample
  misc_feature (1)..(624): n is a, c, g, or t
atgattaaattagccgtctttcttggcatccccggcgcggaatattcgcgtaacaggcacaatgccggacgcatgcttgcgcaggcgcttccgttttatgactctctttcatggcaaaaaaaatacaaagggctgtacgcttcacatgatgaaaaacactttcttatgcccgaaacatatatgaacttatcaggcgaatccgtacaagccgccgccgcgtttttcaaaattgacgtaaaggaaattatcgtaattcatgatgaattggaactgccgctgggcgttatttctttaaagtattcaggcggtcttggcggacacaacgggcttcgttcaatgaaaaaaagttttaacagcgcggatttttggcgcataagaataggtattggcagacccgattccagacttcccggcgagggcggtcatgaaggaagcggggagggtgtttacgattgggttttatcggatttttcaaaggatgaacaagagacgcttatgcccgctctcgacgccggcgcgaatcttttaatgaaaacttttgaagacgaccctgaaactttattaaaagaatgggcaaaaaagaaaataataatcaataaaccggaaggcgaggaacaaaaatga

SEQ ID NO: 49014 - protein, 207 aa, Unknown
  Obtained from environmental sample
  DOMAIN (4)...(192): Peptidyl-tRNA hydrolase
  misc_feature (1)..(207): Xaa is any amino acid
MIKLAVFLGIPGAEYSRNRHNAGRMLAQALPFYDSLSWQKKYKGLYASHDEKHFLMPETYMNLSGESVQAAAAFFKIDVKEIIVIHDELELPLGVISLKYSGGLGGHNGLRSMKKSFNSADFWRIRIGIGRPDSRLPGEGGHEGSGEGVYDWVLSDFSKDEQETLMPALDAGANLLMKTFEDDPETLLKEWAKKKIIINKPEGEEQK

SEQ ID NO: 49015 - DNA, 771 bp, Unknown
  Obtained from environmental sample
  misc_feature (1)..(771): n is a, c, g, or t
atgcgcttaaacgaaggcgatgaaatagagcgcgcgttttcaaaacgaaaccttaacttcatccgcgtgaacgcgcaaaaacgattccttgacaaactggaaggcgtaaccgacccggaaaaaaagcgcaagatcataggcgaggaatttatccgcgtgtttgaggaagaatccgcgaagttaggcgacattccttttctggcgcaggggacgatctacccagatgttgtcgaatcgggcggcaagcacggcgccgttatcaagagtcatcacaacgtcggagggcttcccgaaaacctcaagtttacagagatcgttgagccgttgtcgcggcttttcaaggacgaggtgcgcgagctgggcaaaaagcttaagctgccgtcatcgcttgttaaccgccagccctttcccgggccgggtcttgccatccgcgtcatgggcgaaataacggaagaaaagctggatgttttacgccgcgccgacgcaatactccgcgaggaactggacgccctgaaacgcaggccaaatcaatacttctgcgtcatgaccggcactcgttccgtgggtgttaaaggggacgacaggacatacgattttgtaatcgccgtcagggctgtaacgaccgacgattttatgacctgcgaatacactccgctaccgcatagtttattaagccgaatatcctcgcggatcacgagcgaaataccgcgggcgagccgggttgtttacgataatacatcaaagcctccggcgacggtggaatgggagtag

SEQ ID NO: 49016 - protein, 256 aa, Unknown
  Obtained from environmental sample
  DOMAIN (165)...(255): GMP synthase C terminal domain
  misc_feature (1)..(256): Xaa is any amino acid
MRLNEGDEIERAFSKRNLNFIRVNAQKRFLDKLEGVTDPEKKRKIIGEEFIRVFEEESAKLGDIPFLAQGTIYPDVVESGGKHGAVIKSHHNVGGLPENLKFTEIVEPLSRLFKDEVRELGKKLKLPSSLVNRQPFPGPGLAIRVMGEITEEKLDVLRRADAILREELDALKRRPNQYFCVMTGTRSVGVKGDDRTYDFVIAVRAVTTDDFMTCEYTPLPHSLLSRISSRITSEIPRASRVVYDNTSKPPATVEWE

SEQ ID NO: 49017 - DNA, 1650 bp, Unknown
  Obtained from environmental sample
  misc_feature (1)..(1650): n is a, c, g, or t
ttgtttacgataatacatcaaagcctccggcgacggtggaatgggagtaggatgatgaccaaatatgtttttgtcacaggcggagttgtatcggggcttggcaagggaatcaccgccgcgtcattgggcaggctgctcaaacaacggggcttgaaggtcgcggcgcagaaactcgatccttacatgaacgtcgatccggggacaatgagcccgttccagcacggcgaggtctttgtcacagacgacggcgcggaaaccgaccttgacctggggcattacgagcgatttatagatgaaaacctgacgaagctcagtaacctgacatccggccaggtgtaccggaacgtgctggaccgcgagcgcgcgggtggctatcttggcagcaccgtgcaggttattccccatgtcaccactgaaataaaaagttttatttatgccggagcggaaaaaagctgcgccgatgtcttgattaccgagattggcggcacaacgggcgacattgaaagccagccgtttctggaagccatccggcaaatttctcttgaaaaaggccgcgaaaactgcctgtttatccatgtgacattgatcccgtatctgaaagcgtctggcgaacacaagtcaaagcccacacaacactcggtcaaggaactgcgcgccattggtatctcgcctaatatcatcatagcgcgagcggacgagcctataaacgacggcattacggataaaatagcgcttttttgcaatgtgaaacccgattgtgtcatagagaactacactattccttccctgtacgaagcgcctcttctgctccatcaaaacggcttggacaaagtcgtgtgccgcgaacttggcattgacgccccggagcccgatttaaatgagtggggtgttatggttaaaaaaatcggggaaaggaaacgggaagtcaatatcgcgattgtcgggaaatatatccagttacacgacgcgtatctttccattattgaaagcctgaaccacgcgggtattgaagccggagcgggggtaaacatccaatggattgacagcgaggacgtaacaaacgaaagcgcaggcgagctattacgcgaaacagacggcatgatcattcccggcggcttcggagaaagggggattgaaggaaaaatcaccgcctgccgttacgcgagggaaaacgacatgccatatctgggaatttgccttggaatgcagattgccgttattgaatttgcgcgtaacgtctgcggactgaagcacgcccattcaagcgaatttgacgaagtttccccccatcgcgtcattgacctgatgcccgatcaggccggcatggtcggctcgggcggcaccatgcggctgggcgcgtatccgtgtaaggtcacgcaaggcacgctcctgcacaggctgtatagcgcggatgaaataagcgaaaggcaccgccaccgctttgaattcaacaatgattaccgcgagactctgacgggcaaaggaatggttatctgcggagtgtcacctaacggaaatcttgtcgaagcgattgaactgccggatcgccgttttttcaccggcgtccagtttcatcccgagttcaagagccgccccaacaagccgcatcccttgtttttagggctggtaaaagccgctattaaaaattag

SEQ ID NO: 49018 - protein, 549 aa, Unknown
  Obtained from environmental sample
  DOMAIN (311)...(527): Peptidase C26
  misc_feature (1)..(549): Xaa is any amino acid
MFTIIHQSLRRRWNGSRMMTKYVFVTGGVVSGLGKGITAASLGRLLKQRGLKVAAQKLDPYMNVDPGTMSPFQHGEVFVTDDGAETDLDLGHYERFIDENLTKLSNLTSGQVYRNVLDRERAGGYLGSTVQVIPHVTTEIKSFIYAGAEKSCADVLITEIGGTTGDIESQPFLEAIRQISLEKGRENCLFIHVTLIPYLKASGEHKSKPTQHSVKELRAIGISPNIIIARADEPINDGITDKIALFCNVKPDCVIENYTIPSLYEAPLLLHQNGLDKVVCRELGIDAPEPDLNEWGVMVKKIGERKREVNIAIVGKYIQLHDAYLSIIESLNHAGIEAGAGVNIQWIDSEDVTNESAGELLRETDGMIIPGGFGERGIEGKITACRYARENDMPYLGICLGMQIAVIEFARNVCGLKHAHSSEFDEVSPHRVIDLMPDQAGMVGSGGTMRLGAYPCKVTQGTLLHRLYSADEISERHRHRFEFNNDYRETLTGKGMVICGVSPNGNLVEAIELPDRRFFTGVQFHPEFKSRPNKPHPLFLGLVKAAIKN

SEQ ID NO: 49019 - DNA, 495 bp, Unknown
  Obtained from environmental sample
  misc_feature (1)..(495): n is a, c, g, or t
gtgttcgccagacgctttcagatacgggatcaatgtcacatggataaacaggcagttttcgcggcctttttcaagagaaatttgccggatggcttccagaaacggctggctttcaatgtcgcccgttgtgccgccaatctcggtaatcaagacatcggcgcagcttttttccgctccggcataaataaaactttttatttcagtggtgacatggggaataacctgcacggtgctgccaagatagccacccgcgcgctcgcggtccagcacgttccggtacacctggccggatgtcaggttactgagcttcgtcaggttttcatctataaatcgctcgtaatgccccaggtcaaggtcggtttccgcgccgtcgtctgtgacaaagacctcgccgtgctggaacgggctcattgtccccggatcgacgttcatgtaaggatcgagtttctgcgccgcgaccttcaagccccgttgtttgagcagcctgcccaatga

SEQ ID NO: 49020 - protein, 164 aa, Unknown
  Obtained from environmental sample
  misc_feature (1)..(164): Xaa is any amino acid
MFARRFQIRDQCHMDKQAVFAAFFKRNLPDGFQKRLAFNVARCAANLGNQDIGAAFFRSGINKTFYFSGDMGNNLHGAAKIATRALAVQHVPVHLAGCQVTELRQVFIYKSLVMPQVKVGFRAVVCDKDLAVLERAHCPRIDVHVRIEFLRRDLQAPLFEQPAQ

SEQ ID NO: 49021 - DNA, 336 bp, Unknown
  Obtained from environmental sample
  misc_feature (1)..(336): n is a, c, g, or t
gtgatttttccttcaatccccctttctccgaagccgccgggaatgatcatgccgtctgtttcgcgtaatagctcgcctgcgctttcgtttgttacgtcctcgctgtcaatccattggatgtttacccccgctccggcttcaatacccgcgtggttcaggctttcaataatggaaagatacgcgtcgtgtaactggatatatttcccgacaatcgcgatattgacttcccgtttcctttccccgatttttttaaccataacaccccactcatttaaatcgggctccggggcgtcaatgccaagttcgcggcacacgactttgtccaagccgttttga

SEQ ID NO: 49022 - protein, 111 aa, Unknown
  Obtained from environmental sample
  misc_feature (1)..(111): Xaa is any amino acid
MIFPSIPLSPKPPGMIMPSVSRNSSPALSFVTSSLSIHWMFTPAPASIPAWFRLSIMERYASCNWIYFPTIAILTSRFLSPIFLTITPHSFKSGSGASMPSSRHTTLSKPF

SEQ ID NO: 49023 - DNA, 951 bp, Unknown
  Obtained from environmental sample
  misc_feature (1)..(951): n is a, c, g, or t
ttgaagcaaggcggtggttcaaagaaaaacggttttccttcgttcctttcggggcttatgaaagaggccgctcttgatccatcagcgcggcgcagtgaaaaactgacggaggaatgtcttacactgctcccccttcgcgaccttgtgctgttccccaatacggttgtcccggtttttattaccggacagcccggtatgtccgcccttgcccaggccctcaggcgcgacaaccgcctttttgccgtctgccagaaaaagcaggatggatctcaaccgagcccgaagggcgtcgaaccggaggttcgcggttcccctcttgacccgcttgacgaggaaaccagaaaccgggacagggtgcgtttgctgctggcgcgctgggggattctctgccgtccgctcctggagaaagcttccggaagttcggcttccaaaagcgaaccttcgcctttttcatggtcggggcttttaccaactatgcgccgtatggaactttcaggcgagcttgtcgcgggccgtttcttcgtgggaatcaattccctgcaatttgcttcgcccgctattgcgcgtgagcttgaaaatgccggggctgtcgatggcatatactggatgaatgccgctgatccggcaagccctgcgggacttgatatagaagggctggatcctcgccttcctgaccggttgccgtccagccgcatatatttccggggagcgcggcttatcgccgtgtcaaaccgaaacggcaaagaacagcatgtcttcattgcccccgatgatcccgacattcccgccttgatcgatctcattaaaataccccgcacaagaaaagtccttcccgacaataaaatagttgttgataatattaacaacaaaacagcgggacagagcgaatatgcgcgggtttttcaggactgcgggtttgtctcggacagagggcggttgtgcttgtggtag

SEQ ID NO: 49024 - protein, 316 aa, Unknown
  Obtained from environmental sample
  misc_feature (1)..(316): Xaa is any amino acid
MKQGGGSKKNGFPSFLSGLMKEAALDPSARRSEKLTEECLTLLPLRDLVLFPNTVVPVFITGQPGMSALAQALRRDNRLFAVCQKKQDGSQPSPKGVEPEVRGSPLDPLDEETRNRDRVRLLLARWGILCRPLLEKASGSSASKSEPSPFSWSGLLPTMRRMELSGELVAGRFFVGINSLQFASPAIARELENAGAVDGIYWMNAADPASPAGLDIEGLDPRLPDRLPSSRIYFRGARLIAVSNRNGKEQHVFIAPDDPDIPALIDLIKIPRTRKVLPDNKIVVDNINNKTAGQSEYARVFQDCGFVSDRGRLCLW

SEQ ID NO: 49025 - DNA, 411 bp, Unknown
  Obtained from environmental sample
  misc_feature (1)..(411): n is a, c, g, or t
atgaaagagctgtatgacgctctgcatcccgatgatcttatccattacggcatgatccctgaattcataggcaggcttccgattaccgtaagccttgatgaacttaaacgggatgatctcaagaggatcatcaccgagccgaacaacgctatagtaaaacaataccaggcctccctcgcttatgacgacgtaaagctggaatttacagaagaggccatagacgccatagcggatacggcaatcaagcagaaaaccggcgcccgcggcctgcgcgccatcgtggaaaaattgatgatcgatataatgttcgagataccgtcgctgaagggccacaaacaggtgattatcaccgaggacgtggtcaagaatttacagacgccaataatccaccagctccaaaaaagcgcgtaa

SEQ ID NO: 49026 - protein, 136 aa, Unknown
  Obtained from environmental sample
  misc_feature (1)..(136): Xaa is any amino acid
MKELYDALHPDDLIHYGMIPEFIGRLPITVSLDELKRDDLKRIITEPNNAIVKQYQASLAYDDVKLEFTEEAIDAIADTAIKQKTGARGLRAIVEKLMIDIMFEIPSLKGHKQVIITEDVVKNLQTPIIHQLQKSA

SEQ ID NO: 49027 - DNA, 678 bp, Unknown
  Obtained from environmental sample
  misc_feature (1)..(678): n is a, c, g, or t
ttgacttgtattgtacttcaagcccgtcttgattcatcccgtctgccggaaaaatcaatgcttcccatagacggaatgccgcttatctttcgcgtaatggaagctcttaactttgttccagccgatttacgcattctagcctgctcgcaggactcgctttcatcatttaagcccctggcaaaacaggcgggctttgaaattttcgcgggacccaaagacgacgttcttgagcgttactgtcaggttatacgccaatataagattaagcgcgtaataagagcgacgggagacaatccctttgtttttacagacgccgccgccgcgataaacgccgaagcgctggcgcttaacgccgattacgccggtttctcggggcttccttacggcgcgggagttgaatcggtttcggcttccgctcttattcgcgccggaagcgaagcgtcctcgctatctgagcgagaacatgtctgcccatatttgtacgcacatcctgaaattttcagccttcaccgcccatacgctccgcttcgctggcaggggccgaatcttcggcttaccgtagatacgcgggaagatttcgatagcgcccttgttttatacgatgccttaaaaaacgagtctcttcgttattacggatttacgataatcaaaaaatacggggagatatttaataaatga

SEQ ID NO: 49028 - protein, 225 aa, Unknown
  Obtained from environmental sample
  DOMAIN (3)...(215): Cytidylyltransferase
  misc_feature (1)..(225): Xaa is any amino acid
MTCIVLQARLDSSRLPEKSMLPIDGMPLIFRVMEALNFVPADLRILACSQDSLSSFKPLAKQAGFEIFAGPKDDVLERYCQVIRQYKIKRVIRATGDNPFVFTDAAAAINAEALALNADYAGFSGLPYGAGVESVSASALIRAGSEASSLSEREHVCPYLYAHPEIFSLHRPYAPLRWQGPNLRLTVDTREDFDSALVLYDALKNESLRYYGFTIIKKYGEIFNK

SEQ ID NO: 49029 - DNA, 1623 bp, Unknown
  Obtained from environmental sample
  misc_feature (1)..(1623): n is a, c, g, or t
atgagactggaacagcaagaactgatctccgagctgtcaagaggatttatttcgtccggcgactctaaaacatgggtaaaggaagctgttgccaaattgggacgctaccataaggtgtcattagtgtttgttttttctattgattatgaacataaaggcactcatctggcgtatcattggacagacgatgagttgccgccgagaaaggcaatagccaatctgtatgattatttaataaaaattttccctgtaacgctgcccgactgcgccacgataccgataatctcttccgatgatacctctaataaccccgaggatgtttttcaggcgttatattctattaatgtcatggcggttatcggcgcaccgctttatgttgacggacgcttatggggcgtagtatgcgtagaacagtgtaataaaccgcgcaagtggacggacaatgaaaaaggatttgtcgccgtgacggcaagcacaatcgccggcgtaatcatgcgcgacatatataccataaaactaaaagaggctctgaataaggcgatggaagcaagcaaggcaaagagcgagttcctttccaacatgagccacgaaatgcgcacgcctctgaacgcgataaccggcatgacgacaatcggcaaaaacgcgaaagatgtggaacgcaaagactacgcgctggacaagattcaggacgcgtcaacgcatctgctcggcgttattaacgatgtgcttgatatgtcaaaaatcgaagctaatatgctggaattgtctcctgttgaatttaattttgaaaagatgctgcaaaaagtagtcgcggtaatcaatttccgcgtgnaagaaaagcggcaaaaacttgtagttcgcattaacaataaaattcctaaaaccctgatagccgatgaccagcggttggcgcaggtagttgccaacctccttagcaacgcggttaaattcacgcccgaagaaggctccataaccctgaacgcggatctcatgggggaaaaaaacaattcttgtaccatacaggtttcagtaagcgacacggggattggaataaccgaagaacaacaaaaacgcctgttcagttcttttcaacaagccgaaagcagcacgacgcgcaaatacggcggtacgggattggggcttgcgatttccaaaagcatagtggagatgatggacggccatatttgggtacaatcagaaccaggagaaggatcaacttttacctttaccattcaagcgacgcgcggcgtggataacaatcaaaaaagtttgtcggatgtcaatttaaacaatgtccgtattatggcggtagatgatgacccggatatactgacgtatttccatgatataacgcagatgtacggcataacatgcgaaaccgccataagcggggaaaaagcgcttgaactcatagacaaaaaaggcgggtaccatatctattttatagactggaaaatgcccgttatggacggaatagaactaacccgtgaaataaaggagcgtaatcctgaagattccgtcgtgataatggtttcctcggtcgaatggagtacgatttcagaagaggcgaaagctgcgggcgttgataaattcctgtccaagccattgttccttccgccatga

SEQ ID NO: 49030 - protein, 540 aa, Unknown
  Obtained from environmental sample
  DOMAIN (21)...(164): GAF domain
  misc_feature (1)..(540): Xaa is any amino acid
MRLEQQELISELSRGFISSGDSKTWVKEAVAKLGRYHKVSLVFVFSIDYEHKGTHLAYHWTDDELPPRKAIANLYDYLIKIFPVTLPDCATIPIISSDDTSNNPEDVFQALYSINVMAVIGAPLYVDGRLWGVVCVEQCNKPRKWTDNEKGFVAVTASTIAGVIMRDIYTIKLKEALNKAMEASKAKSEFLSNMSHEMRTPLNAITGMTTIGKNAKDVERKDYALDKIQDASTHLLGVINDVLDMSKIEANMLELSPVEFNFEKMLQKVVAVINFRVXEKRQKLVVRINNKIPKTLIADDQRLAQVVANLLSNAVKFTPEEGSITLNADLMGEKNNSCTIQVSVSDTGIGITEEQQKRLFSSFQQAESSTTRKYGGTGLGLAISKSIVEMMDGHIWVQSEPGEGSTFTFTIQATRGVDNNQKSLSDVNLNNVRIMAVDDDPDILTYFHDITQMYGITCETAISGEKALELIDKKGGYHIYFIDWKMPVMDGIELTREIKERNPEDSVVIMVSSVEWSTISEEAKAAGVDKFLSKPLFLPP

SEQ ID NO: 49031 - DNA, 975 bp, Unknown
  Obtained from environmental sample
  misc_feature (1)..(975): n is a, c, g, or t
atgatgtactcaaatcaatataaacagccaatgaaaacgttttctgttacctccataactcaaataactaaagataataaaaagctcttttctgaccttacagaagaccgtgaccatacaaacccggatatgaaatataccgtcgtcgcgccggccgcggttgttaaaattattctttttctcgcaggtgaatgtatcggctttgcggataatacaactgccggattgtttcaaaggaatatccctgatttcagccgcgtcattaaagggcttggctgcgccattctccttatctttacaggcgctttcgctctgctcgaatatgtcgtctgtttcttggaatttatgctcgtcgcttccgtcggtataatcctcttccctctttctatttgggaagcaagcaaatttatggcggaaaaatttatcggcgctattgtcggtttctttatgaaacttctcttttgtaatatcgctatcttcctccttatttacgggtttatttctctcttctatattatctcggcaggaaacgacggcggacaacctgttggatttaccggcaatactgaccaaattatctttatcgtttttaccagcatgctttactactttatctgtaagtccgcgccgggcgtcgctcagtctctccttactggttccccaagcctcaatgccgcaggcgctatcggcgccgccgcaggcatggttagcgctgccacggccgcggccggctttgtccaaaataaggtcaactccgcaaagtctaccgcaggctctgtcgtcggcggcatcgctaaaatgggacacgggttagctgaagcaaatgccgcaggaaaagctgccggtgaagacggcggcagccgcgcgaatcaggcgggcgcttttatgcgcagccttggcaaacaggcctcgcaaagccttgcccgcagcatatacggagataagagcgaaggcaaaacaatggggcggaattaa

SEQ ID NO: 49032 - protein, 324 aa, Unknown
  Obtained from environmental sample
  misc_feature (1)..(324): Xaa is any amino acid
MMYSNQYKQPMKTFSVTSITQITKDNKKLFSDLTEDRDHTNPDMKYTVVAPAAVVKIILFLAGECIGFADNTTAGLFQRNIPDFSRVIKGLGCAILLIFTGAFALLEYVVCFLEFMLVASVGIILFPLSIWEASKFMAEKFIGAIVGFFMKLLFCNIAIFLLIYGFISLFYIISAGNDGGQPVGFTGNTDQIIFIVFTSMLYYFICKSAPGVAQSLLTGSPSLNAAGAIGAAAGMVSAATAAAGFVQNKVNSAKSTAGSVVGGIAKMGHGLAEANAAGKAAGEDGGSRANQAGAFMRSLGKQASQSLARSIYGDKSEGKTMGRN

SEQ ID NO: 49033 - DNA, 486 bp, Unknown
  Obtained from environmental sample
  misc_feature (1)..(486): n is a, c, g, or t
gtggatcaggatcggccgagggtgcataaagacggttcccctctggaagagcacaacttccaagcacacgatgtttggactggaattcaatattgcctagcaaccgcaatgtatatgcacgggatgaaacgcgaagccgaagatttaatagaggcgagtttccgcaatttgtacaaagaggcaaaaatcccctttgcagccccagaaggcttcaacggaagctgccgtttgcatcttagtaaaatcatcacaaaatctctgtacagcgatttgaaaaagaaaggtgctttgcaagaagacggcagaatttcccctgatttgccgagagattggaaaaagtttgaaagggtgtttaagagtatatgctcaaagcataaaattaaatgcaatgagttgtttattcttttgcataatactgctttgaaatatactgctgggaagtatttgaggcctggcatggtgtttgcggtggctagggtgatgtag

SEQ ID NO: 49034 - protein, 161 aa, Unknown
  Obtained from environmental sample
  misc_feature (1)..(161): Xaa is any amino acid
MDQDRPRVHKDGSPLEEHNFQAHDVWTGIQYCLATAMYMHGMKREAEDLIEASFRNLYKEAKIPFAAPEGFNGSCRLHLSKIITKSLYSDLKKKGALQEDGRISPDLPRDWKKFERVFKSICSKHKIKCNELFILLHNTALKYTAGKYLRPGMVFAVARVM

SEQ ID NO: 49035 - DNA, 369 bp, Unknown
  Obtained from environmental sample
  misc_feature (1)..(369): n is a, c, g, or t
ttgagatttatctttaggtggcaggaaaacttggatttcagcggtcaaacaccagtgggaacttccccaagagacggttcgcccgtctatgaggtattaacggcttttgtctctcaaagttttgtagagggaaaaaacaccggaatccgtgtagccaaaagcattttaggcaaaaccctaaacgcagagcacgttaaatccatgctcagtggcgaaaaaaccgaactgataaagggttttcgctcatcaaaaacccgccgcctttttgatgcttttttgaaaatggataagaatgggaagattgggtttgagtttccgcctatgaaggcgaaagcgaggaaatttgctaagaaaaagcaggaagagtaa

SEQ ID NO: 49036 - protein, 122 aa, Unknown
  Obtained from environmental sample
  misc_feature (1)..(122): Xaa is any amino acid
MRFIFRWQENLDFSGQTPVGTSPRDGSPVYEVLTAFVSQSFVEGKNTGIRVAKSILGKTLNAEHVKSMLSGEKTELIKGFRSSKTRRLFDAFLKMDKNGKIGFEFPPMKAKARKFAKKKQEE

SEQ ID NO: 49037 - DNA, 2268 bp, Unknown
  Obtained from environmental sample
  misc_feature (1)..(2268): n is a, c, g, or t
gtgcgctgggactctgatgacgtggatgccatagccctcaacaccgaccgcaaaagctacgcgccgggcgaaacggcgaaaataatgatacgctcgccgctggaaaagggcaaatatctgttaacgctggaacgcgaggggatcatctcccaaaaaatcattgagcttaacggctccgccctgactatagatatacccatagaggaatcttatgtgccggtaatctacgccgcgattagttcctatacagtacgttccggcccgccgaataacacctactacgaacctgacctggacaaacccagggggattttcggcgttacgccgatttatattgacaatgaaagccgtcattaccaaattgagattgataccggcaggaacgcctaccgcgccgcggaagaggcgcaggtaaagataaaagttttactgaacggcaagccggccgcgaatacggaagtaagttttctggccgttgaccgcggggtgctcgacctcattgactatcatgttcccgatccgctcgcctctttttacgatccgcagcattttcccctgggagtgcggggcgcggacagccgttcccttctgatcgatccggtgacatacaacatttccgatctccagggcggcgacagtgacaatgaggagaagggaagggatggggcggatcgtttcaacggcgatatgaaagaacgcaaggattggaggccgacggcggtttttgaaccgtaccttgtcaccggcccggacggcactgtcaccgtaaaattcaagctgcccgattcgcttaccagttaccgctgtaccgcagtcgcggtcggcgttaacaactttggcattaaggaacgggatctgcgggtaagcgccccgctgacggcaattgccgcgctgccgcgcaaactccgctggcgggacaccggcacggtctcgctcatactgacgaatcttgagaacaccgcggtagaggccggcgtaacgctcgcctcatccgccgagtcgggggcggaaaccattatcgaagttgacggcgcggattcaaaaaccgtaaagattcttcccggcgcgtcgcaagaagtctctttcaaagtcgccgccgtcggcgtcggcgtcgcccggctttcctttaccctgcgctcgccgcaggtgaacgagcgtatcctcaaaacgcttattgtagacaggcccagcctgcttgagactgtcaccacaatcggcaatctggacagggataatccttttgtcgaggaaggcatgatactgccctcgcttgttcccgagggaacgggcaatgtttccgtaagcctttcggcttcccggctggcgacgcttaaagaagctgtttcgctattgctggattacccctatggctgcattgaacagcgaacggcccgcctgctgcctattgtcgcccttggcgagtacctgnacacattcgatctggaaagcccgcttgccgcttttggcgaacaccttgacacattcgatctcgcgagcccgacgcgaggtttctccccctgggaccccaaaaaacttgttgaaaaagaattggcggacctcgccaaattccaactggctgacggctcattcccctattggccgggcggcagtaccggcaatctctttgtcagcacaaggatggcgcatatcgcggcgctggcaaaggcgaaaaaaatcaatgttccggactctctggatacccggaaacttttatcgtatatcggaactgcctcaagcgaggctaaattaaaagacccgtttctcaagggttattcattgtgggtcagaaccatgtacaaggaaagaatcggctcggaaataacagcctttttaaggcgcggggatgaactgggaatttcaggctgggcgttcgccggccttgccgcgctggaaatagatcagaaggatacagccgcgtccgccagggatcgcgtgcgccgctttatccgcccgggaacccgcagtctcgacctgaccgatacctacgagcggcagggcaattactggggttacgattccgaccgctacgccctcgcgcttatgctcttcaattcgcttgattcccagtccgcgcgggaaggggatgatatgacaacgcgccttgccacatccctcattgagcggcagcgcaggggcgtgtggaacaacaccgcgtcctctttctgggcggcgctcgcctttggaatgttaggcgacgcggaatcgtccgaatggaaatcggctaacggcgcctcgcttgacgtgactcgtgccgctcggccgatctga

SEQ ID NO: 49038 - protein, 755 aa, Unknown
  Obtained from environmental sample
  DOMAIN (7)...(169): Alpha-2-macroglobulin family N-terminal region
  misc_feature (1)..(755): Xaa is any amino acid
MRWDSDDVDAIALNTDRKSYAPGETAKIMIRSPLEKGKYLLTLEREGIISQKIIELNGSALTIDIPIEESYVPVIYAAISSYTVRSGPPNNTYYEPDLDKPRGIFGVTPIYIDNESRHYQIEIDTGRNAYRAAEEAQVKIKVLLNGKPAANTEVSFLAVDRGVLDLIDYHVPDPLASFYDPQHFPLGVRGADSRSLLIDPVTYNISDLQGGDSDNEEKGRDGADRFNGDMKERKDWRPTAVFEPYLVTGPDGTVTVKFKLPDSLTSYRCTAVAVGVNNFGIKERDLRVSAPLTAIAALPRKLRWRDTGTVSLILTNLENTAVEAGVTLASSAESGAETIIEVDGADSKTVKILPGASQEVSFKVAAVGVGVARLSFTLRSPQVNERILKTLIVDRPSLLETVTTIGNLDRDNPFVEEGMILPSLVPEGTGNVSVSLSASRLATLKEAVSLLLDYPYGCIEQRTARLLPIVALGEYLXTFDLESPLAAFGEHLDTFDLASPTRGFSPWDPKKLVEKELADLAKFQLADGSFPYWPGGSTGNLFVSTRMAHIAALAKAKKINVPDSLDTRKLLSYIGTASSEAKLKDPFLKGYSLWVRTMYKERIGSEITAFLRRGDELGISGWAFAGLAALEIDQKDTAASARDRVRRFIRPGTRSLDLTDTYERQGNYWGYDSDRYALALMLFNSLDSQSAREGDDMTTRLATSLIERQRRGVWNNTASSFWAALAFGMLGDAESSEWKSANGASLDVTRAARPI

SEQ ID NO: 49039 - DNA, 1656 bp, Unknown
  Obtained from environmental sample
  misc_feature (1)..(1656): n is a, c, g, or t
ttgcttaatgatataatcatagaaaacaacaggttaggcgaaatttccgaacgcattatcgtaattgtcctgcttatcgccataattgtaagcgttcttttagcgttaattattacatcaaccattaccaaaccaattgtaaaagtagcggatgttcttaaaattgtggcggaaggcgatctaacgcgcagcgtgaatgttgaatcaaaagatgaaataggcgatcttgcccatgactttaactctacaatgggaaaaatcagaaaccttgtaagttcaattaaatacaaaattaacggtcttaaccataccagttttgaactgtccgtcaatatgggcaaaacatccacggcggtagaacaaattacgtcgaatcttgacaacatgaagaacaccatgatcaagcaggaagacggcgcggaagaagcgggcaaagcggtagaaattataaaagaaaatattgacagtctaaaaaaaataatacaagaacaaactgaaagcgtagaccgttcttcttcagccattgaagaaatgacagctaacattaattcggtaaccagaacgttagttgaaaacagcaaanatgtcactgttttaaccgaagcttcggaaaacgggaagacaggccttcagactgtcgcgcaggaaatacaggaaatagcccatgattcagaagggcttctggaaataaactcggtaatggaaaatatagccagccagaccaatttgctttcgatgaacgcggcaattgaagcggcccacgccggagaagcaggcaggggctttgccgtcgttgccgaagaaatccgcaagctcgcggaatcatcgggggatcagtcaaaaactacgacgactatgctgaaaaaaataaaaacgtccatagacaatattacaaaatcctccaacgaagtattgaaccgtttcggcttaatagatgaaagcgtaaaaacggtttccgtacatgagcaaaatattcttcatgctatggaagaacaggaagtcggcggaaagcagatactggactccataagcaggctgcgggacattacattctctgtaaaaaaaggctccgatgacatggaggaatcgggagaaactctggttcaggaaacgaatgaatttattaaaaccagtaaagaaacagtggataacatgaacgagatactggtaggcattaatcagataaatttatccgtcggccatgtcaacgaaatgagcacggaaaacaaccgtaattttgattccttaaaacaagaaacggaaaattttaacactacctcaggcaaagaaaagcaaaaaattcttgtagtggacgacgacactatgcaccttgaaatggtagaaatggtattgcagaacggttatgaagtatcatgctcaaaatcaggcaaagaagcgctgggtttgttctatcagggtctggttccacatttaatactattggacttagtaatgcctggaatagacggatgggatacatacagcagaataaaagcgataagcggcttgcacgataccccgatagcgttcttcacggcttcaagcgatccgaaagacatgcagcacgcccgtgaaatgggggcggttgattacatcaaaaagccctatgataaagacgatctgttaagaaggataggaagaataatcaaaaaatag

SEQ ID NO: 49040 - protein, 551 aa, Unknown
  Obtained from environmental sample
  DOMAIN (162)...(376): Methyl-accepting chemotaxis protein (MCP) signaling domain
  misc_feature (1)..(551): Xaa is any amino acid
MLNDIIIENNRLGEISERIIVIVLLIAIIVSVLLALIITSTITKPIVKVADVLKIVAEGDLTRSVNVESKDEIGDLAHDFNSTMGKIRNLVSSIKYKINGLNHTSFELSVNMGKTSTAVEQITSNLDNMKNTMIKQEDGAEEAGKAVEIIKENIDSLKKIIQEQTESVDRSSSAIEEMTANINSVTRTLVENSKXVTVLTEASENGKTGLQTVAQEIQEIAHDSEGLLEINSVMENIASQTNLLSMNAAIEAAHAGEAGRGFAVVAEEIRKLAESSGDQSKTTTTMLKKIKTSIDNITKSSNEVLNRFGLIDESVKTVSVHEQNILHAMEEQEVGGKQILDSISRLRDITFSVKKGSDDMEESGETLVQETNEFIKTSKETVDNMNEILVGINQINLSVGHVNEMSTENNRNFDSLKQETENFNTTSGKEKQKILVVDDDTMHLEMVEMVLQNGYEVSCSKSGKEALGLFYQGLVPHLILLDLVMPGIDGWDTYSRIKAISGLHDTPIAFFTASSDPKDMQHAREMGAVDYIKKPYDKDDLLRRIGRIIKK

SEQ ID NO: 49041 - DNA, 771 bp, Unknown
  Obtained from environmental sample
  misc_feature (1)..(771): n is a, c, g, or t
ttgtttgtaaggcccaaccttgataaaagcacgggaatgggaaggataggcgtctacttttggacagacgccgtaattgacgatatagtccccggcagcgacgcggccatcgccgggctgttgccgggcgatcgcataacaagcgtgaacggaacgcccgttatcaataccattgattttttgaaggcgctggaaaccggctccgccggctctgccggcgccgggacagcggcaatcgattatgcgcgtaacggcgttgagggtacgacggaaattgtcctttcagaatccggcggaaacgatctgggcattatatggcccagaataacatacagaaccccgccgctttcgccgcccgccgccgtggcaaagggagtgtcggaaagctggaagacgctggttatttcgctgcggagcctttcccttctttttaagggcataaaacttaccgaggctgtttccggcccggtacgcatcacctatatggtaggcgatattgccacggaaggttttgggcgcagtttcgtgacgggcctccgttctctggcagatttcctcgcattgatctcaatcgccctctgcgtaatgaatctgcttcccctgcctgttctggacgggggcatgatcgttctggctgtcgtggaatggatacggcgaaagccgatccatccaaaggcgataagggtatttcagactgtgggcgtggctcttatttcagggctgatgatcttcgccctgtttggagatataatgtacctgacgcatagatag

SEQ ID NO: 49042 - protein, 256 aa, Unknown
  Obtained from environmental sample
  DOMAIN (35)...(249): Peptidase family M50
  misc_feature (1)..(256): Xaa is any amino acid
MFVRPNLDKSTGMGRIGVYFWTDAVIDDIVPGSDAAIAGLLPGDRITSVNGTPVINTIDFLKALETGSAGSAGAGTAAIDYARNGVEGTTEIVLSESGGNDLGIIWPRITYRTPPLSPPAAVAKGVSESWKTLVISLRSLSLLFKGIKLTEAVSGPVRITYMVGDIATEGFGRSFVTGLRSLADFLALISIALCVMNLLPLPVLDGGMIVLAVVEWIRRKPIHPKAIRVFQTVGVALISGLMIFALFGDIMYLTHR

SEQ ID NO: 49043 - DNA, 828 bp, Unknown
  Obtained from environmental sample
  misc_feature (1)..(828): n is a, c, g, or t
ttgaaattatccgaaaataacggtttcaaactcagcctctttatcctgatcctggcggggctttcgcctctgtgtgcgtttgagacagcgccgcgcgggcacaggggatctgtcagcgccgttttccaaaaaggcgataacataatcagcgccggtgaagacggtttcctgggaatatggagctcaactaccgcggcggctatagaccgtttccaggtcagccagcgccaaatcatcgcgatggcgggaaggcctgaaagggacgaagcctgcgtggttgaaaacgacgggctgggtttgtactgggtttcagtctggaattacagggaacggcggaaaattttcactttgcaattcatggatcccatcggtcatatttcctactcggcagggggaaaatatattatcgccgccagaacaggcagaaccgcccttgtcataattgacgccaattcaggcgctatactgcaatcgccgcagtcgctgacaggaatcatcggccttgtcgttaccggcagatcggaacggaccatgatggtctacaccatgtcaggtgaaatttcatattgggatattgaaacaggaaacatgacaagtacttttaacgccccgttgaatatgcaatcaacaacgctttttagcaacaaccgttatctcgcgggggttaacgcgctggggctgacggtggttcacgccgcttcgggagagacactggggagggacgcttccatccccaacggctcgctgctttgcgccgatggcgatgatttaatctgtctggttcaaaaaaaacaacgcggcggcggaactgtaccgttttacaattga

SEQ ID NO: 49044 - protein, 275 aa, Unknown
  Obtained from environmental sample
  SIGNAL (1)...(26)
  misc_feature (1)..(275): Xaa is any amino acid
MKLSENNGFKLSLFILILAGLSPLCAFETAPRGHRGSVSAVFQKGDNIISAGEDGFLGIWSSTTAAAIDRFQVSQRQIIAMAGRPERDEACVVENDGLGLYWVSVWNYRERRKIFTLQFMDPIGHISYSAGGKYIIAARTGRTALVIIDANSGAILQSPQSLTGIIGLVVTGRSERTMMVYTMSGEISYWDIETGNMTSTFNAPLNMQSTTLFSNNRYLAGVNALGLTVVHAASGETLGRDASIPNGSLLCADGDDLICLVQKKQRGGGTVPFYN

SEQ ID NO: 49045 - DNA, 801 bp, Unknown
  Obtained from environmental sample
  misc_feature (1)..(801): n is a, c, g, or t
atggaagaccttatggttcttcatttttccatgcctaaaaaggatctgcgcaatatcatcggaactgttttagtaatgctcttgctttatttattatttgttgttttatgcggacgtattattatcggaaaaaaattaaacaacagcgagcgttacctgctggcttctattacgggtttttacattataggatcggtattgctgttcaatttcctgcccggtcagaataatattccgatatcgcttcttgtgcctaccgctctctttgtaatgttacttgcggtatttatgggaacgcgtccagccattattatggcgcttgccctgccgttagcttcctacttttcaggcgggtttgacaattattcatacatcttcgcgttaatatccggaatagcggcttcaactgttcttcacaacgcaaaagacaggatgagtttgattaaggccggcgttcttatcgcggcggcaaactcaaccgcgattgttgttatactgcttttgcagaaagcgagcatatacgactatcccgcaatgattttcggggctgtactgaacggtatcgtctccggtatgcttacactcggctttttaccgccgcttgaacacgcgcttaacgcggtaacgccgttccggttgatggaattggcggatcttaacgccccgatttttgcgcaaactttttacggcggctccgggaacttacagccactcgcttatgggtgccaacctcgcagagcaagcgtgtcaggacatcggagccaatgctatgcttgcgcgtgtcggcgcgtattaccatga

SEQ ID NO: 49046 - protein, 266 aa, Unknown
  Obtained from environmental sample
  DOMAIN (17)...(209): 7TM receptor with intracellular HD hydrolase
  misc_feature (1)..(266): Xaa is any amino acid
MEDLMVLHFSMPKKDLRNIIGTVLVMLLLYLLFVVLCGRIIIGKKLNNSERYLLASITGFYIIGSVLLFNFLPGQNNIPISLLVPTALFVMLLAVFMGTRPAIIMALALPLASYFSGGFDNYSYIFALISGIAASTVLHNAKDRMSLIKAGVLIAAANSTAIVVILLLQKASIYDYPAMIFGAVLNGIVSGMLTLGFLPPLEHALNAVTPFRLMELADLNAPIFAQTFYGGSGNLQPLAYGCQPRRASVSGHRSQCYACACRRVLP

SEQ ID NO: 49047 - DNA, 663 bp, Unknown
  Obtained from environmental sample
  misc_feature (1)..(663): n is a, c, g, or t
ttgcgcaaactttttacggcggctccgggaacttacagccactcgcttatgggtgccaacctcgcagagcaagcgtgtcaggacatcggagccaatgctatgcttgcgcgtgtcggcgcgtattaccatgacataggaaaaatagataatcctgtttattttatagaaaaccaaacggaacataacaggcatgatgaaattgccccccgtctttcggcgacggtaatccgcagccatgtaaaacttggcgttgaaaaagcgctcagcctgggtcttccaaaggatgtcattaacattattgccgaacaccacggaaactctgtcatatcatggttctacaacaaggcggcggaacaggaagttgacgtaagctccgaagatttttgctatccgggacctcctccgcgtacaagggaatccgccgtagtaatgcttgccgacataaccgaagccgcggtacggacgctggacaaaccttcggcggctaaaattgataaatttgtacaacagctttttgacaataaaattgagcatggacagcttgcgaattcggatctttctttccgtgagcttgaaataattaaaaaagcgtttgtaaaggtacttgcgggctactatcattcaaggatcgaatacccaaaacaaaaagaggaagcgcaatga

SEQ ID NO: 49048 - protein, 220 aa, Unknown
  Obtained from environmental sample
  SIGNAL (1)...(18)
  DOMAIN (11)...(152): HD domain
  misc_feature (1)..(220): Xaa is any amino acid
MRKLFTAAPGTYSHSLMGANLAEQACQDIGANAMLARVGAYYHDIGKIDNPVYFIENQTEHNRHDEIAPRLSATVIRSHVKLGVEKALSLGLPKDVINIIAEHHGNSVISWFYNKAAEQEVDVSSEDFCYPGPPPRTRESAVVMLADITEAAVRTLDKPSAAKIDKFVQQLFDNKIEHGQLANSDLSFRELEIIKKAFVKVLAGYYHSRIEYPKQKEEAQ

SEQ ID NO: 49049 - DNA, 663 bp, Unknown
  Obtained from environmental sample
  misc_feature (1)..(663): n is a, c, g, or t
atgctggataaactaagtgcggatcagaatcttaactttaccagcgtggactccttcagccttacctatgttgcgcttaatacgcaacgcgctcccatgaacgatataaatgtacgcaaagcaatttcacgggcaatggacatccccgaattccaaaaacgcattattaagaatgcgggaaaagcgggaacaattctgcctttcggtcaggctctctacggtgataacgccgccaaatggcagcagtatttaagcaatactcagggttacacttacgatttagcagtcgcaaaacaacatcttgcaagatcggcgtatcccaacggttttaactgtgacttgattgtaagtgaaaattcccttgcaaatcaaagagcgttgtatattcaggaatcactcaaggcgcttaacatcaatgtgaatatcaagagaatgtcaggcgatgaacaggatacctaccagatgggaggcgttctggacgctaacggtaaacgcgactacgatatgctcattggcggatgggaagcggattatcccgatcttaacgcaatatcgagatcatgttcgccggaagtcaggccggtgaagacggctacaatgccgccggcttatataattcctgtagttgacgctattgatgaaaaacagaaggactactattga

SEQ ID NO: 49050 - protein, 220 aa, Unknown
  Obtained from environmental sample
  misc_feature (1)..(220): Xaa is any amino acid
MLDKLSADQNLNFTSVDSFSLTYVALNTQRAPMNDINVRKAISRAMDIPEFQKRIIKNAGKAGTILPFGQALYGDNAAKWQQYLSNTQGYTYDLAVAKQHLARSAYPNGFNCDLIVSENSLANQRALYIQESLKALNINVNIKRMSGDEQDTYQMGGVLDANGKRDYDMLIGGWEADYPDLNAISRSCSPEVRPVKTATMPPAYIIPVVDAIDEKQKDYY

SEQ ID NO: 49051 - DNA, 591 bp, Unknown
  Obtained from environmental sample
  misc_feature (1)..(591): n is a, c, g, or t
atgcgcttacaccggcctaccgcgttcctttccgtaaatgagccgaattatacatcgtgtctggttcttgccgataaagaagaaacaggctcttttgggattagcggaatgaaatcggcttttttccccggttttatcaacgaacttattgaagccgcgggagaaaccgctaccgggagcgaagttttttcaaattcattttgcgtttccgctgatgttaatacctgttggtatcctctatataaagaagtttttgacgaacatggagaggcaaaactaaaccatggcatcgtacttttccgttgttggggagaaaagggaaaagaaaacacaaacgacgctgatacccaaactgtcgcggctcttataaaaatcctggaagaagctgatataatttggcagacaggagaagggggaaaggttgatgccggaaccagcgggactttatcgcggtttttcacaacccttgacattcccaccgttgatctcggcgtgccgctcctttcaatgcactccccgtttgaaggagccgcaaaagccgatatttatatggcatatctggcttttacggctttctttaaaagacgctaa

SEQ ID NO: 49052 - protein, 196 aa, Unknown
  Obtained from environmental sample
  DOMAIN (2)...(193): Aminopeptidase I zinc metalloprotease (M18)
  misc_feature (1)..(196): Xaa is any amino acid
MRLHRPTAFLSVNEPNYTSCLVLADKEETGSFGISGMKSAFFPGFINELIEAAGETATGSEVFSNSFCVSADVNTCWYPLYKEVFDEHGEAKLNHGIVLFRCWGEKGKENTNDADTQTVAALIKILEEADIIWQTGEGGKVDAGTSGTLSRFFTTLDIPTVDLGVPLLSMHSPFEGAAKADIYMAYLAFTAFFKRR

SEQ ID NO: 49053 - DNA, 909 bp, Unknown
  Obtained from environmental sample
  misc_feature (1)..(909): n is a, c, g, or t
atgggtgtcagtcaccgtaaagagacttttagcgggcgttttngatataatcatggcgaggtaaacactatggactccagcataaaagacaaacttcttttttcccgtaaggacgcttctgtttttttgacgcgggaggaaattaaagcggcggatgagtattgtaaggcgtatatctcttttcttaatgccgcgaaaacggaaagggaagcggtaagcgccgctgtggccctggcggagaaagaaggttttattccctggaagaaaggcatgaacataaaaagcggcgataaggtttatttcagccgccggggcaaggccgtggttttctgtaccatcgggaagaaaagttttacccagggcatttccattgttgccgctcatatcgactctccgcggctggatcttaaaatgcagcccctctatgaagattccggtatggctttttttgatacccattattatggaggcatcaagccctatcagtggacgggtattccgcttgctctgcacggttttattgtctgtgcggacgggcaggagcttgccatacgcatcggcgaagagcctgatgacccgcgtttttttattgccgatcttcttcctcatctttcggaagaacagatgaaaaaatccgtgaaggatgcggttccggcggagaatcttgatattgttgccggacttaattccgcgccgggcgaaagcggcgcagaggcggtaaaacttaacatactccgcctgttatacgaaaaatacggcattaccgaaaaagattttgtgtcagctgaaatttccgcggttccggcgttccccgcttcggaactgggacttgaccggagcatggtaggagcctatggtcaggatgataaagcatgcgcttacaccggcctaccgcgttcctttccgtaa

SEQ ID NO: 49054 - protein, 302 aa, Unknown
  Obtained from environmental sample
  DOMAIN (61)...(301): Aminopeptidase I zinc metalloprotease (M18)
  misc_feature (1)..(302): Xaa is any amino acid
MGVSHRKETFSGRFXYNHGEVNTMDSSIKDKLLFSRKDASVFLTREEIKAADEYCKAYISFLNAAKTEREAVSAAVALAEKEGFIPWKKGMNIKSGDKVYFSRRGKAVVFCTIGKKSFTQGISIVAAHIDSPRLDLKMQPLYEDSGMAFFDTHYYGGIKPYQWTGIPLALHGFIVCADGQELAIRIGEEPDDPRFFIADLLPHLSEEQMKKSVKDAVPAENLDIVAGLNSAPGESGAEAVKLNILRLLYEKYGITEKDFVSAEISAVPAFPASELGLDRSMVGAYGQDDKACAYTGLPRSFP

SEQ ID NO: 49055 - DNA, 576 bp, Unknown
  Obtained from environmental sample
  misc_feature (1)..(576): n is a, c, g, or t
atggcttcgcaagaaagacatccgcaagctgatgagagctttggaagcgatgggcgcgagcacgccggaacagtacaacaatcaacctttaaccggcgaaccaatcgcctaggagacacaatggcaaaaacagacaaagacggatgctggctggacgcgagaggcaaagccacgcccgttgaatacataaacaggctcgacattgagaaagagcagcttgtggaaggcaaaatccacaaagccatcaagctgagcaaacagcttatggaattcaagcaggagtgcgccagcggcatagacacctacttgaagaacatggcaaaggcgaacaaggtaagggagaactggaagggaaacatagccctgagaagctttgacgaaagcatggtcatagaacgctcaatgagcgaccggatagagttcagggagggcttgcagcttgcgaaagcgcagatagatgtgtggctcaaaaaccgccttgggtcccttgacttgaatttgtcaaaaatcgtttcgcaggctttcaatgttgacaaagcgcggacggataaacaccgcaatggtgcttcaaactga

SEQ ID NO: 49056 - protein, 191 aa, Unknown
  Obtained from environmental sample
  misc_feature (1)..(191): Xaa is any amino acid
MASQERHPQADESFGSDGREHAGTVQQSTFNRRTNRLGDTMAKTDKDGCWLDARGKATPVEYINRLDIEKEQLVEGKIHKAIKLSKQLMEFKQECASGIDTYLKNMAKANKVRENWKGNIALRSFDESMVIERSMSDRIEFREGLQLAKAQIDVWLKNRLGSLDLNLSKIVSQAFNVDKARTDKHRNGASN

SEQ ID NO: 49057 - DNA, 414 bp, Unknown
  Obtained from environmental sample
  misc_feature (1)..(414): n is a, c, g, or t
gtgctgggtatgggcgacacgcaatacagggatatgttgcacgacctttacggcaagcggtcaagcaaggaactgacccctgtccagcaaacagagcttatgaaaatactcggcaaacaggtgggggcagcaaacagcaagcggaacgaatttaaaagccgccatcccgcttgggcaacgaataggcagcttcacgccatagaagcgatgtggaaaaaagtaagccgcgccgagactgacgaaagcagaaaattggctttgctcgctttctgcaaacgcataaccggatgcgagcttcttgaatggcttcgcaagaaagacatccgcaagctgatgagagctttggaagcgatgggcgcgagcacgccggaacagtacaacaatcaacctttaaccggcgaaccaatcgcctag

SEQ ID NO: 49058 - protein, 137 aa, Unknown
  Obtained from environmental sample
  DOMAIN (2)...(120): Protein of unknown function (DUF1018)
  misc_feature (1)..(137): Xaa is any amino acid
MLGMGDTQYRDMLHDLYGKRSSKELTPVQQTELMKILGKQVGAANSKRNEFKSRHPAWATNRQLHAIEAMWKKVSRAETDESRKLALLAFCKRITGCELLEWLRKKDIRKLMRALEAMGASTPEQYNNQPLTGEPIA

SEQ ID NO: 49059 - DNA, 687 bp, Unknown
  Obtained from environmental sample
  misc_feature (1)..(687): n is a, c, g, or t
atgaatgaattcttaaaaaaattgttggccaaagccgccggtttctgggcggattggacttttcggcaaaaggggctttttatagccgttattgccgccgtaatcgtgggcattgtcatgctcttcagggtttcggcgacgcctgttttggcgcctgtctttacaattccaatcagggatgaaacgcttcgtgacagaatcgttgtcaggctgaatgaagagggagtaaaccctacagtaactcctgacggcgttatacaggttgcggatcccgcgacagcgaaacgaatgaaggctatattgatcagggaagatcttgttccccccaatataagcccttggcagatatttgacacggaaagctggacaattaccgattttgagcgcaatgtaaaactccaacggtcccttacaaatacgattgttgatcatatcaaggctgttgacggtattgataatgtcaaagtcagtattgtgtggcccaaagaggaacttttcatttcaatgcaaaatccggtaaccgcaagcgtaaccatcattcccaagccgggaagcgatattactcaaaacagaaaaaaaattgaaggtatacaaaaaactcttaaattcgcgatagaaggcttggatgatgatcatatcgtaataaccgataatacgggtcttcagcttaacgatttgacggaatga

SEQ ID NO: 49060 - protein, 228 aa, Unknown
  Obtained from environmental sample
  DOMAIN (19)...(226): Secretory protein of YscJ/FliF family
  misc_feature (1)..(228): Xaa is any amino acid
MNEFLKKLLAKAAGFWADWTFRQKGLFIAVIAAVIVGIVMLFRVSATPVLAPVFTIPIRDETLRDRIVVRLNEEGVNPTVTPDGVIQVADPATAKRMKAILIREDLVPPNISPWQIFDTESWTITDFERNVKLQRSLTNTIVDHIKAVDGIDNVKVSIVWPKEELFISMQNPVTASVTIIPKPGSDITQNRKKIEGIQKTLKFAIEGLDDDHIVITDNTGLQLNDLTE

SEQ ID NO: 49061 - DNA, 396 bp, Unknown
  Obtained from environmental sample
  misc_feature (1)..(396): n is a, c, g, or t
atggaaatattcagtaacaacgcttatatcagcgcggccggagccaaaaattacgctacgcagatgaaccgtactcattctaaacacatgctgccgccggacagcccgtatttcggcagcggaaaaaaagtactcgcgcttgagaaaaaaattgacgcggggcacgtgacaagggccggcacttttgaacaggctatgctgcaggcgctggacaaagtttcaggggcggatcagtttacaaaacagcttgaaaaacaggcgatcatcgacccggattcggttgatattcatgatataacaatcgcgcaggccgaagccggtatggcgcttaacattacaaggaatgttttaagccgtctggttcagggctggagagatttaattaatacaagataa

SEQ ID NO: 49062 - protein, 131 aa, Unknown
  Obtained from environmental sample
  misc_feature (1)..(131): Xaa is any amino acid
MEIFSNNAYISAAGAKNYATQMNRTHSKHMLPPDSPYFGSGKKVLALEKKIDAGHVTRAGTFEQAMLQALDKVSGADQFTKQLEKQAIIDPDSVDIHDITIAQAEAGMALNITRNVLSRLVQGWRDLINTR

SEQ ID NO: 49063 - DNA, 462 bp, Unknown
  Obtained from environmental sample
  misc_feature (1)..(462): n is a, c, g, or t
atgggattatttaattcgataaatacggcggctacaggcttaagcgctgacagggtaaggctggacgtaatagcggataatatggcgaatgtgaataccacgagaaccaacgaaggcggtcctttcaggcgcagccgcgtcatcatgcgcccgagagtggacagcccctactggcgctctccgtttcttccggaatccatggataacggaatcgggcgcggagtgcgggtctcggaaattcaaaaggattattcaacggaaaaccgcctggtctgggatcctacccaccccgacgcgataaaatccggcgaccggcaaggttatgttgaaatgccgaacgtggatgttgtaaccgaaatggtggacatgatttccgcctcgcgctcttacgaggcgaacgcggcgataatagaaggttcaaaggcgatgtttttgcgcgctttggacataggttcaagatag

SEQ ID NO: 49064 - protein, 153 aa, Unknown
  Obtained from environmental sample
  DOMAIN (7)...(37): Flagella basal body rod protein
  misc_feature (1)..(153): Xaa is any amino acid
MGLFNSINTAATGLSADRVRLDVIADNMANVNTTRTNEGGPFRRSRVIMRPRVDSPYWRSPFLPESMDNGIGRGVRVSEIQKDYSTENRLVWDPTHPDAIKSGDRQGYVEMPNVDVVTEMVDMISASRSYEANAAIIEGSKAMFLRALDIGSR

SEQ ID NO: 49065 - DNA, 789 bp, Unknown
  Obtained from environmental sample
  misc_feature (1)..(789): n is a, c, g, or t
atggctgagcagtcgctttccgagaaagaagaattccttacccggcaattaattacatatattggcagtaaacgcgctttattaaactttattggggaaggaattaacaaggttcaacagagattgcaaaaagataaattgagaatgttcgatgtgttcagcgggtcgggtattgtcgctaggttttttaaacagttttccgagttgcttattgttaatgatttagaaaaatactctgcactgattaatgaatgttatttatctaatgaaagtgaattagacttaaatttgttgcgtgaacattacaaagaaattatcgaagaaacaaacaaaaatttagtaaaagggattatttccgaattgtacgctccaagcgatgataaaaatataatgccaaacgaacgtgttttttataccgcgcgaaacgcaatgtatattgataccgcaaggcaattaatcgggaaaatgccgcaagaaatgcaaaaatattttttggctcctttgttgtcggaggcgtcgatacacgcaaatacttcgggagtttttaaggggttttataaaaataaagaaactgggattggacaattcggcgggaagaaccaagacgcgctgttcagaataacaggcgatatcgaattgccgtttcccatattcagtaattttaattgcgatacgcttgtctataaccaagattcanatgaattgataaaatcgttgccggaagttgatattgcctatttagacccgccttataatcaacacccttacgggtcaattattttatgttga

SEQ ID NO: 49066 - protein, 262 aa, Unknown
  Obtained from environmental sample
  misc_feature (1)..(262): Xaa is any amino acid
MAEQSLSEKEEFLTRQLITYIGSKRALLNFIGEGINKVQQRLQKDKLRMFDVFSGSGIVARFFKQFSELLIVNDLEKYSALINECYLSNESELDLNLLREHYKEIIEETNKNLVKGIISELYAPSDDKNIMPNERVFYTARNAMYIDTARQLIGKMPQEMQKYFLAPLLSEASIHANTSGVFKGFYKNKETGIGQFGGKNQDALFRITGDIELPFPIFSNFNCDTLVYNQDSXELIKSLPEVDIAYLDPPYNQHPYGSIILC

SEQ ID NO: 49067 - DNA, 330 bp, Unknown
  Obtained from environmental sample
  misc_feature (1)..(330): n is a, c, g, or t
atgttgaatttaatactggactattcctatcttgaaaaatacagcaaggtttcaggcataccggaagattggaaacgctctgattacaacaaaggacatcgcgctttaaaagcgttaacttcccttgttgaaaatataaaggcgaaatatgtgataatatcatttaattccgaaggatttataagcgccgaaaatatgaaagatatgttatcaaaaataggcgcgcttgaagtattggaaacaaagtataatactttcagaggaagcagaaatttgaataaccgcgaaattcatgttaaagaatatttatacttactggagaaacgatga

SEQ ID NO: 49068 - protein, 109 aa, Unknown
  Obtained from environmental sample
  misc_feature (1)..(109): Xaa is any amino acid
MLNLILDYSYLEKYSKVSGIPEDWKRSDYNKGHRALKALTSLVENIKAKYVIISFNSEGFISAENMKDMLSKIGALEVLETKYNTFRGSRNLNNREIHVKEYLYLLEKR

SEQ ID NO: 49069 - DNA, 441 bp, Unknown
  Obtained from environmental sample
  misc_feature (1)..(441): n is a, c, g, or t
gtgaatgactctccggtggttataaaagatggcgttctaatcatggatattaaccagatgattccggcgcagtttaaaacccagggcataaagatggatgtaaaagggacggcgttggagctgccaaccgatctaaaacccggccaggcgctcaaaccttccgagataaccatgtcgatggactttggcattatgaagatggataccgtgataaagtccgtagggaaatgcctggccattgaaaatgtaaaagttccggccggaacttttacatgccacaaaattactcaaacaactactaccaccaccatgggcgtcaacgaggttcagacaaccattgagtggtatgcgcccaatattggccaggttaaaactgaaacctatgacgacaagaacaagctggtttccagttcggaattggtggagttaaaaggcaagtga

SEQ ID NO: 49070 - protein, 146 aa, Unknown
  Obtained from environmental sample
  misc_feature (1)..(146): Xaa is any amino acid
MNDSPVVIKDGVLIMDINQMIPAQFKTQGIKMDVKGTALELPTDLKPGQALKPSEITMSMDFGIMKMDTVIKSVGKCLAIENVKVPAGTFTCHKITQTTTTTTMGVNEVQTTIEWYAPNIGQVKTETYDDKNKLVSSSELVELKGK

SEQ ID NO: 49071 - DNA, 948 bp, Unknown
  Obtained from environmental sample
  misc_feature (1)..(948): n is a, c, g, or t
atgacagatcgccgaggacgggacagggagcgttttaccctggacgtgggcctagcgagggcggtaagggaagtgtttgtgaccttgtacgagcgtgaccttttgtacaagggaaattacctggtaaactggtgcccctcctgcggcactgccctcgccgacgacgaggttgaccatgaggacacgccgggtaaaatgtaccacctgcgctactactttgcaaacgccgggggagactccgccaggaaaaccgcgattaacggtgaagcgccttcgtgcgcatccggaggcgcgcacgctggcgcctgtgttgagcttgccaccacacggcccgagacgctgttaggcgacactgccgtggcggttcaccccgaagacgagcgttacgcggggctgaaaggtaaaaccctaagattgccgcttgcagggcgcgatattcccgttgtgtttgacgcctacgttgaccgtgcctttggaaccggcgttgtgaagatcaccccggcccatgatcccaacgactgggaagtggcaaaacggcacgggcttccgctaatcaacatactcaaccccgacggaaccttaaataacgaagttccggaaaaatacaggggccttagcgtaaagaaagcccgggacgcagtacttgaagacctgaaggccggcggctggtatataaaggaagaaaatataacccacgcggtggggcattgctaccgctgcaaaacaataatagaacccttcctttcagaacagtggtttgtcagaatgaggcccctcgcggataaagccctggccagctggcggcgcggggaacttatcttctacccccgcaaatgggagcacacataccagcactggcttgaaaacatccgcgactggtgtataagccgccactgtggtgggggcatagaatccccgcgtggacttgcgcggactgcggcaaaatga

SEQ ID NO: 49072 - protein, 315 aa, Unknown
  Obtained from environmental sample
  DOMAIN (1)...(315): tRNA synthetases class I (I, L, M and V)
  misc_feature (1)..(315): Xaa is any amino acid
MTDRRGRDRERFTLDVGLARAVREVFVTLYERDLLYKGNYLVNWCPSCGTALADDEVDHEDTPGKMYHLRYYFANAGGDSARKTAINGEAPSCASGGAHAGACVELATTRPETLLGDTAVAVHPEDERYAGLKGKTLRLPLAGRDIPVVFDAYVDRAFGTGVVKITPAHDPNDWEVAKRHGLPLINILNPDGTLNNEVPEKYRGLSVKKARDAVLEDLKAGGWYIKEENITHAVGHCYRCKTIIEPFLSEQWFVRMRPLADKALASWRRGELIFYPRKWEHTYQHWLENIRDWCISRHCGGGIESPRGLARTAAK

SEQ ID NO: 49073 - DNA, 1437 bp, Unknown
  Obtained from environmental sample
  misc_feature (1)..(1437): n is a, c, g, or t
gtgtataagccgccactgtggtgggggcatagaatccccgcgtggacttgcgcggactgcggcaaaatgacagtttcacgtaacgatatcgatacttgcccgcattgcaagagtaaaaaaatagaacaagaccccgacgttcttgacacttggttttcaagctggctttggcccttcagcacattgggctgggaaaactcaaattgtaacaccgacgacttcaaaaaatactacccgacaacggcgcttataaccgcttatgacatcatctttttctgggtatcaagaatgataatggcggggcttgagttcacgggcaaagcgccgttccgcgacatttacattcacgggcttgtgcgcgacaaacagggacgcaaaatgagcaagtctctgggcaacggacttgatccgttggaacttgtggacgagttcggcgcggacgctatgaagtttacgctaagctttatgtgcgcccagggacaggatattcttgtagacaaagaatcttttaagatggggacaaaattcgcgaacaaggtgtggaacgcgagcagatatattttgatgaatcttgacggtcgtactttacaggaaaaccccgcgttaacccccgctgacaaatggatatattcgcgtttaaacggcgcggcaaaggcaatgagggaagcgtttctttcctaccgttacaacgacgcggcgcagacagcctacgagtttttttggaacgattactgcgactggtatgttgaagcgacaaaactttccatgaaagacggcgacaatgccgagaaagatcgcactacgacagtgttattagacatactttcccaatccctgcgtctgctccaccctctcctgcccctttgtaacggaggaaattaccagaaattaccgcgcacagacacgatgtcgcccttgcttatcaatgccgaatatcctgattacgatgaaaagcgcaatgatccgctgcaagagaaaaattttgccggtatgcagtctctggttggcatggtgcgcactctgcgaagcgaatgtggcataacgcctgaaaagaaactgcgcgcgcttgtccgcaccgtagagcactcgcaaacattcaatcaaaatgagggattaataaaactgctggccggaatcggggatttacagattgaagggacaaaagaaggccgcccctcaggctctatcgggatggctggaacaggttttgaagtttttgtctttgtcgccgaggccgtagatacccaggcgttaaagaaaaaactttctggcgaccttgaaagagaccttaaatatatcgaagggttacgcgcaaaacttgcaaacgaacagtttgtcaaaaacgcgccgcctgcgcttgttgacgagcaaaaaagcaaacttgaggaaacgcttctgcgtaccgagaaactcaggttttacctgaaggacctgtaa

SEQ ID NO: 49074 - protein, 478 aa, Unknown
  Obtained from environmental sample
  DOMAIN (1)...(166): tRNA synthetases class I (I, L, M and V)
  misc_feature (1)..(478): Xaa is any amino acid
MYKPPLWWGHRIPAWTCADCGKMTVSRNDIDTCPHCKSKKIEQDPDVLDTWFSSWLWPFSTLGWENSNCNTDDFKKYYPTTALITAYDIIFFWVSRMIMAGLEFTGKAPFRDIYIHGLVRDKQGRKMSKSLGNGLDPLELVDEFGADAMKFTLSFMCAQGQDILVDKESFKMGTKFANKVWNASRYILMNLDGRTLQENPALTPADKWIYSRLNGAAKAMREAFLSYRYNDAAQTAYEFFWNDYCDWYVEATKLSMKDGDNAEKDRTTTVLLDILSQSLRLLHPLLPLCNGGNYQKLPRTDTMSPLLINAEYPDYDEKRNDPLQEKNFAGMQSLVGMVRTLRSECGITPEKKLRALVRTVEHSQTFNQNEGLIKLLAGIGDLQIEGTKEGRPSGSIGMAGTGFEVFVFVAEAVDTQALKKKLSGDLERDLKYIEGLRAKLANEQFVKNAPPALVDEQKSKLEETLLRTEKLRFYLKDL

SEQ ID NO: 49075 - DNA, 588 bp, Unknown
  Obtained from environmental sample
  misc_feature (1)..(588): n is a, c, g, or t
gtggtctgggcggcgtggctgtgccgtgtgccggccgtcgtccacgagtcggacatcacgcccggactggccaaccgcctctctatgccgttcgtcaagaagatatgtttcagcttccctgagaccgagtctcatctgcccgcctccaaacgtgtaatgacgggtctgccggtacgcgaagaactcttcggcggcgacgccgctatgggtcgggagctttgcggatttaccgacggcaaaccggtcgtcgccgtgataggcggcagcttgggggcgagcgcagtgaacgaggccgtaaggggcgggcttaataaattgctcgtcgatttcaacgtctgccatatatgcggcaagggcaacaaggcgccgggagggcggtctggatactgccaattcgagtacgtcggggcggagctgccggatctgttcgcgatggccgacgtagtaatatcgcgggcgggagcaacaacgctgtttgagctgttggcgttatgcaaacccgccttgttgataccgctcggaaccgcggccagccggggagatcagatattgaacgcggaatcttttgaaaagcntgggatactgtaa

SEQ ID NO: 49076 - protein, 195 aa, Unknown
  Obtained from environmental sample
  DOMAIN (82)...(195): Glycosyltransferase family 28 C-terminal domain
  misc_feature (1)..(195): Xaa is any amino acid
MVWAAWLCRVPAVVHESDITPGLANRLSMPFVKKICFSFPETESHLPASKRVMTGLPVREELFGGDAAMGRELCGFTDGKPVVAVIGGSLGASAVNEAVRGGLNKLLVDFNVCHICGKGNKAPGGRSGYCQFEYVGAELPDLFAMADVVISRAGATTLFELLALCKPALLIPLGTAASRGDQILNAESFEKXGIL

SEQ ID NO: 49077 - DNA, 537 bp, Unknown
  Obtained from environmental sample
  misc_feature (1)..(537): n is a, c, g, or t
ttgggcccccggaaaccgtacttcaacgcgatcacccccgccgcgatgttgcctatcatcttaggcaccataaacggcgaaaaacgcggcgcgccgctcgacgtcgcaaacttgaaaagctcctcctgcaatgtgttaatcccccctatcccagaggcgaagatcacggctcggcggaaggggtcgccggagtccgcctcaagccctgcgtcgccgaaggcctgcgcggcggcggcggcggcgtactgcgtgtacaagtccatcccccgcgcctccttgggttcgaagtatgcggcggggtcgaaccccttaacctcgcaggcgaagcgcgtcttgaactgcgagcagtcgaaccgcgtaatgggcgcggcggcggatacgccggacagaagcgccgcccaagagtcggagacgctgttgcccatcggggagaccatgccgaggccggtcaccaccgccctctcaaagcctcgttcgttagtgccgttcggcggattcatcgtcgttttctccggttatctgaatcaatggttttaa

SEQ ID NO: 49078 - protein, 178 aa, Unknown
  Obtained from environmental sample
  misc_feature (1)..(178): Xaa is any amino acid
MGPRKPYFNAITPAAMLPIILGTINGEKRGAPLDVANLKSSSCNVLIPPIPEAKITARRKGSPESASSPASPKACAAAAAAYCVYKSIPRASLGSKYAAGSNPLTSQAKRVLNCEQSNRVMGAAADTPDRSAAQESETLLPIGETMPRPVTTALSKPRSLVPFGGFIVVFSGYLNQWF

SEQ ID NO: 49079 - DNA, 1017 bp, Unknown
  Obtained from environmental sample
  misc_feature (1)..(1017): n is a, c, g, or t
atgaatccgccgaacggcactaacgaacgaggctttgagagggcggtggtgaccggcctcggcatggtctccccgatgggcaacagcgtctccgactcttgggcggcgcttctgtccggcgtatccgccgccgcgcccattacgcggttcgactgctcgcagttcaagacgcgcttcgcctgcgaggttaaggggttcgaccccgccgcatacttcgaacccaaggaggcgcgggggatggacttgtacacgcagtacgccgccgccgccgccgcgcaggccttcggcgacgcagggcttgaggcggactccggcgaccccttccgccgagccgtgatcttcgcctctgggataggggggattaacacattgcaggaggagcttttcaagtttgcgacgtcgagcggcgcgccgcgtttttcgccgtttatggtgcctaagatgataggcaacatcgcggcgggggtgatcgcgttgaagtacggtttccgggggcccaactacggcacggtgagcgcctgcgcctcgtcgtcccatgccttgatcgacgcattgaacctcatcagattgcgtaaggccgacgtggtgatagccggcggctcggaagctccgataaacgtgacgggcgtgggcgggttcggcgcgatgcgagcgttgtcaacaaagaacgacgatccggcaacggcttcgcgcccgttcgacaaagaccgcgacggattcgtcctaggcgagggcgcggcggcgctggtcgtggagtcgcaaagccacgccaaggctaggggggcgaggatatacgctgagcttgcgggcggcggaatgaccgcggacgccttccactcgacgctcccgcatccggagggaatcgccgttgaaaaagcgatggcgttcgcgatggacgacgccgggagtgaatcccgaagagatcgactacatcaacctgcacgccacatcaacacccgcaggagaccgggccggagatcatggcccgtaggccggcttgttcaaaaatttccctga

SEQ ID NO: 49080 - protein, 338 aa, Unknown
  Obtained from environmental sample
  DOMAIN (13)...(257): Beta-ketoacyl synthase, N-terminal domain
  misc_feature (1)..(338): Xaa is any amino acid
MNPPNGTNERGFERAVVTGLGMVSPMGNSVSDSWAALLSGVSAAAPITRFDCSQFKTRFACEVKGFDPAAYFEPKEARGMDLYTQYAAAAAAQAFGDAGLEADSGDPFRRAVIFASGIGGINTLQEELFKFATSSGAPRFSPFMVPKMIGNIAAGVIALKYGFRGPNYGTVSACASSSHALIDALNLIRLRKADVVIAGGSEAPINVTGVGGFGAMRALSTKNDDPATASRPFDKDRDGFVLGEGAAALVVESQSHAKARGARIYAELAGGGMTADAFHSTLPHPEGIAVEKAMAFAMDDAGSESRRDRLHQPARHINTRRRPGRRSWPVGRLVQKFP

SEQ ID NO: 49081 - DNA, 546 bp, Unknown
  Obtained from environmental sample
  misc_feature (1)..(546): n is a, c, g, or t
ttgcagaaattacgggaaataaacggtttttcttccagccatgtgcttaaagaaggcgatgtaattaaagtgccgggaaaagcttcttccaatacgcaaacatccaatacaaataccgtggcagtaagaccgactgcgcccaactcaacaacgccgaaagtttcggcggggatttacgctttacgctggcctgtaacgccgaaagatatttcttatatgacggggcaaatgggagttgttgtagagggcgaacagcttgaatcggtgcgaagtttaacacaggggaacgtggtatccgcgggtccctggcgcaagtttggcagagttgtaattgtagaaaccagcggggggtattattacatgtacggcggctgtgaaactataactgtaaatgtaggcgacagaataacgccgggaatggaattaggaaagttaggcgtcaacgccgtttcggtaaaacctcaattgtttttcatggtttttcgaaacgataatcccatggatccggctttagctccaagagcgggaaataatcaaaggacataa

SEQ ID NO: 49082 - protein, 181 aa, Unknown
  Obtained from environmental sample
  DOMAIN (74)...(169): Peptidase family M23
  misc_feature (1)..(181): Xaa is any amino acid
MQKLREINGFSSSHVLKEGDVIKVPGKASSNTQTSNTNTVAVRPTAPNSTTPKVSAGIYALRWPVTPKDISYMTGQMGVVVEGEQLESVRSLTQGNVVSAGPWRKFGRVVIVETSGGYYYMYGGCETITVNVGDRITPGMELGKLGVNAVSVKPQLFFMVFRNDNPMDPALAPRAGNNQRT

SEQ ID NO: 49083 - DNA, 819 bp, Unknown
  Obtained from environmental sample
  misc_feature (1)..(819): n is a, c, g, or t
atgactaaccccacgaaaacatcacgcggcggcttcgtatcgatcctgctgctaatgtccgtggtactcggtataataacagcgctcgtgaccgccctgttcacaattaaatgcatagaggagcttcccgaaaaaccgtcgaaaccgccggcgcacgcgcaaacgcaggaagaagaagagaccctctccgatttgtccgtcacccccgagcctcccgaacccaaacccgaatccggcgcgttcaccgacgaccgggacgccgcctcctacaagacggcaaagatcggcggcaaaacatggatggccgagaatctgcgttatcgcgccaaaggctcttggtgttacggcgacgatagctccaactgcgccaaatacggcaggctgtacgattgggagacggcgttgacgaactgtcccgccggatggaggttgtctacgtataaggattggtgcgatttggagcaggcggcaggacgcgaaaaattgaccaataaggacggcacggtttattggggcggcgcgggcaaaaaactgaaggcgaatagcggttggaatgatttctgcggccacgacggcgatgaatcttgcaaaagcggtaacgggacggatgaatacgggttttcggccctgcccggcggcgccgccgactacgacggcggctatttcggcaatatcggcatatcaggcggctggtggacggccacggagtccggcggcgacgccttcgcccgatcggtaggctactacggcgacagcatgagcgagcgcaaaatcggcaagaacaacggcttacctgtccgctgcgtcgcggacaaataa

SEQ ID NO: 49084 - protein, 272 aa, Unknown
  Obtained from environmental sample
  SIGNAL (1)...(24)
  misc_feature (1)..(272): Xaa is any amino acid
MTNPTKTSRGGFVSILLLMSVVLGIITALVTALFTIKCIEELPEKPSKPPAHAQTQEEEETLSDLSVTPEPPEPKPESGAFTDDRDAASYKTAKIGGKTWMAENLRYRAKGSWCYGDDSSNCAKYGRLYDWETALTNCPAGWRLSTYKDWCDLEQAAGREKLTNKDGTVYWGGAGKKLKANSGWNDFCGHDGDESCKSGNGTDEYGFSALPGGAADYDGGYFGNIGISGGWWTATESGGDAFARSVGYYGDSMSERKIGKNNGLPVRCVADK

SEQ ID NO: 49085 - DNA, 876 bp, Unknown
  Obtained from environmental sample
  misc_feature (1)..(876): n is a, c, g, or t
ttgtccgcggcggctcaggaaaacggtgaggcgcctgaatcgccgtttgagtcggccgtggccgaagccctgcaaaaaagaggctggctggtgaccccccgggtgggcgcctccgcctttcgggttgacctgggcgtcgcggacccggaccagcccgggtcctacctggccggggtggaaggcgacggcctcacctatcgccgcgctgcgaccgcgagggatagggaccgtctgcgggagagcgtcctgcgcggcttgggctgggatattctgcgcctctggtcccgggactggtggctgaatgcggaagccgccgcggacaagcttcacgagcggctggccacgcttctggagaagaagcgggcggcctggaaaagcggggagcggagctccggccggccggtgccaaagccggtcgcgccgcctttggcgccggccgccccggaggaaattcccgacaacgccgcggaactcattgagcgggaacacctgcgcgcgatcgtgcaaagcgtggtggcctctacttcgcctgtccatgagaacgtattgtgcgccttggtggccaagcagctcggcttcggccgggccggcagtaaaatacgttccggcgcgctgtcaatggcggctgaattgtttgaacaatcgaaggaggatgtgggcgtctttttctggaacaagggggagtcgccggcggcctgcgccaagtttcgggagagaggcgaaaatgaggtctgcgtggtcgatgaaatcgccctgccggaactggtcgccctggcccgctcgctcaaggtgggctatggcgaagaccccatcgtggtcctgggcaggcgccctgggcataagccgccttcgcgcccgccaggcgccccaggctga

SEQ ID NO: 49086 - protein, 291 aa, Unknown
  Obtained from environmental sample
  misc_feature (1)..(291): Xaa is any amino acid
MSAAAQENGEAPESPFESAVAEALQKRGWLVTPRVGASAFRVDLGVADPDQPGSYLAGVEGDGLTYRRAATARDRDRLRESVLRGLGWDILRLWSRDWWLNAEAAADKLHERLATLLEKKRAAWKSGERSSGRPVPKPVAPPLAPAAPEEIPDNAAELIEREHLRAIVQSVVASTSPVHENVLCALVAKQLGFGRAGSKIRSGALSMAAELFEQSKEDVGVFFWNKGESPAACAKFRERGENEVCVVDEIALPELVALARSLKVGYGEDPIVVLGRRPGHKPPSRPPGAPG

SEQ ID NO: 49087 - DNA, 405 bp, Unknown
  Obtained from environmental sample
  misc_feature (1)..(405): n is a, c, g, or t
ttgacagatcggccgagcgtattaaggagtaaacaatactaccgcaccggcggcatattgataagcgaatacacccgggcaaaaatcggcgatgagtttctgctgcggcctcttgaccgtgtaagagtggtggggataaacacgccgctgcgtctttatgaactgttatcggcaaacaacggacaggcggcggacagtgaacgcagagcgatggaaatttgggagagggcgcttgatatgtatgaaaaaagcaagtttaaggaggctttgaccttgttttcttcgctggtggaaaattacccgaatgacaatgtagccaaggtttacgcgcttagatgcgaggcgtttataaaagctcccccgccgcttgattgggatgcggtaaaaaatctgacggagaaatag

SEQ ID NO: 49088 - protein, 134 aa, Unknown
  Obtained from environmental sample
  misc_feature (1)..(134): Xaa is any amino acid
MTDRPSVLRSKQYYRTGGILISEYTRAKIGDEFLLRPLDRVRVVGINTPLRLYELLSANNGQAADSERRAMEIWERALDMYEKSKFKEALTLFSSLVENYPNDNVAKVYALRCEAFIKAPPPLDWDAVKNLTEK

SEQ ID NO: 49089 - DNA, 1305 bp, Unknown
  Obtained from environmental sample
  misc_feature (1)..(1305): n is a, c, g, or t
gtgtaccgcatagcgaggatcaactggcccatcatttacaagggagttgatcccgacagcgtttcttttgtgccgttgcaatgggactcccctttaaccttgagagaaattctcaagcagcatcccaagggaaaagaatacgcctttatccttgaaaaggagccggttcatccgctgttaaccgattcgaagggcgaggtgttatcgtatccgcccatcattaattcaaatgatttgggcgcggtgcaggtaggcgacacggacatctttgttgaattgaccggcactgacatcgcccaggtaacgctggcggcttcaatcgtcgcctgcgaccttgcggataacggcttctccattgaaccggtaaaagttaaatacgaatttgacactctttttggcaggaatgttatctttccctgctattttcaacagcctgtgttttgctcccttgcgagaatcgaaaaattcctcggcgaaaaactcagtggcgatgaatgtgtgaaggcgcttaaccgcatgggcgtaaaggctgaaaagtcagacggcgcggaacgggggcagcctgccgctaaaagcggctccgagaacggcgtagaaggcgtccttgcgtatccgcccgaataccgcaacgactttcttcacgccgctgatgtcgctgaggacgtaatgataggcaggggccttggttcgttcaaaccggaacgcccgggcgatcccaccgtgggccgcctcagccccatcactttgttcagccgtcaggtaaaggaaatttttatcggcatgggctatcaggagatgatatacaactacctcggctcgcgaaaagaccttgtcgaaaaaatgcgcggcgccggggatcgcataatccgcatcgccaaccccatgaccgaaaattacgagtatgtccgggattcggtaatcgcgtccctcatggaaagcgagtctgtttcgggcaattcgatatacccgcatagaatcttcgaaataggcaaaatcgcgtatcttgacagcgcggacaactccggcactgtaacccgccagtatgcgggcttccttcactccgacaaagaggtgaacttcaacaccgccgcgggccagatacagactctcttctactatctctcccttgaatacgaaatcgtagaatccgatgacccgcgctttattcccgggcgcgccgccgcggtcctgtacaaaggccgtaaaataggcgtattcggcgagatacaccccgaagttctggaaaactggggcataaccatgccttgtaccgcgggggagtttgatttggatatgttaatttaa

SEQ ID NO: 49090 - protein, 434 aa, Unknown
  Obtained from environmental sample
  DOMAIN (219)...(434): tRNA synthetases class II core domain (F)
  misc_feature (1)..(434): Xaa is any amino acid
MYRIARINWPIIYKGVDPDSVSFVPLQWDSPLTLREILKQHPKGKEYAFILEKEPVHPLLTDSKGEVLSYPPIINSNDLGAVQVGDTDIFVELTGTDIAQVTLAASIVACDLADNGFSIEPVKVKYEFDTLFGRNVIFPCYFQQPVFCSLARIEKFLGEKLSGDECVKALNRMGVKAEKSDGAERGQPAAKSGSENGVEGVLAYPPEYRNDFLHAADVAEDVMIGRGLGSFKPERPGDPTVGRLSPITLFSRQVKEIFIGMGYQEMIYNYLGSRKDLVEKMRGAGDRIIRIANPMTENYEYVRDSVIASLMESESVSGNSIYPHRIFEIGKIAYLDSADNSGTVTRQYAGFLHSDKEVNFNTAAGQIQTLFYYLSLEYEIVESDDPRFIPGRAAAVLYKGRKIGVFGEIHPEVLENWGITMPCTAGEFDLDMLI

SEQ ID NO: 49091 - DNA, 507 bp, Unknown
  Obtained from environmental sample
  misc_feature (1)..(507): n is a, c, g, or t
atgcctaaaatagaagtaaacgaagaagtttttcacgaactcatcggcaagcgctggtcaaatagagacgaattcgaggaagcccttacatgtgccaaagcggaattggacgaggacagcgacaaaagcctgcccgcccatgagcgcgttcttaaaatcgagcttaacgacaccaaccgccccgacctctggggaacagcgggctgcgccagacagctcagaatatatcaggacggtnagattcctgaatacccgtttttctcccggcccggcgttccaaagcaagcgggatacgaggtgcatgttgaaaaaagcgttcaacaggtacggccttacctgacggggtttgtcgcgcatggcaagacaatttccgatccagcgttacgcgatatgatacagacccaggagaaactcgcctggaaatttcggcgtaaacggcgctccatctcaatggggtgtgtaccgcatagcgaggatcaactggcccatcatttacaagggagttga

SEQ ID NO: 49092 - protein, 168 aa, Unknown
  Obtained from environmental sample
  misc_feature (1)..(168): Xaa is any amino acid
MPKIEVNEEVFHELIGKRWSNRDEFEEALTCAKAELDEDSDKSLPAHERVLKIELNDTNRPDLWGTAGCARQLRIYQDGXIPEYPFFSRPGVPKQAGYEVHVEKSVQQVRPYLTGFVAHGKTISDPALRDMIQTQEKLAWKFRRKRRSISMGCVPHSEDQLAHHLQGS

SEQ ID NO: 49093 - DNA, 420 bp, Unknown
  Obtained from environmental sample
  misc_feature (1)..(420): n is a, c, g, or t
gtggacgccacccacctgcctgatttctaccagaccgagggcatagtgttaggcgaaagcgtaaacctacgcaccctgttgggaatgttggatatgtttgcccgcgaggttgccggcgcgaaagaggtaaaatacgtccccggctatttcccttttacagagccttcggtggaggtgcacataaaacatccggtgcttggctggttcgagctgggaggttccggcattttccgtcccgaggtgacgcagagccttggtgtggacgttccggtcgcggcctggggcatcggcattgatcgcatggcgcttatggcgctcggccttaatgatctgcgggatctgttcagcggcaacattgaagacgtgcgtctgcgccgtcttactgaagtaaacaaaatcaaggaaaaagcaaatgcctaa

SEQ ID NO: 49094 - protein, 139 aa, Unknown
  Obtained from environmental sample
  DOMAIN (1)...(125): tRNA synthetases class II core domain (F)
  misc_feature (1)..(139): Xaa is any amino acid
MDATHLPDFYQTEGIVLGESVNLRTLLGMLDMFAREVAGAKEVKYVPGYFPFTEPSVEVHIKHPVLGWFELGGSGIFRPEVTQSLGVDVPVAAWGIGIDRMALMALGLNDLRDLFSGNIEDVRLRRLTEVNKIKEKANA

SEQ ID NO: 49095 - DNA, 570 bp, Unknown
  Obtained from environmental sample
  misc_feature (1)..(570): n is a, c, g, or t
atgctcgagggtttttgcgtcaatccgtccggggacgatgcccgaaaagtggtggaggtctgccagcagggcatggagatcgtggggagcctttttgaaaagggcgagtactttgtcggagacttgatctttgccggtgaactcctcacgtcgtccattgacaaactcaagcccctgctgggttccggcaacacaaaggaacgcggcgtcatagtgctggggacggttgaaggggatatccatgatataggtaaaaacatcttcaagggaatggctgaagccgcgggcttcagggtggttgatatcgggatagacaaggcccctgccgtttttgtagaagcggtcaaggaaaacaagccaaagatagtcgggttttcaggggtgctgactctttcaatagattccatgaaacgaacggtggaagccttgaaggaagccggcgtgagggatgccgttaagatcatcataggcgggaacgcggtcaactccgaagcctgcagttatgcgggcgcggacgcgtggagcaggaatgccgcggaagcggtaaagacctgcggttcatggctataa

SEQ ID NO: 49096 - protein, 189 aa, Unknown
  Obtained from environmental sample
  DOMAIN (69)...(188): B12 binding domain
  misc_feature (1)..(189): Xaa is any amino acid
MLEGFCVNPSGDDARKVVEVCQQGMEIVGSLFEKGEYFVGDLIFAGELLTSSIDKLKPLLGSGNTKERGVIVLGTVEGDIHDIGKNIFKGMAEAAGFRVVDIGIDKAPAVFVEAVKENKPKIVGFSGVLTLSIDSMKRTVEALKEAGVRDAVKIIIGGNAVNSEACSYAGADAWSRNAAEAVKTCGSWL

SEQ ID NO: 49097 - DNA, 603 bp, Unknown
  Obtained from environmental sample
  misc_feature (1)..(603): n is a, c, g, or t
atggtaacgattattctgccgaacggtaatatccgcaagatcaccattgatggcaataccagtctgctcaaagccctgcagaatgaaggcatctatattccggcaatatgcggcggcaggggcacatgcggcaagtgtaaattcaggctgtccggcggttctctgccgattaccggatcggacagcgcctttttcacccgggaggaactacaggccggttggcggctttcctgctttacctttcccgccggggatattaccgttgaaatacccgaaaccggggaagatcacttttccgcggtggacagttttgaaaagcagggacagtcccgtctgttgttatgtgaattcaccccccggaaaacagccctgagctttgccaggcagattgaacctgacagacgactcatctattcggaactgctggaagcctcaaagacagccgatcccgccgaagaagcagagtttagtgtttaccgtgaccggggcaggattattcgtattggcggcaaaaatgagaccgtttacgctgcggcagttgatatcgggaaccaccacccttggttttgcccttgtggatctgaggacgggggaaatcattag

SEQ ID NO: 49098 - protein, 200 aa, Unknown
  Obtained from environmental sample
  DOMAIN (5)...(84): 2Fe-2S iron-sulfur cluster binding domain
  misc_feature (1)..(200): Xaa is any amino acid
MVTIILPNGNIRKITIDGNTSLLKALQNEGIYIPAICGGRGTCGKCKFRLSGGSLPITGSDSAFFTREELQAGWRLSCFTFPAGDITVEIPETGEDHFSAVDSFEKQGQSRLLLCEFTPRKTALSFARQIEPDRRLIYSELLEASKTADPAEEAEFSVYRDRGRIIRIGGKNETVYAAAVDIGNHHPWFCPCGSEDGGNH

SEQ ID NO: 49099 - DNA, 636 bp, Unknown
  Obtained from environmental sample
  misc_feature (1)..(636): n is a, c, g, or t
atgctgacactgaaaactttcaaaaaattcggattgaaagccgatccattttcgggcgatgtggtaaaaaccgaagacgtgtacctgacggaggacacccggtttatcgcggaatatattttgcaaacggcgaaggccgggggcatgatcgcgctgataggcgaaagcgggagcggcaaaaccacgatacgccgttacgcgctggaccgcatggcggccgggaacgagaagatccgggtaatcacgttacgctgcgttgacaagacgcggctttcgacaaacgccatctgcgacgccattatcggcgactgctccgcggagatgcccaggcggacaatggaagccaaggcgcggcaggtggaaaggatactgacgcattccagccgcgccggatggagccacgtcctgatgatcgaggaagcccacgatctgaacgtcagcaccctcaaatacctgaagcggttttgggagcttgaggacggctacaaaaaactgctgtccatcgttttgatcgggcagatcgaaatgaaggcgaagcttgacgaggcaaaaaactgggaagcgcgggaagtcatccggcgcatggaagtcctggaactggagcctctgggcggcggcgagaaatctcggccataa

SEQ ID NO: 49100 - protein, 211 aa, Unknown
  Obtained from environmental sample
  misc_feature (1)..(211): Xaa is any amino acid
MLTLKTFKKFGLKADPFSGDVVKTEDVYLTEDTRFIAEYILQTAKAGGMIALIGESGSGKTTIRRYALDRMAAGNEKIRVITLRCVDKTRLSTNAICDAIIGDCSAEMPRRTMEAKARQVERILTHSSRAGWSHVLMIEEAHDLNVSTLKYLKRFWELEDGYKKLLSIVLIGQIEMKAKLDEAKNWEAREVIRRMEVLELEPLGGGEKSRP

SEQ ID NO: 49101 - DNA, 765 bp, Unknown
  Obtained from environmental sample
  misc_feature (1)..(765): n is a, c, g, or t
ttgagcaaattttgtggctttttcctcataggcttcgctctatactttatttccaatctcagggacaaagcctttgccacctccattggccataaagccgaattatatttaactggctggattggagtacccgtgcatgaaatgggtcatgcggttttttgctttattttcaggcacaaaattgtagaagcaaagtttttttcgccaacagaagatggaacaatgggctacgtaaagcacgaattcaacccaaaaagctcttatcaaaaaattggcaatttctttataggcatagctccaatgctgtttggcacggtagttatttacgctctacttggaattttgctccctgactatttgccagaagaattaagcggtagcatagcacaaacaggcctagaaattttcaggaattttttcagtttcagcaattttagcgatttgcgtttttggatatttatctatttctcgcttgggatagccagccatatgaaattgagtgttcaagattttaaaggtgcaactagcggctttgtaactttgcttgccctgattttcctcataaatttaattgccaatgcgtttttggatttcgggttgaaaagtatgtcggtttcgcaatggttcgcaacaaaaataaatgtgttactcgctctgttttattcaataatgctttacgcccttgtactgtcggttttgtatttgctgttttcttatgtggtacgttgggttacagaacttgtaaggtccaagcgtacgccttaa

SEQ ID NO: 49102 - protein, 254 aa, Unknown
  Obtained from environmental sample
  misc_feature (1)..(254): Xaa is any amino acid
MSKFCGFFLIGFALYFISNLRDKAFATSIGHKAELYLTGWIGVPVHEMGHAVFCFIFRHKIVEAKFFSPTEDGTMGYVKHEFNPKSSYQKIGNFFIGIAPMLFGTVVIYALLGILLPDYLPEELSGSIAQTGLEIFRNFFSFSNFSDLRFWIFIYFSLGIASHMKLSVQDFKGATSGFVTLLALIFLINLIANAFLDFGLKSMSVSQWFATKINVLLALFYSIMLYALVLSVLYLLFSYVVRWVTELVRSKRTP

SEQ ID NO: 49103 - DNA, 918 bp, Unknown
  Obtained from environmental sample
  misc_feature (1)..(918): n is a, c, g, or t
ttgcgaaacatcgccttgcaaaaattttggaatgcgcagagcaaattaaggccgcaggtgatggttatagattccattcaaacggtgtacagcgaagacttgcccggcacgcggggtagcgtttcgcaacttagggaatgtgcgttaaagctgatgatttacgcaaagacagcgggaacaatcactatgttggtggggcacgtgacaaaagatggtcaaatagctggacctagaattttggagcacatggtggacaccgttgcatattttgagggcgataaaaaggggcaatacagaattttgagaacggtcaaaaaccgctttggagcaacagatgaaataggcgtttttgaaatgacttcgcttgggcttattcccgtgcaaaacccgtccaaggtatttttgcaagaaggagagctttcccccggcagcgcggttagctgtaccatagagggcagtcgcgcaatgctgtttgaaattcaggctttggttggcaaaacaagctatgctatgccccaaagggtttccgctggagttgaggcaaaaaagctcacaattatactggctcttttggagagatttgcaaagcttcaagtgagcaattttgatgtttttgtctctgtcgcaggcggtttgaaattggacgaccctggcatagacttgcctcttgcgcttgccattgttggcaatatgcgaaacataagtttgccctctcatagcattgtcattggcgaactcggtctttctggggaaattcgccccgtaagctccctagatatgcgaattaaagaagctcaccgtctcggttttgagaaaatcgtggtgccagtgagcggaaaagtcccaattataaagggaattgagataataaagtttgctaggctggaagaggcagccaggtggctatgtccaatttga

SEQ ID NO: 49104 - protein, 305 aa, Unknown
  Obtained from environmental sample
  misc_feature (1)..(305): Xaa is any amino acid
MRNIALQKFWNAQSKLRPQVMVIDSIQTVYSEDLPGTRGSVSQLRECALKLMIYAKTAGTITMLVGHVTKDGQIAGPRILEHMVDTVAYFEGDKKGQYRILRTVKNRFGATDEIGVFEMTSLGLIPVQNPSKVFLQEGELSPGSAVSCTIEGSRAMLFEIQALVGKTSYAMPQRVSAGVEAKKLTIILALLERFAKLQVSNFDVFVSVAGGLKLDDPGIDLPLALAIVGNMRNISLPSHSIVIGELGLSGEIRPVSSLDMRIKEAHRLGFEKIVVPVSGKVPIIKGIEIIKFARLEEAARWLCPI

SEQ ID NO: 49105 - DNA, 993 bp, Unknown
  Obtained from environmental sample
  misc_feature (1)..(993): n is a, c, g, or t
atggcggcaggcgatataataaaagtaaggcttgaaagtattgcgccgggaggggacgctcttggacgtttcgacgggaaaccgctctttgtagaaggcggcgcgcctgatgaaacggtcttatgccgcggtattgaagaacacaaaacatgggcaagggcggaattactggaaattgtcgaaccttctcctgtaagggtaagcagtgtttgttcattttacggtaaatgcggcggatgcggtcttcaacatattgaatacaatgcgcagcttgcgataaaagccgctatcctgaaagattcgtttttacggattggcggttttgaattagacgggctgccgcagttggaaatagtcccttccgctccccttgaataccgtaacagaatgcagtttcactgccgcagagagaaggcaaagagcgacagcggcaggttcggattaaagggccgcggaagcggggaaataatcgccgtgacggattgccctatcgcggaaaacggcatcagaaaacttttacaggaaggaaggaatgtgcccctgccgcctgaaaaggacagatttacgattttttcccgcgacggccttttcttaagcgaaaacggaattgaaaggggaaaaatcaaacttcttgacagggatattcttcttgacgcgggtgttttttttcagagcaatatttccatgctggaaaaactgatagtaaacctgatagaaattgcgcaagcctccgatactacccttcccgccgctgatttttactgcggtgtcgggacatttacgctttttcttcttgcagaagcgggagaaacatttccaaaagcaatccttgcggaagaaaataaaaaagncggtcggccttgcaagagaaaacctaaaaggaaaaaaagcggaagttttttgcgttgcgcgatactgactgggaaaaggcggtattgcgcaataaatttaaatttggttttgctgtcgccgatccgccaagagcaggcttag

SEQ ID NO: 49106 - protein, 330 aa, Unknown
  Obtained from environmental sample
  DOMAIN (4)...(58): TRAM domain
  misc_feature (1)..(330): Xaa is any amino acid
MAAGDIIKVRLESIAPGGDALGRFDGKPLFVEGGAPDETVLCRGIEEHKTWARAELLEIVEPSPVRVSSVCSFYGKCGGCGLQHIEYNAQLAIKAAILKDSFLRIGGFELDGLPQLEIVPSAPLEYRNRMQFHCRREKAKSDSGRFGLKGRGSGEIIAVTDCPIAENGIRKLLQEGRNVPLPPEKDRFTIFSRDGLFLSENGIERGKIKLLDRDILLDAGVFFQSNISMLEKLIVNLIEIAQASDTTLPAADFYCGVGTFTLFLLAEAGETFPKAILAEENKKXGRPCKRKPKRKKSGSFLRCAILTGKRRYCAINLNLVLLSPIRQEQA

SEQ ID NO: 49107 - DNA, 1377 bp, Unknown
  Obtained from environmental sample
  misc_feature (1)..(1377): n is a, c, g, or t
ttgcgctattttcttgatcctttcggctgtgtaaaaaatcaagttgacgcggaaaacatgatgtcctgtcttaacaaggcgggatgggaaagcgcaaacgcggaagacgcggatataattatcgtgaattcatgcggttttatcgaaagcgcgaaacaggaatcaataaacgctgttattgaatggcgtaaattctatccaaataaaaaaattctccttgccggttgtcttgcccagcgttatgcgaaagaacttgccggatcattgacggaagcagacggttttttcggaatagaaaacattgcggatattacaaacgtggtttcaaaaataacaggcggcgcacaagataaatcggctaacagcgccgctgtcgaaagccgccctgttaacagcggcgataaacatgaaacaggcaagaggccgctattatccttgccgggttcggcttatgtaaaaatcagcgaaggatgcaacaactgttgttccttctgcgcaattccgctaatccggggaaagcttgtcagccgcgaaattcccgatattgtagaagaatgccgcatccttcttgagcgcggtatcgcggaattgtgcataatcgggcaagacatcggagcctttggcaaagatacttgcgccgagtcgaaactgcctgaactgctcaaggctatttcctcgctggaagggcatttttgggtgcgcctgttgtacattcaccccgatcattttccgctgcaaattcttgacattatggaaaatgatacgcgtttcctgccctactttgacattccctttcagcacgcatcagcaaaaatactttcggcaatgaatcggagaagcaacgcggaacaatatcttgcgttactcgaaactatccgcgtccgcctgccgcgcgccgttatccgttccactttcctgctcggctttcccggcgaaacagaagaagatttcgccgcgttactcgattttcagaaaaaagccaaattggactggcttggctgttttacctactcaagagaagaagacacggcggcgtattctatgaaaaagcgtgttcccgttaaaatcgcggaaaaacgcaaacanataattgaagagcggcagatcccgataacagaaaaaaatatggatcgctttgttggtcaaaattntgatgtgttagttgaagagcaaattgccgcagacgaaaccaacgccaattcatcacaagacagtgagactctttggctgggacggctgtactgtcaagcgcctgatattgacggtgcgacggtgattatgaagagtgaggtaagcaaaataaatccgcaagtgggaaattttactaaatgcaaagttaccgcacgacatgggtttgatttggaagtgagtgtttaa

SEQ ID NO: 49108 - protein, 458 aa, Unknown
  Obtained from environmental sample
  DOMAIN (152)...(324): Radical SAM superfamily
  misc_feature (1)..(458): Xaa is any amino acid
MRYFLDPFGCVKNQVDAENMMSCLNKAGWESANAEDADIIIVNSCGFIESAKQESINAVIEWRKFYPNKKILLAGCLAQRYAKELAGSLTEADGFFGIENIADITNVVSKITGGAQDKSANSAAVESRPVNSGDKHETGKRPLLSLPGSAYVKISEGCNNCCSFCAIPLIRGKLVSREIPDIVEECRILLERGIAELCIIGQDIGAFGKDTCAESKLPELLKAISSLEGHFWVRLLYIHPDHFPLQILDIMENDTRFLPYFDIPFQHASAKILSAMNRRSNAEQYLALLETIRVRLPRAVIRSTFLLGFPGETEEDFAALLDFQKKAKLDWLGCFTYSREEDTAAYSMKKRVPVKIAEKRKXIIEERQIPITEKNMDRFVGQNXDVLVEEQIAADETNANSSQDSETLWLGRLYCQAPDIDGATVIMKSEVSKINPQVGNFTKCKVTARHGFDLEVSV

SEQ ID NO: 49109 - DNA, 1341 bp, Unknown
  Obtained from environmental sample
  misc_feature (1)..(1341): n is a, c, g, or t
ttgatcatgactctgatgactcaggacaggacacaaatgcccgaatcgttccatcctgtcatacgctcatggtttaccgagacctacggaaaaccaacggcagtgcagactgaggcatggcccctcattgagaaaggcgcgcatgtgctggccctggctcccaccggcagcggaaaaacccttacggcgtttctgtcggcaatttcccgtttctgcacgaacgtcacacagtaccccgcagacaaactcaccgtgttatacgtttccccgctcaaggcgctgaacgaggatatacggaggaacctgcttaaaccgctggaagctatccgttcgtgctttgagcaggcagggcttcaattccctgatataaaagtggagacccgctccggtgacactccccagtcgcagcgccgccgtttctatttgcatccgccttcaattctggcgcttaccccggaaagcctggctattcttctgttgaatcccaagggaagacaggcgctttccggcgttaagtacctcatccttgatgaaatccacgccgtgctggggaacaagcggggcgcgtttctcggttgtcagatcgacaggctttcgctcattgccggagagttccagcgcataagcctttccgccacaatccgttcgccggagattgccgccgctttcatcgcgggtattgaccaaaatggcctggaacgaaaaataaatattgttgcgccggcggctgaaaagaaaatagaacttactctgtcatttgatgatagtgaaaataatatcgagcaaatcgaaaaatacggaagacgctatacaaatctaattaattatattttaaatcgaatctccaaacattcaactattctggtgtttacagaatcccgccgccgcgctgaacggctctgttatttcatcaaccaggaagtagcgcttcaagaaggcgtaaacggcgctgtcgcctttacccatcatggctcgctttcaaaagaattgcggcaaagcgtggagaagcggctggcagcgggaactcttccctgcgtggttgccaccgcttcgctggaactgggcatagacataggcagcgtagacgaggtggtgctggctggaagcccaggttctgtgtcccaggctttgcagcgcatcggaagatcgggtcacagcgtgggaatggtcagccggggccttctctttccctttcacggaatggacttgcttcttgccgcggcccttaaaggcgctgttgaggatagggatatcgaagaagtacgccccattgaaaatccgctggacattctcgcccagatgatccttgctctctgcatcgagaaaaacccggaatattga

SEQ ID NO: 49110 - protein, 446 aa, Unknown
  Obtained from environmental sample
  DOMAIN (29)...(216): Type III restriction enzyme, res subunit
  misc_feature (1)..(446): Xaa is any amino acid
MIMTLMTQDRTQMPESFHPVIRSWFTETYGKPTAVQTEAWPLIEKGAHVLALAPTGSGKTLTAFLSAISRFCTNVTQYPADKLTVLYVSPLKALNEDIRRNLLKPLEAIRSCFEQAGLQFPDIKVETRSGDTPQSQRRRFYLHPPSILALTPESLAILLLNPKGRQALSGVKYLILDEIHAVLGNKRGAFLGCQIDRLSLIAGEFQRISLSATIRSPEIAAAFIAGIDQNGLERKINIVAPAAEKKIELTLSFDDSENNIEQIEKYGRRYTNLINYILNRISKHSTILVFTESRRRAERLCYFINQEVALQEGVNGAVAFTHHGSLSKELRQSVEKRLAAGTLPCVVATASLELGIDIGSVDEVVLAGSPGSVSQALQRIGRSGHSVGMVSRGLLFPFHGMDLLLAAALKGAVEDRDIEEVRPIENPLDILAQMILALCIEKNPEY

SEQ ID NO: 49111 - DNA, 1452 bp, Unknown
  Obtained from environmental sample
  misc_feature (1)..(1452): n is a, c, g, or t
ttgaaaggcagcggctgtctaatacgcgggactcttgttatcgccgttttattgtccgtattgtcaggctgtaataaaccttccaaagtaaaatccgccgactcaataaaaaacctgtcgtttaaggacatacccggcataacccgcgatgagattaccgccatagataacctcaaaaaaaaacaaaattcttttacctgcgccataaacctgaacaccgattctttctatatcaataacgataaagataaagaactttcgggctacgctattttattttacgaatggctctctggtgtatttggaatcagatttaaacccgtattctacgataggaaagatcttcagagaaaaattgagtacagggaaattgattttaccatagagcttgtacaaactcccgaacgcaaagcaagcctgtttatgaccaagcctatcgcccagcgcccgttaaagctgtacaggctcgccggaagcgaaccaatcgtgaatatcattaaatcgcgaaagcctcgttacgcttttcttacggattccgttcttctccatgatgccgtcgataacgcgggttatgaatttgataccgtttttgtggaaacccacatagacgcttacccgcttttgaaaagcggaaatattgacgcgtatgtggctctggacaatatcgagtccgtttttgacgtgttcggcaatgtggcaaacgaagattttttcccccttattttcagatcgttttcctgnttaaccggaaacgttgacctgaaacctgtaatctccgtccttgataaagcgctggatacgcagacccttacgtaccttacaaatcttcgcaaaaccggttatcaaaaatatttgggaacaaaattgtacgctctgttaagcgaacaggagcgtttattcatcatggagcaccctcagatccccatagccgccgagtttaacaattaccctgtcagtttttatgacgaacaaacatctcaatggcaggggatttattttgacgtgcttaaagaaatctcgaacatgacgggcattgagtttaactgcgtaaacgacgagggtacgcaatatcaggaactggtcgccatgcttgaggacggaaaagcgcaggtaatatccgaactttttcatataaaaggcaatgaagaccgttttttatggtcggatgttccttttttagaggacaattatgcgtttatcacaagatcggattttcgtaatatcgatgtaggcgagatttcttacttacgcatcggaacacgcagacactcccattattcagaattattcaaaaaaatgtttcccgaacatcaggatttcatagagtatgatactcaggaagaaacatgggacaagttaaaaaacggagacgtggacgctcttttttccagcaggcgcaggcttgtaatttacaccaattaccacgaagaagcgggcttaaactcaatttga

SEQ ID NO: 49112 - protein, 483 aa, Unknown
  Obtained from environmental sample
  misc_feature (1)..(483): Xaa is any amino acid
MKGSGCLIRGTLVIAVLLSVLSGCNKPSKVKSADSIKNLSFKDIPGITRDEITAIDNLKKKQNSFTCAINLNTDSFYINNDKDKELSGYAILFYEWLSGVFGIRFKPVFYDRKDLQRKIEYREIDFTIELVQTPERKASLFMTKPIAQRPLKLYRLAGSEPIVNIIKSRKPRYAFLTDSVLLHDAVDNAGYEFDTVFVETHIDAYPLLKSGNIDAYVALDNIESVFDVFGNVANEDFFPLIFRSFSXLTGNVDLKPVISVLDKALDTQTLTYLTNLRKTGYQKYLGTKLYALLSEQERLFIMEHPQIPIAAEFNNYPVSFYDEQTSQWQGIYFDVLKEISNMTGIEFNCVNDEGTQYQELVAMLEDGKAQVISELFHIKGNEDRFLWSDVPFLEDNYAFITRSDFRNIDVGEISYLRIGTRRHSHYSELFKKMFPEHQDFIEYDTQEETWDKLKNGDVDALFSSRRRLVIYTNYHEEAGLNSI

SEQ ID NO: 49113 - DNA, 840 bp, Unknown
  Obtained from environmental sample
  misc_feature (1)..(840): n is a, c, g, or t
atggcaaacatcgttgatgtaacaagttcccgcgcccaggaaaagcatatacaggtcatggttaatataagtcaggatattccccctaacgtaatctgcgacgaattacggctgacgcaggttattaataatctgatgaccaacgcgataaaattaacgcctgataacggcatagttcagttgaacgcgcaaaaagcagaagaaaaagacgatgaggttacgataagaatcgaagttgtgaacagcggcaaagggatttcgcctgaacagcaggaaaagcttttctcggattacgaccaggccgacctcaccatcgataaacaatccggcgacacgggatcagggcttgccatttccaaacggaatatagagctcatgcaaggcaagatttggattgagtcgcaacccggcaagggcgcgaaatttatttttgccttaaatatgaaaaagggggaaaagatcgttgttccggctacagccgaaagcacgcccgcgcctgtccccaggataaaggctaccgatttacatttacagggccaaaccatacttgccgcagaagacatggatttccacagggaagtcctgtccatgtatctgaaaaataccggggttgccattgattatgccgtaaacggcaaacaggctgtcgagatgttcaaagcgaataacgaaaaatactgcctgattataatggacataagaatgccggaaatgaacggagatgaggcgacaaggataatacgggcgcttgatttaaagaaggcaaaggagatacctatcatcgcgatgacagcggatgcttttaaggaagacgtgaaaaatgcatgtcggcaggcatga

SEQ ID NO: 49114 - protein, 279 aa, Unknown
  Obtained from environmental sample
  DOMAIN (180)...(277): Response regulator receiver domain
  misc_feature (1)..(279): Xaa is any amino acid
MANIVDVTSSRAQEKHIQVMVNISQDIPPNVICDELRLTQVINNLMTNAIKLTPDNGIVQLNAQKAEEKDDEVTIRIEVVNSGKGISPEQQEKLFSDYDQADLTIDKQSGDTGSGLAISKRNIELMQGKIWIESQPGKGAKFIFALNMKKGEKIVVPATAESTPAPVPRIKATDLHLQGQTILAAEDMDFHREVLSMYLKNTGVAIDYAVNGKQAVEMFKANNEKYCLIIMDIRMPEMNGDEATRIIRALDLKKAKEIPIIAMTADAFKEDVKNACRQA

SEQ ID NO: 49115 - DNA, 546 bp, Unknown
  Obtained from environmental sample
  misc_feature (1)..(546): n is a, c, g, or t
atgctggccattgtactgcaggcccgcgttgattcctcgcgtctgccggggaaagctctgctcccccttgggggaaagccgatgatattacgcgtaatggaagccctgaacaggataccggcggaaatgagagtgctggcctgtcccgaagattcgctttccgcttttgcggaacttgccggggaagcgggttttacgctgtttgccggcccaaaagaagatgtgcttgaccgtttctgtctctgcctgcgtaagttcggcatacgacacattataagggccaccggcgacaatccctttgtttttgcggacgcggcctataccattataactgaggcgttggctctgggcgctgactatgccggatacggcggtcttccccccggcgctggggttgaatcggtaaacgccaaagctctgctgctcgccggaaccgaagcggtctcccaatatgatcgtgaacatgtttgtccctacttatatacccacccgggaaaaatttctccttcaccgccctcttgccccgcagacctggcaatttcctga

SEQ ID NO: 49116 - protein, 181 aa, Unknown
  Obtained from environmental sample
  DOMAIN (3)...(180): Cytidylyltransferase
  misc_feature (1)..(181): Xaa is any amino acid
MLAIVLQARVDSSRLPGKALLPLGGKPMILRVMEALNRIPAEMRVLACPEDSLSAFAELAGEAGFTLFAGPKEDVLDRFCLCLRKFGIRHIIRATGDNPFVFADAAYTIITEALALGADYAGYGGLPPGAGVESVNAKALLLAGTEAVSQYDREHVCPYLYTHPGKISPSPPSCPADLAIS

SEQ ID NO: 49117 - DNA, 807 bp, Unknown
  Obtained from environmental sample
  misc_feature (1)..(807): n is a, c, g, or t
atgcctatactaattgttccagcatgtgaaccgggccgcggcggggggcatcttgtccgcagcatggctttggtgcgtgaactgcgcgctctggatagagaggcgtggctgtacatcacatcgccaaacgcggacgctgttttggacacggctcaatttgaccgctcatggcttcttgccgaaagcggcttgcgtgagaaaaactggcaatgtatcatccttgaccggtttcaaacttccgctgatgagcttgcccgctggcaaaaaatcgcccctgttatcggagttgatgaaggcggcaaatacagggggaattttgattttctaatcgatattcttcccaactgcgataaaattacacctaacatcgcctgtccatcctttttacccctgcctaaaaacaagccttgcctttcagccaatcctgaaacaaagcctctcaaaatactgctgagtttcgggcaggaagattccgccggacttggccccgcgctcgcgaagagacttgtggaccagcaaaatatcgaaatcatcctgctaaaaggaaaattatcaaatgagcaaaattattcctcattccttatccttaattccttattgaaagaatccatccccaatcttaatgaacacctgacagattacgatttgatcatcacccattacgggcttacctcttttgaggctatatacgcgggtgttcctgtactgctcgcttcgcctaccgtataccaccaaaaactcgctaaaaaagcgggcttttgtacgcttggtatcggggaaaaagaatgttgtaaaaaaaataaataa

SEQ ID NO: 49118 - protein, 268 aa, Unknown
  Obtained from environmental sample
  misc_feature (1)..(268): Xaa is any amino acid
MPILIVPACEPGRGGGHLVRSMALVRELRALDREAWLYITSPNADAVLDTAQFDRSWLLAESGLREKNWQCIILDRFQTSADELARWQKIAPVIGVDEGGKYRGNFDFLIDILPNCDKITPNIACPSFLPLPKNKPCLSANPETKPLKILLSFGQEDSAGLGPALAKRLVDQQNIEIILLKGKLSNEQNYSSFLILNSLLKESIPNLNEHLTDYDLIITHYGLTSFEAIYAGVPVLLASPTVYHQKLAKKAGFCTLGIGEKECCKKNK

SEQ ID NO: 49119 - DNA, 528 bp, Unknown
  Obtained from environmental sample
  misc_feature (1)..(528): n is a, c, g, or t
atgaaagctttggtttcgtggcttaaaagaaaaaaatccgctttttgcatactgacaggaattatttccgtgtcgttatttgtcatcagcgcctcaaatgagaaaataaaacaaactacaggaggttcttatgttgtaaagattatgcattacggaattgactcggcggaaatggaaaggactattactatcccgcttgaggacgcgctttccgcgatttccggcgttatgagcgtgcaaagctccaccgaaaataaccagtcaagagtttttgtacgtttcaaacccggcggaaaagggcggtacgaagctgtccgcgacgcggcgcanagagtttacgaaacattgccgccgtcggcccaaaggccggagattttaagctcaaataattcaagagtcccggtatggtcggcggcggtttttagtaaagcaaactccggcgaagaagaaaatcttttaacggcgcaaatgctggaaaaattgntaagccgcgctttgaaagtcttgaaggcgcgggagaagttttaa

SEQ ID NO: 49120 - protein, 175 aa, Unknown
  Obtained from environmental sample
  misc_feature (1)..(175): Xaa is any amino acid
MKALVSWLKRKKSAFCILTGIISVSLFVISASNEKIKQTTGGSYVVKIMHYGIDSAEMERTITIPLEDALSAISGVMSVQSSTENNQSRVFVRFKPGGKGRYEAVRDAAXRVYETLPPSAQRPEILSSNNSRVPVWSAAVFSKANSGEEENLLTAQMLEKLXSRALKVLKAREKF

SEQ ID NO: 49121 - DNA, 783 bp, Unknown
  Obtained from environmental sample
  misc_feature (1)..(783): n is a, c, g, or t
ttgatgtgcgcgtacaggggaaaagcggcaccgacgccgcattatcagccgcctgagaagattcccctgaagaccgcgcagggtaaatncgtgtatcttgnctcgctgggcaggatagagcgcagggaagcggaggcgtctctcgcgcggctggatcgcagcgacgttatctacgcggacattgcccaaggcaaagaaagacaagaggcggcaaacaaaaccgccgctcgatttccttggtttaagggagccgacgagtcggtttttgtccgataccgtaatttgcttttcctctatgttttccttgtaataatccttctatacatgataatcggcgctcagtttgaatctttcctccttccgttaatactcatgttgagtattcccttttcactggcgggagcggggcccctgttgttgattacaggttctttgatcgattcgggcgcggtcttcgggcttgccgctctattcgggcttgttgtgaataacagcctccttctttttgaggtaagcagcgaaaaaatagacgcgggaatttccatagcggaggctgtttacagcggggcaaccgaacgcctgcaggcgattttaattacgacagcgactacggttttcgcccttctgcctttggtgttaagccccatgggaaattcgcaaaaatcaatggcggctgtaatgctgggaggtctcgcatcatcgactcttttgagcctttttgccattccgccggtactcattatgtttttcaaatggaaattgcgtaaagagggcgttaaatga

SEQ ID NO: 49122 - protein, 260 aa, Unknown
  Obtained from environmental sample
  DOMAIN (62)...(252): Protein export membrane protein
  misc_feature (1)..(260): Xaa is any amino acid
MMCAYRGKAAPTPHYQPPEKIPLKTAQGKXVYLXSLGRIERREAEASLARLDRSDVIYADIAQGKERQEAANKTAARFPWFKGADESVFVRYRNLLFLYVFLVIILLYMIIGAQFESFLLPLILMLSIPFSLAGAGPLLLITGSLIDSGAVFGLAALFGLVVNNSLLLFEVSSEKIDAGISIAEAVYSGATERLQAILITTATTVFALLPLVLSPMGNSQKSMAAVMLGGLASSTLLSLFAIPPVLIMFFKWKLRKEGVK

SEQ ID NO: 49123 - DNA, 471 bp, Unknown
  Obtained from environmental sample
  misc_feature (1)..(471): n is a, c, g, or t
atgatgcagcaaatcggcaattactttccgatgatagggcttaacacacacggcggactaatctgtatatatgtcgcggggtccatgagcatcaacgtactaatggttaaatcgtacattgacaccatctcgaaggaactggatgaatcggcgattattgaaggggccacttattggcaaattttctggaaaataatttttccggtgataaagccgatggtgatcaccgttgccattctggcgtttatgagcacatacggcgattttgtaatcgcgaatctccttcttaaaggaaacgataaaattaccgtaatggtaggcattttccagtttacccagcagcgctttgacaccaactgggggatagtgacagccggaacagtacttgcagcaattcccgtagtggcgctgttctttgcgtctcaaaaatacataatcggcggagtgatgttgggagccataaaagaataa

SEQ ID NO: 49124 - protein, 156 aa, Unknown
  Obtained from environmental sample
  misc_feature (1)..(156): Xaa is any amino acid
MMQQIGNYFPMIGLNTHGGLICIYVAGSMSINVLMVKSYIDTISKELDESAIIEGATYWQIFWKIIFPVIKPMVITVAILAFMSTYGDFVIANLLLKGNDKITVMVGIFQFTQQRFDTNWGIVTAGTVLAAIPVVALFFASQKYIIGGVMLGAIKE

SEQ ID NO: 49125 - DNA, 447 bp, Unknown
  Obtained from environmental sample
  misc_feature (1)..(447): n is a, c, g, or t
atgacagatcggccgagactcaccggggatttgagcggcgatgacggatcgatttacaatcccgcgcttttgggggctttgggttttgaccgcgatcttgtgtggggccttaaccttaatttccagtgcaacgaatcaatccgcttaatggatagcaagattggaagtaacgcaatgcttgatattgaggctgataccgatatgacttccacgcaaattatagccgccctatccaaaaagtttttccgcgatgaactggaagcgaggcttgccgttttgtacggggttgaagacggcgatttcctctttataccttcgtttgtctggactaaggacgcgctgtccgttgagctttcatgcggtacctttggcggcaacaaggacgggcaattcggtcaatatagtgacaacagttttgttaaagcggcgctgaagtatagcttctaa

SEQ ID NO: 49126 - protein, 148 aa, Unknown
  Obtained from environmental sample
  misc_feature (1)..(148): Xaa is any amino acid
MTDRPRLTGDLSGDDGSIYNPALLGALGFDRDLVWGLNLNFQCNESIRLMDSKIGSNAMLDIEADTDMTSTQIIAALSKKFFRDELEARLAVLYGVEDGDFLFIPSFVWTKDALSVELSCGTFGGNKDGQFGQYSDNSFVKAALKYSF

SEQ ID NO: 49127 - DNA, 897 bp, Unknown
  Obtained from environmental sample
  misc_feature (1)..(897): n is a, c, g, or t
atggacagaatcggcaaaataatagattcgcttatggaaacatacggcgactatggcatggtgaaccattcaggcggtgcgaaccttcccggcagggaaaacatagcccgcattatgcgcggcctggacgagcttatcttccccggttttctggaaaaccaggggcttgatcacagcaacctgaagcttatgacagcggaaaaggtgaaccaccttgccagggagctgatccgcgaagtagaaaaaagccttgccttttcagtccgcgaaggatctttaagctgcggccatggcggctgccacgcatccgcagagcttatcgtggagagttttttcgaggaaatcccgctgattcgccggaaattatcccttgatatgcaggcaaatttccggggcgaccctgccgcaaaaagctttgaagaggtgatactttcataccccggctttcaggcaattaccgttcaccggcttgcccattatttctggaaggcgcaggttccccttattccccgcatgatgagcgagatggttcatggcagcactggcatagacatccatcccggagcggaaataggggaatcgttttttatcgatcacggaaccggcgtggttataggcgagacaacaattatcggcaacaatgttaagctctaccagggcgttacacttggcgctctttctgtgaaaaaggaagaaggcaaccgcaaacgccatcccactatcgaagacgacgttaccatttattcaaacgcaacaattctgggcggtacaccggttattggccgaggcagcattatcggcggaaacgtgtggataaccgagtctgttctgcccaatacgacggtctacaccagagcaggggagcagattgggcagcggcaagtttcatcacagtaa

SEQ ID NO: 49128 - protein, 298 aa, Unknown
  Obtained from environmental sample
  misc_feature (1)..(298): Xaa is any amino acid
MDRIGKIIDSLMETYGDYGMVNHSGGANLPGRENIARIMRGLDELIFPGFLENQGLDHSNLKLMTAEKVNHLARELIREVEKSLAFSVREGSLSCGHGGCHASAELIVESFFEEIPLIRRKLSLDMQANFRGDPAAKSFEEVILSYPGFQAITVHRLAHYFWKAQVPLIPRMMSEMVHGSTGIDIHPGAEIGESFFIDHGTGVVIGETTIIGNNVKLYQGVTLGALSVKKEEGNRKRHPTIEDDVTIYSNATILGGTPVIGRGSIIGGNVWITESVLPNTTVYTRAGEQIGQRQVSSQ

SEQ ID NO: 49129 - DNA, 483 bp, Unknown
  Obtained from environmental sample
  misc_feature (1)..(483): n is a, c, g, or t
gtgtttcagaacttcaacctcttcccgcatttttccgttatgcgaaatatcaccgaggcccagattcacgttcttaaaagggacaaggccgaagccgagaaccgggcgctggccctgttggcgaagatgggcctttctgataaggcaaaaaactacccctgcgaattgtcaggcggccagcagcagcgggtttccatagcgcgggcgctggccctggatccccaggtgctttttttcgacgagccaaccagcgcccttgacccggaactcacctccgacatcctcagggcaatacgcgcgcttgccgaggaaaaaatgacgatggtaattgtaacccacgaaatcccctttgcgcgtgaagtggcagaccgcctgcttttcatggatggtggtgtttttgttgaagaacgttcagccgcggaagttatcgacaaccccaagcaggaaaggacaaaagcttttctttcaaagctggaacgctaa

SEQ ID NO: 49130 - protein, 160 aa, Unknown
  Obtained from environmental sample
  DOMAIN (2)...(131): ABC transporter
  misc_feature (1)..(160): Xaa is any amino acid
MFQNFNLFPHFSVMRNITEAQIHVLKRDKAEAENRALALLAKMGLSDKAKNYPCELSGGQQQRVSIARALALDPQVLFFDEPTSALDPELTSDILRAIRALAEEKMTMVIVTHEIPFAREVADRLLFMDGGVFVEERSAAEVIDNPKQERTKAFLSKLER

SEQ ID NO: 49131 - DNA, 924 bp, Unknown
  Obtained from environmental sample
  misc_feature (1)..(924): n is a, c, g, or t
ttgtcattggttttctgctgttgtttaatttggttttggggaaaaaaggaaaacaaaaacaggacggggttttccgacaaagaagggcggattgtttacaacgcggaatttagtttgggggatatgcccgaacgcgctctgatgacgcgtaatgtggatgaattgcttgcggaggatctgtcagcgattgaagcctcaaacagatttcgcagtcctccgtcgtatgaaaattttgaaacaagggacagtcggcaggatcaggttatagcagcgcaaaacagaggagtttcagccaatggcggcggaaatttccaacaggggtacggcgattcctatgcgcaggctgtaacggccccgatacggaaagacggcggctatggcgaatccccaaccctggctccgacggcgcctggtcaaaattaccagcctgcgcagatacaggcggacataccgtccagagaagattacacacggcagcagtttgacaactatacccgtttgattcaggcggcaaacggtcagagcgctaatgcggaacaaactgagaataaaaacaacggacggtacagtgaagcgggtaactataaccccaataataacgacgcgggcaatttcaggtttttggaagacaatgtgatagtcccgggaacaattatccatgcggtactggtgtcaagtattgacactgactatccaggcccgattcacgccagggtaactgaaaatgtttatgacagcaaaacaggcgaaaatctgttaattccgcaagggtcgattttacagggaaattattccagcttcagcgtcggggtggcaaggtacagattgcgtgggaatcgatggtggttaactttgacggcgtggcataccaggtatcgctgggcggtatggcgggcgtggacaagcggggacgggccggaatag

SEQ ID NO: 49132 - protein, 307 aa, Unknown
  Obtained from environmental sample
  DOMAIN (213)...(307): Bacterial conjugation TrbI-like protein
  misc_feature (1)..(307): Xaa is any amino acid
MSLVFCCCLIWFWGKKENKNRTGFSDKEGRIVYNAEFSLGDMPERALMTRNVDELLAEDLSAIEASNRFRSPPSYENFETRDSRQDQVIAAQNRGVSANGGGNFQQGYGDSYAQAVTAPIRKDGGYGESPTLAPTAPGQNYQPAQIQADIPSREDYTRQQFDNYTRLIQAANGQSANAEQTENKNNGRYSEAGNYNPNNNDAGNFRFLEDNVIVPGTIIHAVLVSSIDTDYPGPIHARVTENVYDSKTGENLLIPQGSILQGNYSSFSVGVARYRLRGNRWWLTLTAWHTRYRWAVWRAWTSGDGPE

SEQ ID NO: 49133 - DNA, 555 bp, Unknown
  Obtained from environmental sample
  misc_feature (1)..(555): n is a, c, g, or t
gtgggtatgcagcagcgagtggagattttaaaaatactctaccgggacgcggacattctgatttttgacgaaccgactgcggttcttaccccccaggaaattgatgagcttctttccattttccgccgccttaaagccgaaggaaaaacgatagtctttatcacccataaattaaaagaaataaaagccgccgcggatcgctgtacagttctaaggcggggcaagtacattgacacggtcaaggttgacgagtcaaacgaagaagaccttgcggaaaaaatggttggccgcgcggtgaatttcaggatagacaaggaaccggccaaacccggcgacacggttttgagtatccggaatcttacggtgcttggctcgcgcggaattccaatggtaagggatctctcgctggatgtatgcgcgggcgaagtggtgggcgtcgccggaatcgacggcaacgggcagtctgagcttgtggcggccatcgcgggacttttgcctgttaagtcaggaaagatttttcttaaaggaaaagatatttcaacggagacgatctga

SEQ ID NO: 49134 - protein, 184 aa, Unknown
  Obtained from environmental sample
  misc_feature (1)..(184): Xaa is any amino acid
MGMQQRVEILKILYRDADILIFDEPTAVLTPQEIDELLSIFRRLKAEGKTIVFITHKLKEIKAAADRCTVLRRGKYIDTVKVDESNEEDLAEKMVGRAVNFRIDKEPAKPGDTVLSIRNLTVLGSRGIPMVRDLSLDVCAGEVVGVAGIDGNGQSELVAAIAGLLPVKSGKIFLKGKDISTETI

SEQ ID NO: 49135 - DNA, 444 bp, Unknown
  Obtained from environmental sample
  misc_feature (1)..(444): n is a, c, g, or t
atggccgccacaagctcagactgcccgttgccgtcgattccggcgacgcccaccacttcgcccgcgcatacatccagcgagagatcccttaccattggaattccgcgcgagccaagcaccgtaagattccggatactcaaaaccgtgtcgccgggtttggccggttccttgtctatcctgaaattcaccgcgcggccaaccattttttccgcaaggtcttcttcgtttgactcgtcaaccttgaccgtgtcaatgtacttgccccgccttagaactgtacagcgatccgcggcggcttttatttcttttaatttatgggtgataaagactatcgtttttccttcggctttaaggcggcggaaaatggaaagaagctcatcaatttcctggggggtaagaaccgcagtcggttcgtcaaaaatcagaatgtccgcgtcccggtag

SEQ ID NO: 49136 - protein, 147 aa, Unknown
  Obtained from environmental sample
  misc_feature (1)..(147): Xaa is any amino acid
MAATSSDCPLPSIPATPTTSPAHTSSERSLTIGIPREPSTVRFRILKTVSPGLAGSLSILKFTARPTIFSARSSSFDSSTLTVSMYLPRLRTVQRSAAAFISFNLWVIKTIVFPSALRRRKMERSSSISWGVRTAVGSSKIRMSASR

SEQ ID NO: 49137 - DNA, 306 bp, Unknown
  Obtained from environmental sample
  misc_feature (1)..(306): n is a, c, g, or t
gtgctggatttccgcctggacgaaaacctgattcttaaaagttaccgtcttttaccttttacaaaccgcatgggctttctcaacttcaatgtgatcctcaagcacgctgaatcgttaattggcgattttgatatcagggcggggagcgggcccgcgacgccggcaagatccatgtccggcggaaaccagcagaaggtggttattgcgagggaaatagatctttcgccagatttattaattgtttcgcagccaacccgagggctggatgtaggcgcgattgaatacatactcttgtctgatcattaa

SEQ ID NO: 49138 - protein, 101 aa, Unknown
  Obtained from environmental sample
  misc_feature (1)..(101): Xaa is any amino acid
MLDFRLDENLILKSYRLLPFTNRMGFLNFNVILKHAESLIGDFDIRAGSGPATPARSMSGGNQQKVVIAREIDLSPDLLIVSQPTRGLDVGAIEYILLSDH

SEQ ID NO: 49139 - DNA, 741 bp, Unknown
  Obtained from environmental sample
  misc_feature (1)..(741): n is a, c, g, or t
gtggctgaaaaaaaagaaaaccggctgtcgcttgtccttgaaatttttacaggctcaaacggccttgtctcgctggttgttgtgcttctgggctttcttgtgggaaccttgatcattgtcgctgtaggaagaaacccctccggaatgtattccgctatttttcagaatatttcaggcttttcaataaatacaagaacaggcacctggatctggaacccgcggtacataggcgaatggcttgtgtcgtccatgccgcttactctctgcggtctctcaatggcttttgccgccagaaccgggctttttaacataggcgcggaaggccagtacatcgcgggcctgactgcggcgcagtttgtcgcgttttattttccgcaagtacctgtcttacattctgttgtggctgtaatagcggcaattgctgcgggcgcgatttgcggaggcgtggtaggctacctgaaagcaaggtttcaggtttcggaagtagtcgccactatcatgatgaactacattgttctttacctttcaaggtatttaacaatgcggattccaggaagcaatacttacaggactccggatttccccgaaactgtaaagatcacaaaccacgtcatggaaaccatttccaacaactcaaggctgaataacgggctattcctgacaatagcggcactgttcttcttctggatcattatggaaaaaacccgattagagctattcactcagggctacgggctttaa

SEQ ID NO: 49140 - protein, 246 aa, Unknown
  Obtained from environmental sample
  misc_feature (1)..(246): Xaa is any amino acid
MAEKKENRLSLVLEIFTGSNGLVSLVVVLLGFLVGTLIIVAVGRNPSGMYSAIFQNISGFSINTRTGTWIWNPRYIGEWLVSSMPLTLCGLSMAFAARTGLFNIGAEGQYIAGLTAAQFVAFYFPQVPVLHSVVAVIAAIAAGAICGGVVGYLKARFQVSEVVATIMMNYIVLYLSRYLTMRIPGSNTYRTPDFPETVKITNHVMETISNNSRLNNGLFLTIAALFFFWIIMEKTRLELFTQGYGL

SEQ ID NO: 49141 - DNA, 333 bp, Unknown
  Obtained from environmental sample
  misc_feature (1)..(333): n is a, c, g, or t
gtgcgcggtcgaatcaggaaaagtaaaaacgacatgagcaaaggcggtccgccggcaaagatcgacagctttatagacgcgatattggagatgcgattgcccggtttccgcgccgtctgcaaggagtgggaagtcgtcgacaggtggcacgagatagtgatcgggcgcgtggcggaagttacggagtgttccggggtggagaacggggtgttgcaagtaagggtagcgtcggcatcgtggagacaagaccttacgtatctgaaagaggatataaaggcggcgattcggcgggtcacggggtgcgagactatacgggatattgtgttttattga

SEQ ID NO: 49142 - protein, 110 aa, Unknown
  Obtained from environmental sample
  misc_feature (1)..(110): Xaa is any amino acid
MRGRIRKSKNDMSKGGPPAKIDSFIDAILEMRLPGFRAVCKEWEVVDRWHEIVIGRVAEVTECSGVENGVLQVRVASASWRQDLTYLKEDIKAAIRRVTGCETIRDIVFY

SEQ ID NO: 49143 - DNA, 1116 bp, Unknown
  Obtained from environmental sample
  misc_feature (1)..(1116): n is a, c, g, or t
atgcacctacaaaacctgactctgcaaaactttcggaaccacgaggccctctcgatagcgttccccaaagagggggcgctcttcgagggggcaaacggggcggggaagaccaacatccttgaaggcattcatatactatgcacaggccgctctcagcgcggcgcggcgcgtaccgacatgatcgcctacgggcaggaagcggcctttatctccggggatttctgttttgacaaagatgataacggggagaacgtcgctatcgtccaaagcgcggcgctgggattttcgcgagacaagaagacggtgatgaagataaacggggagaacgtcgcatcctacactgagtggttcggggagcgtccggcggtctccttcggggcggacgatttggaactggtctacggcgcccccgaagcgcgccgcaagtttttggatatgctcgtcagccagaccgatcgcgcctacctgtcggcgctcctcgcctaccgccgcgccacggcctgccgcaacgcgcttctgggcaaaacgggcgacgccgcgcagtttgaggtctacgagcaggcaatggcggaggccgccgcgaagctcgtctacgtccgcgccgaagcggtgcgcgagctgtccgcgctggcaagcggatattacgccgaaatcagcggcggagcggaggccgccgccgttgaatacgcccccaaaaataaatgcgttttttttgacatttgggggcggcaaaatgtatatttaatatctccggcgcaacgttgcgaaagggccgctaaattcaggtattcggcgcttagtccgcaccgcgacgacctgcggttcacgctgggcggcagggcggcgaagggtcacgcgtcgcagggccagtgccgcagcttcgccctctctttgaagctcgcctcggcgcggttcatagagcgaaagcgcggcggcggcatgatctttctggtggacgacgccgtctcggagctcgatccggagaggacgtcgcgggtctatccgctgcttgaaggcaggggacaagtattcatagcaacgccccgctgccaagcggcgctgggcgggggggtgttaaggtgcgcggtcgaatcaggaaaagtaaaaacgacatga

SEQ ID NO: 49144 - protein, 371 aa, Unknown
  Obtained from environmental sample
  DOMAIN (2)...(370): RecF/RecN/SMC N terminal domain
  misc_feature (1)..(371): Xaa is any amino acid
MHLQNLTLQNFRNHEALSIAFPKEGALFEGANGAGKTNILEGIHILCTGRSQRGAARTDMIAYGQEAAFISGDFCFDKDDNGENVAIVQSAALGFSRDKKTVMKINGENVASYTEWFGERPAVSFGADDLELVYGAPEARRKFLDMLVSQTDRAYLSALLAYRRATACRNALLGKTGDAAQFEVYEQAMAEAAAKLVYVRAEAVRELSALASGYYAEISGGAEAAAVEYAPKNKCVFFDIWGRQNVYLISPAQRCERAAKFRYSALSPHRDDLRFTLGGRAAKGHASQGQCRSFALSLKLASARFIERKRGGGMIFLVDDAVSELDPERTSRVYPLLEGRGQVFIATPRCQAALGGGVLRCAVESGKVKTT

SEQ ID NO: 49145 - DNA, 477 bp, Unknown
  Obtained from environmental sample
  misc_feature (1)..(477): n is a, c, g, or t
atgagcgataccctaccctattttgtccatgaatccagttatgtggacgaaggcgctgaaattggtgaaggcacaaagatatggcatttttgccatattatgcccggcgcgaaaattggtatgcaatgttccataggccaaaatgtgaatgtcggttcccgcgcaattatcggcaatggggttaaaatacaaaacaatgtttctgtgtatgatgatgtaattattgaagacgatgttttttgcggcccgtcctgcgtgtttaccaacgtaataaacccgcgcgcctttgtggaacgcaagcatgaatacaaaaagaccgtgataagaaaaggcgcaagcatcggggcaaacgcgacgattgtctgtggtgtaaccattggggagtatgcgcttatcggcgccggcagcgtggttacgcgggatatacccgcttacgcgcttgcatatggaaacccggcgcgggtgcggggaaagtga

SEQ ID NO: 49146 - protein, 158 aa, Unknown
  Obtained from environmental sample
  misc_feature (1)..(158): Xaa is any amino acid
MSDTLPYFVHESSYVDEGAEIGEGTKIWHFCHIMPGAKIGMQCSIGQNVNVGSRAIIGNGVKIQNNVSVYDDVIIEDDVFCGPSCVFTNVINPRAFVERKHEYKKTVIRKGASIGANATIVCGVTIGEYALIGAGSVVTRDIPAYALAYGNPARVRGK

SEQ ID NO: 49147 - DNA, 435 bp, Unknown
  Obtained from environmental sample
  misc_feature (1)..(435): n is a, c, g, or t
gtgggctataactcgcgtttagacacttgcagggctgcgatattgaatgtcaaattgtctcatattgacaacgctattaaaaaacgggcggaacatgccgcgcattaccgtgaaattctgaaagacgttaccggaatcaaactgcctgttattaaagacaacaataaagaagtgaattatgtattttgtataaaagcggaaaaacgtgacgatcttgaaaaatatctgcaatcaaaagagattggcacgtcaatttattacccacttccgcttcatcttcaaaaatgttttgagtatttaggctataaaaaaggtgacttcccagtcgcggaaagtttatgcgaaactgtgcttgccctccccatgtttcctgaactgacagaggatgaagttgattttgtgtgcgagaacataaaagagttttataagaaatga

SEQ ID NO: 49148 - protein, 144 aa, Unknown
  Obtained from environmental sample
  misc_feature (1)..(144): Xaa is any amino acid
MGYNSRLDTCRAAILNVKLSHIDNAIKKRAEHAAHYREILKDVTGIKLPVIKDNNKEVNYVFCIKAEKRDDLEKYLQSKEIGTSIYYPLPLHLQKCFEYLGYKKGDFPVAESLCETVLALPMFPELTEDEVDFVCENIKEFYKK

SEQ ID NO: 49149 - DNA, 951 bp, Unknown
  Obtained from environmental sample
  misc_feature (1)..(951): n is a, c, g, or t
atgtctgaggattcctttctttggcaaattgaattgatacctctaaaatggaagcgtatgagatatgtatttaaaatagaaattaaagagcaaaatgaaatgaagttatactatttttccgaaaacgggctgacaaagttttcggaaaatgaaattattgaaccgtatgcccattttttccttcccttcatacatgaaattgacagcccttgtgttcccgaatgggcgtcaaatactatatggtatcaaatattccccgaaagatttatgtcgggcgacgattcaatttcacctcacggctgctgtgattgggaaaacggccgtcctgaattcaacaattttttcggaggcgatcttatcggaattcgcaataaacttgactatttaaaaaacttagggataacaggaatatatttaacgccgatatttacctcgccgtctaaccataaatatgatacgtcggattatatgaatgtcgatccgcattttggcggtatagaggcgttaagggagcttgtaagagaagctcacaatcgcggtatccgtattatgcttgacgcggtatttaaccatgtaagcgcaaaacatcctttttggcaggacgttttaatcaatcaggaaaattctcagtatagggattatttccatattcacagtttcccggtaagcgagcgatattcggatcacaaggcaattaattttgacactttctcgtttcaggtgcgtatgccaaaatggaatacggagaatactgcggttagagactatcttataggggccgcctgttattggataaaagaatgtgatattgacgcatggcggcttgatgttgcggatgaagtaacttttaatttttggcgcgctttttcttcggctgtcaggcagacaaaagataatttttttattttaggagaaatttggcatgatgccacgccgtggataaagcgctaa

SEQ ID NO: 49150 - protein, 316 aa, Unknown
  Obtained from environmental sample
  DOMAIN (83)...(316): Alpha amylase, catalytic domain
  misc_feature (1)..(316): Xaa is any amino acid
MSEDSFLWQIELIPLKWKRMRYVFKIEIKEQNEMKLYYFSENGLTKFSENEIIEPYAHFFLPFIHEIDSPCVPEWASNTIWYQIFPERFMSGDDSISPHGCCDWENGRPEFNNFFGGDLIGIRNKLDYLKNLGITGIYLTPIFTSPSNHKYDTSDYMNVDPHFGGIEALRELVREAHNRGIRIMLDAVFNHVSAKHPFWQDVLINQENSQYRDYFHIHSFPVSERYSDHKAINFDTFSFQVRMPKWNTENTAVRDYLIGAACYWIKECDIDAWRLDVADEVTFNFWRAFSSAVRQTKDNFFILGEIWHDATPWIKR

SEQ ID NO: 49151 - DNA, 963 bp, Unknown
  Obtained from environmental sample
  misc_feature (1)..(963): n is a, c, g, or t
atgcgttggtgtgctgtgctttataaaaaattactatattcctctccaatgcgtttcggcgttgttttgaaattcctgcttgtgttgctggcatccgctgctgcgcaggataccattgccaatttgcaaattgaaaagaaaaatgatgtgcattttgtggatggcttggacttggcgaaaaagctgaaaatgccgatgacttggcaaagcgaagccggtattttgcaaatagaaaattcttcgtgggttttgggcaacgcttgggttagcaccaaagatactacctttctattgccaactcccgtgcagagcaaaatcaacgacagacgctctttttggctgccgctcccatcttcattgcaggtttttgaacgcctgctcaataaacccattgaatacgattccgcctctgcaaaaataaccttagggccgttaaaagaactgaaagatatatggaacgtgaatttagaagctaagaacaatggcgaagttttggagttaaaactctcaaagccatttgttgctgaatcgttctttatgcaccccaattatatattgcgtttaaacggagccgtcatagacaccactatatttcaggatatagcgaaaaaatccgctctgttcaacaggataatttttattcaagacaaacaaagtgcgcaattaactttaatgctcagagacaactgcgagaaagttgagctgataaaaaaagacgaaggaaaaactttgcaaatactgctcagaaaaaaacaggttgcagcagctcctgcacccgctgcaccgcccccgcccacgcaacccgttcatctcagtggaaaaataaaaactataatcatagaccctgggcacggcggcaaagaccccggtgccgttggcattaaaggacttaaagaaaaggatgttgttttggctgttggtttaaaattgaaaaaaaaattggaagaaaagggtttactgtaa

SEQ ID NO: 49152 - protein, 320 aa, Unknown
  Obtained from environmental sample
  misc_feature (1)..(320): Xaa is any amino acid
MRWCAVLYKKLLYSSPMRFGVVLKFLLVLLASAAAQDTIANLQIEKKNDVHFVDGLDLAKKLKMPMTWQSEAGILQIENSSWVLGNAWVSTKDTTFLLPTPVQSKINDRRSFWLPLPSSLQVFERLLNKPIEYDSASAKITLGPLKELKDIWNVNLEAKNNGEVLELKLSKPFVAESFFMHPNYILRLNGAVIDTTIFQDIAKKSALFNRIIFIQDKQSAQLTLMLRDNCEKVELIKKDEGKTLQILLRKKQVAAAPAPAAPPPPTQPVHLSGKIKTIIIDPGHGGKDPGAVGIKGLKEKDVVLAVGLKLKKKLEEKGLL

SEQ ID NO: 49153 - DNA, 669 bp, Unknown
  Obtained from environmental sample
  misc_feature (1)..(669): n is a, c, g, or t
atgggtcagacagcggcttccggcaattattgggcgtctatgaatgccagtcatatcatggctactccttacacaattacaggttctatcggcgtaatcggaagctggttttatgataacggccttaatagcaaactcggcgttaaaattgatacaattcagcggggagcgcacgcggatttaataacgggttttttaatacctcacaggaatttaaccgcgccggaagaggaaaggtacagaaactatatacttgatctttacaccggatttaccgaaaaggtcgctacaagcagaaacatggatattgcaagagtaaatgccgcggctcagggacgaatatattcgggaacgagagcgctggaagaaggactcattgacagtatagggaatttttccgatgcgcttgctatggcgcggcagttagctgaaataccggaaaatacaaacgttctttacagagagtttcccgaaccgaaatttttggacaaattgcttgcacgttttcctatggcgtccgtttttttcgggaaacgcaaaagtcaaacagatacggcttcgttttttacagatttatttttgccggatgatattcgttaccggcttgaaaaaaacggccggattatgcccattcttccgctggagttcagcgatttattaggcttttaa

SEQ ID NO: 49154 - protein, 222 aa, Unknown
  Obtained from environmental sample
  DOMAIN (1)...(146): Peptidase family S49
  misc_feature (1)..(222): Xaa is any amino acid
MGQTAASGNYWASMNASHIMATPYTITGSIGVIGSWFYDNGLNSKLGVKIDTIQRGAHADLITGFLIPHRNLTAPEEERYRNYILDLYTGFTEKVATSRNMDIARVNAAAQGRIYSGTRALEEGLIDSIGNFSDALAMARQLAEIPENTNVLYREFPEPKFLDKLLARFPMASVFFGKRKSQTDTASFFTDLFLPDDIRYRLEKNGRIMPILPLEFSDLLGF

SEQ ID NO: 49155 - DNA, 882 bp, Unknown
  Obtained from environmental sample
  misc_feature (1)..(882): n is a, c, g, or t
atgtgtattttcgcaaaaagaacgacggcgatcctatgggttgccgtcgtgttatgtttaacatttgcctctgtgccgcgggcggcgccgcccgaccgcgccgccgtgacctttagcgccggagccggcgggacgcttaaggccgtcgtagacggcgtcccgattaccccgggttctttggtgagcatcggtaaaaaagttgttttcacggctgttcctgacaaagggtacggcacgcttgattggacggttgccggggcgaagatcgtcgactcctccttggcggataggcgcgaggtggaaatctcggagaaggcggttgaggtctcggtgtcgtttgagcggatatttataccccgcgttcaggtgacgtttgatggcggggccgacggggtgttgacggctgtcgttgacggcgccgaaattatttccggcgattcggtgttcgtcggcaagagcgttgtgttcacggctgttcccgacaacgggtacgtcattgccggttggacgatcaacggggcggacacctcctcggcgcgctcgctcacggttaggatttcggatacggcttcggtcaacgtcacggtgtcgttcgatatatttgtcccgacgcggcctgtcgtgaagatcggtccgaatccggttaaggccggcggcgacgcggtcatttactggttcggcggctatgccgtcagcggcggtttgtcgatattcgacgccgtaggctacaaagtcgcccatgtaaatgtcaacggcgtaaggaagataggcgcgtggaaggtcggcaacatcgccagaggcacataccttatcaagggcgtgcttaaggacaaaggcggcaaaaagatcgatgtggcggtgccggtcggcgtcgtcaggtga

SEQ ID NO: 49156 - protein, 293 aa, Unknown
  Obtained from environmental sample
  SIGNAL (1)...(28)
  misc_feature (1)..(293): Xaa is any amino acid
MCIFAKRTTAILWVAVVLCLTFASVPRAAPPDRAAVTFSAGAGGTLKAVVDGVPITPGSLVSIGKKVVFTAVPDKGYGTLDWTVAGAKIVDSSLADRREVEISEKAVEVSVSFERIFIPRVQVTFDGGADGVLTAVVDGAEIISGDSVFVGKSVVFTAVPDNGYVIAGWTINGADTSSARSLTVRISDTASVNVTVSFDIFVPTRPVVKIGPNPVKAGGDAVIYWFGGYAVSGGLSIFDAVGYKVAHVNVNGVRKIGAWKVGNIARGTYLIKGVLKDKGGKKIDVAVPVGVVR

SEQ ID NO: 49157 - DNA, 804 bp, Unknown
  Obtained from environmental sample
  misc_feature (1)..(804): n is a, c, g, or t
atgaccaaacgtttttctttacactcaaccatttacgtatgcgccgctctcgcgctcggcgctttctttagccaaagcgtggccgcgccgcccgctaagtcttccgctccggcggtaacgctgaacgtcttcgccgccgccagcttgacggaggcgctgacggaaatcgcgacgctctacaaggcgtccgccccggcggtgacgctcgccttcaacttcgattcaagcggcaagctgcagacgcagattgaaaacggcgcggaggccgacatattcttctccgccggcaagaagcagatggacgcgctcgcggagtgctgcatagacgcctcgacgcggaaggatttgctggtcaacaagatcgtgcttatcgtgcctaaggcgagcaaggcgggtatcaagtcttttgaggactgcatgaccgataaggtgaagctgatagcgctgggcaactccagcgtgccggtcgggcaatactcggaggagatattcaagagtctgaaggggtgggagaaggtctcggccaaggcgtcgctcggaacgaacgtgaaggaggtactgtcgcagacggagagcggcagcgttgactgcggcgtggtgtacgccaccgacgcggcgacgtctaagggcgggataacggtggtcgcaaccgcgcccgagggaagccacgctccggcggtttatcctatcgcggtgttgaagaggacggcgaacgcggaggccgctaaggcgttcgtgaattatctgagctcgccaaaagccatagccgtatttgagaagatcgggtttaatattgtcaagtga

SEQ ID NO: 49158 - protein, 267 aa, Unknown
  Obtained from environmental sample
  SIGNAL (1)...(26)
  DOMAIN (10)...(256): Bacterial extracellular solute-binding protein
  misc_feature (1)..(267): Xaa is any amino acid
MTKRFSLHSTIYVCAALALGAFFSQSVAAPPAKSSAPAVTLNVFAAASLTEALTEIATLYKASAPAVTLAFNFDSSGKLQTQIENGAEADIFFSAGKKQMDALAECCIDASTRKDLLVNKIVLIVPKASKAGIKSFEDCMTDKVKLIALGNSSVPVGQYSEEIFKSLKGWEKVSAKASLGTNVKEVLSQTESGSVDCGVVYATDAATSKGGITVVATAPEGSHAPAVYPIAVLKRTANAEAAKAFVNYLSSPKAIAVFEKIGFNIVK

SEQ ID NO: 49159 - DNA, 381 bp, Unknown
  Obtained from environmental sample
  misc_feature (1)..(381): n is a, c, g, or t
gtgggcggcgggttcaaggccatatcgctcatccgccagttcgacgagctcggcatgaagagcgtggtcgtcggcacgcagacgggcaagaaggacgagtacgagatcatcaccgagctcgccggcgacggcgcggtcattttggacgacgcgaaccccgccgagctggagcgcttcatgttggagaaacaagccgacattttggttggcggcgtaaaggagcgcccgctggcctacaaattggggatggcgttctgcgaccacaaccacgagcgcaaacacccgcttgccggattcgagggaatagagaattttgtcaaggagatccacgcctccgtcaacagccccgtttggaaatatgtcaagggagacgcggcctga

SEQ ID NO: 49160 - protein, 126 aa, Unknown
  Obtained from environmental sample
  misc_feature (1)..(126): Xaa is any amino acid
MGGGFKAISLIRQFDELGMKSVVVGTQTGKKDEYEIITELAGDGAVILDDANPAELERFMLEKQADILVGGVKERPLAYKLGMAFCDHNHERKHPLAGFEGIENFVKEIHASVNSPVWKYVKGDAA

SEQ ID NO: 49161 - DNA, 390 bp, Unknown
  Obtained from environmental sample
  misc_feature (1)..(390): n is a, c, g, or t
ttggcactaagtgtggcaaatagttgtatatatggaatcgcgcacgtagcgatacttgcgtgtggttacaatccggcaatcgggtttattcatggtaaaaccgcgcaatctttcgtntacgatgtcgctgatttagttaagtttcagacggtgacgcaaatagcgtttcaagtagcaggagaaatatgtctaaatgtggatagagaggtacgttatcgttgtcgcgacctatttcataagaagaactttattcacaacctgataccaataatggataattgcattgggtttatagatgatacggatatagaacccgatagaactttacctaaatttgagttttggaactatgctgatagttgtattaagcaaatcgagcaaacgatttga

SEQ ID NO: 49162 - protein, 129 aa, Unknown
  Obtained from environmental sample
  misc_feature (1)..(129): Xaa is any amino acid
MALSVANSCIYGIAHVAILACGYNPAIGFIHGKTAQSFVYDVADLVKFQTVTQIAFQVAGEICLNVDREVRYRCRDLFHKKNFIHNLIPIMDNCIGFIDDTDIEPDRTLPKFEFWNYADSCIKQIEQTI

SEQ ID NO: 49163 - DNA, 684 bp, Unknown
  Obtained from environmental sample
  misc_feature (1)..(684): n is a, c, g, or t
ttgcggtattttcaggggcttggctatgaggtggtttccggcccggaagtggaaaccgactattacaattttgaagcgctcaacatgccgcccgaacatccggcccgcgacatgcaggatacgctgtatatcacggatcgcgtcctcatgcgcacgcatacctcgccggtgcaggcgcgctccatgaaaagccgcaagccgccgttggccgtcattgtgccgggcaaggtgtaccgccgcgactccgatctgacccatacgcccatgttccatcagatcgaagggctgctggtcgggaacaacgtgagcatggcccatttacgcggtacgcttaccgtattcctgcgcggggtcttcggcgcggaaacgcgggtgcgtttccgtcccagcttctttccgtttaccgaaccctcggcggaagccgacatttcctgctgcatctgcaacggcaagggccatacgggcgaagacgcctgccgcgtatgcaagggcacgggctgggtggaaattctcggctgcggcatggtggatccggcggtatttgatgccgtaggctacgatccggaggaagtgacgggttttgccttcggcctgggtgtcgagcgcgttgccatgctcaagtacggcatcggcgatttgcggatgtttttcgaaaatgacgcgcgctttctcgcgcaattttga

SEQ ID NO: 49164 - protein, 227 aa, Unknown
  Obtained from environmental sample
  DOMAIN (2)...(227): tRNA synthetases class II core domain (F)
  misc_feature (1)..(227): Xaa is any amino acid
MRYFQGLGYEVVSGPEVETDYYNFEALNMPPEHPARDMQDTLYITDRVLMRTHTSPVQARSMKSRKPPLAVIVPGKVYRRDSDLTHTPMFHQIEGLLVGNNVSMAHLRGTLTVFLRGVFGAETRVRFRPSFFPFTEPSAEADISCCICNGKGHTGEDACRVCKGTGWVEILGCGMVDPAVFDAVGYDPEEVTGFAFGLGVERVAMLKYGIGDLRMFFENDARFLAQF

SEQ ID NO: 49165 - DNA, 1053 bp, Unknown
  Obtained from environmental sample
  misc_feature (1)..(1053): n is a, c, g, or t
atgttcggccttccgttttcgggaggttttgattttaccgcgcaatggctaaaacgcctcggcgcgatgaacaataacgcgccgttctttaacggtaacgaaccgtacgcctacccggacgggttcgcgtcaagagacgagtataatcaggcgtatagactgcctccgcgtgaattccttatggaatacaaccagttttatttgtcgcttggtttctccacgggataccgctggccgactccggtagggaacctgtcgatcggcggaggcataagggttggtattttaagaaacgaatatgacgccgaaatctaccgtccctttgatcctgccctcagggagaggaataacgaatggacgcccaagaattcgatctggaccacgatttcattggatcagcgggacttgtattatgatccgtcgaaaggttattacgcgtatgaacgctttggcgtttacggccttttgtgggacgatatagaacgcgagtattattttagaaatgatttaaaagccgagtactatgtcaccctgtttaattttccggtaacggagaaatggttctttaagtgcgttttggccttccattcgggcttgtcagtcatattcgcgcatcccggacgggattccgcgataattgaagaagccaaccagctttcggttgacggcatgtttataggcaggggctggaattcggaataccgtanaaagggacttctcctggtggagaactgggtggaactgcggatcccccttgtacccggggtgtttgcctgggactttttctttgacgccgccggagtggagacggttcggggctactattttggtacaaacgacgaaggaaacaggaatttcacggttgacaatatgcgcttcagttttggcgggggcttgcgttttaccatgccccagttccctttacgtttcagcctggcgaaacgcttcaggaccaaagacggggaattcatatgggagcagggaagcatgttccgcaatgatgatccaagatcgggaatagatcctgttctctcatttgctatttcatattaa

SEQ ID NO: 49166 - protein, 350 aa, Unknown
  Obtained from environmental sample
  DOMAIN (1)...(331): Surface antigen
  misc_feature (1)..(350): Xaa is any amino acid
MFGLPFSGGFDFTAQWLKRLGAMNNNAPFFNGNEPYAYPDGFASRDEYNQAYRLPPREFLMEYNQFYLSLGFSTGYRWPTPVGNLSIGGGIRVGILRNEYDAEIYRPFDPALRERNNEWTPKNSIWTTISLDQRDLYYDPSKGYYAYERFGVYGLLWDDIEREYYFRNDLKAEYYVTLFNFPVTEKWFFKCVLAFHSGLSVIFAHPGRDSAIIEEANQLSVDGMFIGRGWNSEYRXKGLLLVENWVELRIPLVPGVFAWDFFFDAAGVETVRGYYFGTNDEGNRNFTVDNMRFSFGGGLRFTMPQFPLRFSLAKRFRTKDGEFIWEQGSMFRNDDPRSGIDPVLSFAISY

SEQ ID NO: 49167 - DNA, 546 bp, Unknown
  Obtained from environmental sample
  misc_feature (1)..(546): n is a, c, g, or t
ttgctatttcatattaacggggagcctggaatgaaaaaaacggttttactttttgctgcgtgttttctgacaacttctctttattcgcagcagcttacgcgctttgcggttgttgatttgaccaaggtgtattcggtttttctccgggaatcccgggctgtgcgcgagtttgaacagcgcagcgccgctatccaggcggaaattgataagatgaccaaggaaattcaggaattaagggtaaaacgaatcgaccttgtaaaccagggcgaccagaccggggcgctcaggctggaaaatgaaattaaccgcaagtcggaattcctgaaggaatactataccgtaaaaaccgccgagcttgaggatcagcgcagaaaacttgcccaatccgacagtttcatggaacaggtgtacagcgaaatacgatccatcgccgaaagcgaaggctacagcatggtgatgaacctgaaggacgcaatctggtacagccccacggtggacatcaccgacaaggttattcaaaatcttgttagtagatcacgccgctaa

SEQ ID NO: 49168 - protein, 181 aa, Unknown
  Obtained from environmental sample
  DOMAIN (18)...(176): Outer membrane protein (OmpH-like)
  misc_feature (1)..(181): Xaa is any amino acid
MLFHINGEPGMKKTVLLFAACFLTTSLYSQQLTRFAVVDLTKVYSVFLRESRAVREFEQRSAAIQAEIDKMTKEIQELRVKRIDLVNQGDQTGALRLENEINRKSEFLKEYYTVKTAELEDQRRKLAQSDSFMEQVYSEIRSIAESEGYSMVMNLKDAIWYSPTVDITDKVIQNLVSRSRR

SEQ ID NO: 49169 - DNA, 735 bp, Unknown
  Obtained from environmental sample
  misc_feature (1)..(735): n is a, c, g, or t
atgatggagaagacgctgggcagcggaattctgtggcttaaagttccgtcggtaaaggcggttatgaaggcccttcgccgccggatcagttccactgtggttgccgccctgcctgaacaggagccggttcaggccgccgaaaacagcgagccgttagctgacacggccgcgcctgccggaggggacatcgccgaagccaaagaaacgccggcggcttcgcctttccttgccaaggtttgcaacaacttgatagaaaggctgggcgcggaaaaggctgttgaagccctggtaacattaagttatggcgagtaccttgatcccggccgttacggtcctgtcactgaatttcaggaagaagatttccgtgagcctgccaaagccgccggtaaaagcgccggcggtagaaatatcggcaggagaagggaggatcggggacgcaggccttcggggccgcatgcgccggcgggcaagcgcggttttggcagggaattccgtgaagagacaggcgattttacccgggtctatgtaggccagggacggcagcacggcctgggcgccagggacatagccaatctgttaatgcgcgcgggcggcgttcccggccgtcttgtggatgaaatagaagtgaaagattactgttcgtttgcgaccctccctgcagatgccgccaaacgggcctgcgctttttcccgcaaagaccagcagtcgccggtaatacgccccgccaaaccctga

SEQ ID NO: 49170 - protein, 244 aa, Unknown
  Obtained from environmental sample
  DOMAIN (161)...(243): DbpA RNA binding domain
  misc_feature (1)..(244): Xaa is any amino acid
MMEKTLGSGILWLKVPSVKAVMKALRRRISSTVVAALPEQEPVQAAENSEPLADTAAPAGGDIAEAKETPAASPFLAKVCNNLIERLGAEKAVEALVTLSYGEYLDPGRYGPVTEFQEEDFREPAKAAGKSAGGRNIGRRREDRGRRPSGPHAPAGKRGFGREFREETGDFTRVYVGQGRQHGLGARDIANLLMRAGGVPGRLVDEIEVKDYCSFATLPADAAKRACAFSRKDQQSPVIRPAKP

SEQ ID NO: 49171 - DNA, 312 bp, Unknown
  Obtained from environmental sample
  misc_feature (1)..(312): n is a, c, g, or t
atgggccgagtgtttccgagacgaggcgaacaggcgcttgaatcaatcaaggatgaatacgagcctattccttcggactggaagatgcgttatcagatgaaccttgaccttcttaaaaaaggaagcataagggacatagcgagcatcgtgcgttccctgtaccacagaagcaaggttaaagaactgccgattcttgagcgcaaactatacgactccgctttaaggctgttggtagacgaagcgtcaatttcgcttaaaaaatccaaggaagaaattgaacagatgattttttccaggctggaacttgaataa

SEQ ID NO: 49172 - protein, 103 aa, Unknown
  Obtained from environmental sample
  misc_feature (1)..(103): Xaa is any amino acid
MGRVFPRRGEQALESIKDEYEPIPSDWKMRYQMNLDLLKKGSIRDIASIVRSLYHRSKVKELPILERKLYDSALRLLVDEASISLKKSKEEIEQMIFSRLELE

SEQ ID NO: 49173 - DNA, 762 bp, Unknown
  Obtained from environmental sample
  misc_feature (1)..(762): n is a, c, g, or t
gtgtccgccagtgtcgttatcactcccaaaccggggagcgacatcgctcaaaaccggaaaaagatcgagggcattcaaaagcttttaaaattcgctgttgaagggcttagggacgaaaacatagtaatcaccgatacgacgggactggttttaaacgattttgccggccttgccgaatgggacaggcttacattgatagatcgggaaacaaagatggtccgccagcttgaggcccaatacagggcgaagatccttaccaccctgcaaaagacctatggcgaagacagggttagagacctggacataaagattacaatggatatgtcgcaaaagtccgtggcaactgaggaatttttcccgataaccatgaacccccggactcccgggcttgcgtatgacgactcggtattgttgcaatccattccgcgttcaacggctacttcaaagacctactgggaaggcacgggctttaacccggaaggtcccgccggagtggaagggcaggttcctcccgcttacagggatatgtcaaacctgtacgggaaggtaaaccaggaaaccgcgacggtaaacgaggaaataaacaagcgggtatcgcaggaagaaaaaagccccgagataaacagggttacagtttcggttaatatagacggaacatggaaactaaaatatgatgaaaaacgtaacccggtaattactatcgatggggcaagggaaaggatatacactcccatatcgtctgaggacctcggccgaatctga

SEQ ID NO: 49174 - protein, 253 aa, Unknown
  Obtained from environmental sample
  DOMAIN (88)...(239): Flagellar M-ring protein C-terminal
  misc_feature (1)..(253): Xaa is any amino acid
MSASVVITPKPGSDIAQNRKKIEGIQKLLKFAVEGLRDENIVITDTTGLVLNDFAGLAEWDRLTLIDRETKMVRQLEAQYRAKILTTLQKTYGEDRVRDLDIKITMDMSQKSVATEEFFPITMNPRTPGLAYDDSVLLQSIPRSTATSKTYWEGTGFNPEGPAGVEGQVPPAYRDMSNLYGKVNQETATVNEEINKRVSQEEKSPEINRVTVSVNIDGTWKLKYDEKRNPVITIDGARERIYTPISSEDLGRI

SEQ ID NO: 49175 - DNA, 390 bp, Unknown
  Obtained from environmental sample
  misc_feature (1)..(390): n is a, c, g, or t
atggattggtttaaaaaattattagcccagatagggggcctctggggcaaatggtcaatgcttcagagaattatccttatcgggattgctgtcgctgttttggcgggtattgcggcccttataactgtgtcgtcttcgccaaatctgatttctgttatcgacgcgcccattagggatgaaacagcgcgagacaggattgtgatgcgccttaaccaggaaggcgtcagggtaacagtgagccctgcgggaattatccaggttgacgatcaggatactgccaggaggatgcgcggtattcttatacgtgaagatcttataccgcaaggtacggacccctgggcaatttttgacagggatcgctggacaatcacggacttgaaaggaacgtag

SEQ ID NO: 49176 - protein, 129 aa, Unknown
  Obtained from environmental sample
  misc_feature (1)..(129): Xaa is any amino acid
MDWFKKLLAQIGGLWGKWSMLQRIILIGIAVAVLAGIAALITVSSSPNLISVIDAPIRDETARDRIVMRLNQEGVRVTVSPAGIIQVDDQDTARRMRGILIREDLIPQGTDPWAIFDRDRWTITDLKGT

SEQ ID NO: 49177 - DNA, 441 bp, Unknown
  Obtained from environmental sample
  misc_feature (1)..(441): n is a, c, g, or t
ttgttatttagtatttgctattttatatttgttatntgctatgggaggggatttgttatgacactttttaaacctgaattgaatttcggcaacttgccgtatctgccgatgagcgtgacgcatgaaaaccacatgtctgtcaaagcgacggaatttaccgcaatggggaacaaaataaccgaaacgggcaaaaaaataggcgccgacgcggtaattcgttccggcacttttacggagtcgatgcttggcgctctggacaaggtcagcgcctatcagcagtttgcttccagcctgaaccagatggccattactgacccggattcggtcaacgttgaggacgttacgatagcccaggctgaagccatgatgtcgcttaatatagcccgcaatgtgctgaaccgtttggtacagggctggagggatttaatcaatacacgatga

SEQ ID NO: 49178 - protein, 146 aa, Unknown
  Obtained from environmental sample
  misc_feature (1)..(146): Xaa is any amino acid
MLFSICYFIFVXCYGRGFVMTLFKPELNFGNLPYLPMSVTHENHMSVKATEFTAMGNKITETGKKIGADAVIRSGTFTESMLGALDKVSAYQQFASSLNQMAITDPDSVNVEDVTIAQAEAMMSLNIARNVLNRLVQGWRDLINTR

SEQ ID NO: 49179 - DNA, 2295 bp, Unknown
  Obtained from environmental sample
  misc_feature (1)..(2295): n is a, c, g, or t
atgctggcgattgtcgtactatcgctgattgtatccattatgctggcgcttgccgttaccaggtctatcgctgtcccgctggcggaactggaagaagcggcggaaaaaatagcaagcggagaccgggacgttcagtttgagcagtcccataacaatgatgaaattgcccgattatcaaacagactgcaggaaacactgcatcacttgaatcaggttcagcagttaaaactggaagccatagaagcgcggcatgaaaaagaaaaagccgaagccgcctcaaaatcaaaagatgaatttctcgcgaagatgagccatgaaatacgcacgcccatgaacgccattataggcatggcggagcttgccttacgcgagaatatgccggacaccgcccgcaagcatatccttaccatcaagcaagcgggaaataatctcgtctcaataatcaacgacattctggatttctcaaaaattgagagcggaaaaatggaaatcgttcccgttaaatacctgctttcatccctgatcaacgacacggttaacattatccgtatacgaatcggagaaaaaccactgcggttttttaccaatattgacggaaatatccccaacagccttatcggagacgaagtgcgcctgcgccagattctccttaacctcctgtccaacgcggtaaagtactcggaaaaaggacatattggtttaaccattaccatagacaagagagacaaccagcanattctgctgaagatatccgtcattgataccggaaaagggatcaagccggaggatcaggcgaaactctttgatgaattngtccaggtagatatgaagaaaaatcagggcattgagggaacgggacttgggcttgccatcaccaggcgcctgtgtaccgccatgggcggagaaataagcgtggaaagcgaatacggcaaaggaagcgtgttcatggtagttataccacagggcattgaatcggaaacgccgttcgcttttgttgatgaagcggaaaaaaagaacgttctggtctatgaaagcaggctcgtctacgcgaaatcaatctgctggactttagaaaatatgaaagttccacatactatgataacggattataatgaatttgcttccgcgctttaccggaaaaaatggtcatatgtgttttcaagttacggcctttatgaaaagatcaaaccgctttacgcgaagaaggacgcctcgccttcccgcataaggggatgggaaaaacctcctcttgccttaatgatagaatggggaaccgaaaccggcatacagggcgcgcggtttatatccatacccgcgcattcactgtctattgccaatgtacttaacgataaagaggacagcaaagggcatataaaaagttttgatgttatgcggtttacttttccaagcgcgcggattcttgttgtggatgacattccgactaacctgagaatagtcgacggccttcttgcgccatacaaggctaaggtggatacatgccttagcggctcacaagccatagaacttgtaaaacgcgcggctttggaaaaacgagggtacgacattgttttcatggatcacatgatgcctgaaatggacggtattgatacggtaaagatcatccgttcgctggaaggagaacacttccgtaatatgcctataatagcgttaacagctaatgctgttgcaggcatgcaggaaatgtttctggaaaacggctttaatgattttatctccaaacctatagatgtcgctaatctgaatgaagttattaaccgctggataggggaagataaaagagaagagagaaaagaggaaaaggaagatgtaaaagagaaaagagaaaagagaatagagaaaaaagaagagagaaaagtgaatgagcaaccaacggttagcaatgaacaatcagcaatacgttccatacatttgattccgggacttgatacggcgaagggtatttccatgacaggcggatcccaagaggcttataaaatggtattggaaatatattgcaaggacattgaagacagaatgcagataatccaaaatattcccgaggcggatacactgcctctgtttattatcaatgttcacgcgctgaaatcctcgtcggcaagccttggagcaagagacgtttccgcgcaagccaaggaacttgaagccgctggcaaagcggaagatatggcgtatatccgcgaacgcttgcctgtttttttgcaaatgctgatggaactaaaagaaaatatccgtgacgcgctgcaaaataatgaagccgaacttgacaagacatga

SEQ ID NO: 49180 - protein, 764 aa, Unknown
  Obtained from environmental sample
  SIGNAL (1)...(24)
  DOMAIN (666)...(749): Hpt domain
  misc_feature (1)..(764): Xaa is any amino acid
MLAIVVLSLIVSIMLALAVTRSIAVPLAELEEAAEKIASGDRDVQFEQSHNNDEIARLSNRLQETLHHLNQVQQLKLEAIEARHEKEKAEAASKSKDEFLAKMSHEIRTPMNAIIGMAELALRENMPDTARKHILTIKQAGNNLVSIINDILDFSKIESGKMEIVPVKYLLSSLINDTVNIIRIRIGEKPLRFFTNIDGNIPNSLIGDEVRLRQILLNLLSNAVKYSEKGHIGLTITIDKRDNQXILLKISVIDTGKGIKPEDQAKLFDEXVQVDMKKNQGIEGTGLGLAITRRLCTAMGGEISVESEYGKGSVFMVVIPQGIESETPFAFVDEAEKKNVLVYESRLVYAKSICWTLENMKVPHTMITDYNEFASALYRKKWSYVFSSYGLYEKIKPLYAKKDASPSRIRGWEKPPLALMIEWGTETGIQGARFISIPAHSLSIANVLNDKEDSKGHIKSFDVMRFTFPSARILVVDDIPTNLRIVDGLLAPYKAKVDTCLSGSQAIELVKRAALEKRGYDIVFMDHMMPEMDGIDTVKIIRSLEGEHFRNMPIIALTANAVAGMQEMFLENGFNDFISKPIDVANLNEVINRWIGEDKREERKEEKEDVKEKREKRIEKKEERKVNEQPTVSNEQSAIRSIHLIPGLDTAKGISMTGGSQEAYKMVLEIYCKDIEDRMQIIQNIPEADTLPLFIINVHALKSSSASLGARDVSAQAKELEAAGKAEDMAYIRERLPVFLQMLMELKENIRDALQNNEAELDKT

SEQ ID NO: 49181 - DNA, 744 bp, Unknown
  Obtained from environmental sample
  misc_feature (1)..(744): n is a, c, g, or t
gtggggagaaacagcctgtccggcctcgcgtttgggttgggaacttttatttctgtcggtctggttgtaatcatccaactgctcattggtcgcagtgcattatatctttggcttatgtttttggttttttcactgttgggattaggcactttgttatacgatacgcacataacgattatttccggttctttcgcctacggcctgggggacggcctcggttacattgttatctgctatatgtgcgccggggcaatcaagcggagcaagtctttgcgaatgttcaggctgtactgccttatgttctttgtcgagtattttgttatctcaggacttttttccctttactttaattattttgacagccccaataagtttcttgctttcggcgttgtgctggtactggtcagcgtcagccttttgctcatgccgtttatgcaaaagagattgtttgatgcggactggacagacggcctttaccttcgggacatggaagaatattccctgccctttgcgcagacggaagcgattaacgcgcaaaacaatcttgatctaacgccccgtgaagaagaaatatttaccatgctgctttcgggcaaagcacctaaagaaatcgcctataccctgaaaatcagttactatacggttctttttcatcaaaaaaatctttaccgcaagttaggtattcagagcagggcggaactctttgcaaggtacaagactatcccaactgaaaaaatcacatag

SEQ ID NO: 49182 - protein, 247 aa, Unknown
  Obtained from environmental sample
  SIGNAL (1)...(20)
  DOMAIN (181)...(238): Bacterial regulatory proteins, luxR family
  misc_feature (1)..(247): Xaa is any amino acid
MGRNSLSGLAFGLGTFISVGLVVIIQLLIGRSALYLWLMFLVFSLLGLGTLLYDTHITIISGSFAYGLGDGLGYIVICYMCAGAIKRSKSLRMFRLYCLMFFVEYFVISGLFSLYFNYFDSPNKFLAFGVVLVLVSVSLLLMPFMQKRLFDADWTDGLYLRDMEEYSLPFAQTEAINAQNNLDLTPREEEIFTMLLSGKAPKEIAYTLKISYYTVLFHQKNLYRKLGIQSRAELFARYKTIPTEKIT

SEQ ID NO: 49183 - DNA, 375 bp, Unknown
  Obtained from environmental sample
  misc_feature (1)..(375): n is a, c, g, or t
ttgggttatcgcggccccagctttgacgcggattttgcgtattctcttgcttatcttggcagggcgaatacgcgaatgaaaaaaaacgcgctgatggaagcggtttccgattacgagcagtatcttctgcttgatccgcgggctccccagcgccggtcaatcgagcggcttattcttctgataaagagcgaatatgccgaggcggaaaggaagcggctggtcgccgaggaagtggcccggcttgaggcggaacgaaagcagcgccttttggacgaggttacggcttcgctccagggcgccgcagggtcaagcaagggcctttccacaggagccgaggatattgagggatatgagggggaatttgaacttgagtaa

SEQ ID NO: 49184 - protein, 124 aa, Unknown
  Obtained from environmental sample
  misc_feature (1)..(124): Xaa is any amino acid
MGYRGPSFDADFAYSLAYLGRANTRMKKNALMEAVSDYEQYLLLDPRAPQRRSIERLILLIKSEYAEAERKRLVAEEVARLEAERKQRLLDEVTASLQGAAGSSKGLSTGAEDIEGYEGEFELE

SEQ ID NO: 49185 - DNA, 798 bp, Unknown
  Obtained from environmental sample
  misc_feature (1)..(798): n is a, c, g, or t
ttgccgtattatgtttttgtggcaagacgaaaagcggcaggaaattcaaaaaccagaggttcccggacaatagtcatattctggcttgtttttataatcgtaattatctgtatttttatggcaaacgcctctaccattcagaagaattttaatctttttaaaacgcgtatgactgtatctcccgccgcggaagaagaaataacagcggaagaagatcctcccatttcggtcgtgatagagcccgcccccaaacccgctgttactatcgaacaaaaaccgcagacgcccgaacctgaaaaaaaacctcagaccgagaaaaaacccgctgatgaaaaacagacaaagtcggctgctcaaaaagaaaaagaaaagcccgtgcagacaagggacaggactatttattttgccaatgtcggaagcgatgggcagattctccattcaaaggtaacgcgcaaaattccagtctcggattcgcctatgcaggacgttttaaacgctttgcttgccggtcctacgacggcggaattaagcaaggggcttcttaaccttattccaaaaaacacaaggatactttccgcgacagttaggggaagtaccgcatacatcaattttagcgaagattttttatttaacacttttggcgtggaaggttatgtcgcgcaacttaggcagatcgtttggacggtcactgagtttcaaaatgtaaaagacgtgcaaatattagttgaaggcagaagacttgattatcttggcgaaggcatctggattggaagcccaatcagccgtcaatcattctaa

SEQ ID NO: 49186 - protein, 265 aa, Unknown
  Obtained from environmental sample
  misc_feature (1)..(265): Xaa is any amino acid
MPYYVFVARRKAAGNSKTRGSRTIVIFWLVFIIVIICIFMANASTIQKNFNLFKTRMTVSPAAEEEITAEEDPPISVVIEPAPKPAVTIEQKPQTPEPEKKPQTEKKPADEKQTKSAAQKEKEKPVQTRDRTIYFANVGSDGQILHSKVTRKIPVSDSPMQDVLNALLAGPTTAELSKGLLNLIPKNTRILSATVRGSTAYINFSEDFLFNTFGVEGYVAQLRQIVWTVTEFQNVKDVQILVEGRRLDYLGEGIWIGSPISRQSF

SEQ ID NO: 49187 - DNA, 333 bp, Unknown
  Obtained from environmental sample
  misc_feature (1)..(333): n is a, c, g, or t
gtggacttccacgccgaatccagccgcgaaaaagaagctcttgcctattatgccgacgggcgcgcggcggtaattgccggtactcacacgcacatacaaaccgccgatgagcggatattgccaaagggtagcgcatacatcaccgatcttggaatgaccggcaacgttgacagtgtaatcggcatggacccgaaaatttgcattgaacgcgcccgcaagcaggttttgtatcacatggaaatagcgccatcggacaaaccgggaaaaatgcagggcattatcgcggagattgatacagagacaggaagagccgtttcgattaaaagaatttag

SEQ ID NO: 49188 - protein, 110 aa, Unknown
  Obtained from environmental sample
  misc_feature (1)..(110): Xaa is any amino acid
MDFHAESSREKEALAYYADGRAAVIAGTHTHIQTADERILPKGSAYITDLGMTGNVDSVIGMDPKICIERARKQVLYHMEIAPSDKPGKMQGIIAEIDTETGRAVSIKRI

SEQ ID NO: 49189 - DNA, 483 bp, Unknown
  Obtained from environmental sample
  misc_feature (1)..(483): n is a, c, g, or t
atggtttataccggcacaacgggcagtactaataagatgagtttcaagagcggttcttgtagattaattctcctgcttttctttgtctttcctttgatgaggattggggctcaggttcccttaacgccggattctgacgtggatgtgccggaggtcgtttcccattccgcggtagtaatggatgccgccacaggaaccttcctttactataaaaaccctgacgatgaaatccctccggcttccctgacaaaactaatgaccatacatgtggccctaaaagccattggggacaaccgcgccgttctggatgagccgatacggcctcccaaggaaagctgggctatcaatcagcctccccgttccagcctgatgtttcttgccgatgggcagaggaccacccttagggaactgttcctggggctggcgatctcttcgggaaacgacgccgcggtagcggtagcccttcgtttgctccaagcgtaa

SEQ ID NO: 49190 - protein, 160 aa, Unknown
  Obtained from environmental sample
  DOMAIN (43)...(160): D-alanyl-D-alanine carboxypeptidase
  misc_feature (1)..(160): Xaa is any amino acid
MVYTGTTGSTNKMSFKSGSCRLILLLFFVFPLMRIGAQVPLTPDSDVDVPEVVSHSAVVMDAATGTFLYYKNPDDEIPPASLTKLMTIHVALKAIGDNRAVLDEPIRPPKESWAINQPPRSSLMFLADGQRTTLRELFLGLAISSGNDAAVAVALRLLQA

SEQ ID NO: 49191 - DNA, 453 bp, Unknown
  Obtained from environmental sample
  misc_feature (1)..(453): n is a, c, g, or t
gtggatctgctgctccagtcctgccaactccatgacgtggggaaaatatcaattgatgacaatatcctcaaaaaacccggaaggcttagtgatgaggaatttgaattaatgaaacaacacgcggtctttggggaaaggataattgaaaaaattgaaaccgtggcaaagggaagcgattttctaaaatacgcgaaaatatttgccgccagccaccacgaaaaatgggacggcgccggttatccccggggactcaagggaaacgatatacccctgctgggccgtattatggctattgcggatgtatacgatgcccttacatcggtccgtccatataaaagagcctttacccacgaggaggctgtgaagataatcagcgacggcagcggaactcagttcgaccccgtgttggtcgaggccttcatcaggagttcggaaaagttcagaaaagaataa

SEQ ID NO: 49192 - protein, 150 aa, Unknown
  Obtained from environmental sample
  DOMAIN (1)...(105): HD domain
  misc_feature (1)..(150): Xaa is any amino acid
MDLLLQSCQLHDVGKISIDDNILKKPGRLSDEEFELMKQHAVFGERIIEKIETVAKGSDFLKYAKIFAASHHEKWDGAGYPRGLKGNDIPLLGRIMAIADVYDALTSVRPYKRAFTHEEAVKIISDGSGTQFDPVLVEAFIRSSEKFRKE

SEQ ID NO: 49193 - DNA, 501 bp, Unknown
  Obtained from environmental sample
  misc_feature (1)..(501): n is a, c, g, or t
atgtcgttaataatggccgccctgcggtatcaaaataaaaatccgccgcgcaaggataaacacggcagtaacattaccgccgctctcgccggtgcgcagcgtcttttaaaaaagcgttcccttgtcgtcgtaatttcggactttttcagcgttaactgggagcatgaaatggcaaatctttgccgcaaacacgacgttatcgccctgcgagttgttgatccgcccaatctcccgtggaaagggttaataacgctggaagaccccgaaaccggagtgcgccttgaagctccggcgggcatggaatcttttaaggaaagctggctgcaatggcacaaagagcgctccggtttgtgggaaaatctttgccgacgagcgggcgcgtcttttcttgaacttacaaccgaagcggatgcgccttcttccctgttaaaatttttcggctctcgcggatttggcgcacatggatttaccagacatgaggcgcacaggtacaaaaaatga

SEQ ID NO: 49194 - protein, 166 aa, Unknown
  Obtained from environmental sample
  misc_feature (1)..(166): Xaa is any amino acid
MSLIMAALRYQNKNPPRKDKHGSNITAALAGAQRLLKKRSLVVVISDFFSVNWEHEMANLCRKHDVIALRVVDPPNLPWKGLITLEDPETGVRLEAPAGMESFKESWLQWHKERSGLWENLCRRAGASFLELTTEADAPSSLLKFFGSRGFGAHGFTRHEAHRYKK

SEQ ID NO: 49195 - DNA, 690 bp, Unknown
  Obtained from environmental sample
  misc_feature (1)..(690): n is a, c, g, or t
atggggcgtacggttaagatttttgataccacccttcgggacggcgagcagtcgccgttgtgcagcatgaacatgcaggaaaagatcgaggtagccaggcaccttgaaaagcttaatgtggatgttatggaagcgggtttccccgtgtcaagccagggcgatcttgaggcggttaaggcaatcgcggggatcataaagaactgctcggtagcggggctctgccggtgcctgccaaaggacattgacgccgccagggaggcgcttgggaaagctgcggcgcccagggttcacgtctttatcgccacaagccccgtacacatggaatacaagctcaagatgacgcgggagcaagtcctggaacaggcgattaccgcggtcaagtacgcgaagcaattctgtgatgacgtggagttttccgccgaagacgccttccggagcgatcctgattttgtgtgcagggtcttcggcgaagccatcgccgccggggcaaagacggtgaactttcccgataccgtgggctatgccctgcccgtggaattcggggagagggtgaagtatatcaaggagcatacgccggggatggaaaaggccgtcctttcggttcactgccacaacgacctgggccttgcggcggccaacagcctcgcggctattgcgaacggcgcggatcaggttgagttgcacgattaa

SEQ ID NO: 49196 - protein, 229 aa, Unknown
  Obtained from environmental sample
  DOMAIN (13)...(229): HMGL-like
  misc_feature (1)..(229): Xaa is any amino acid
MGRTVKIFDTTLRDGEQSPLCSMNMQEKIEVARHLEKLNVDVMEAGFPVSSQGDLEAVKAIAGIIKNCSVAGLCRCLPKDIDAAREALGKAAAPRVHVFIATSPVHMEYKLKMTREQVLEQAITAVKYAKQFCDDVEFSAEDAFRSDPDFVCRVFGEAIAAGAKTVNFPDTVGYALPVEFGERVKYIKEHTPGMEKAVLSVHCHNDLGLAAANSLAAIANGADQVELHD

SEQ ID NO: 49197 - DNA, 1083 bp, Unknown
  Obtained from environmental sample
  misc_feature (1)..(1083): n is a, c, g, or t
atgggcaaccccgaagccgcggcttccgcctacagcctctacgactatgacatcgccggagagttgggcggttggggcgctcttgccaacctcagggaacgctgcatgaaacgcgggatcaggctcggatccgacatggtgccaaaccataccggactggacagccgctggatgatagaacacccggacaggtttttacagcttccgtatccgcccttccctacctacaactacaactgcgggaatctgtcgggcagggacgacgtaaccgttcaaatcgaagagcattattttaaccacagcgacgcggcggtcgtctttaaaaggattgacaacaataccggccatacccgctacatctaccacggcaatgacggcacgtccatgccctggaacgataccgcgcagatagacttccttaaccccgaagcgcgcgaagcggtgatccgcacgattatcggcgtgtgccagcaattctcgattgtgcgctttgacgcggcaatgaccctcgccaagcggcacatacagcgcctgtggttcccggtgccggggacgggcggggcaatagccagccgcgccgaacattcgatctccaacgatgaatttaaccgccgcattcccaacgaattctggcgcgaggtagtggatcgctgcgccgccgaagccccgcacaccctgctcctcgccgaagccttctggatgatggagggctactttgtccgtactctcggtatgcaccgcgtgtacaattcggcgtttatgaacatgctgaaaaacgaggacaacgcgaagtaccgggcgacaattaaaaatactatggaattcgatccggaaatcctcaagcgttttgtcaattttatgaacaaccccgacgaggaaaccgccgtggcgcagttcggcaaggcgacaagtacttcggcatctgcaccctgcttgtcaccatgccgggactgcccatgttcgggcacggccagattgagggcttcgaggaaaaatacggcatggagtaccgccgttcttaccgcgacgagaaggccgacggttatctggtggacaggcatgagcgtgaaattttccccttga

SEQ ID NO: 49198 - protein, 360 aa, Unknown
  Obtained from environmental sample
  misc_feature (1)..(360): Xaa is any amino acid
MGNPEAAASAYSLYDYDIAGELGGWGALANLRERCMKRGIRLGSDMVPNHTGLDSRWMIEHPDRFLQLPYPPFPTYNYNCGNLSGRDDVTVQIEEHYFNHSDAAVVFKRIDNNTGHTRYIYHGNDGTSMPWNDTAQIDFLNPEAREAVIRTIIGVCQQFSIVRFDAAMTLAKRHIQRLWFPVPGTGGAIASRAEHSISNDEFNRRIPNEFWREVVDRCAAEAPHTLLLAEAFWMMEGYFVRTLGMHRVYNSAFMNMLKNEDNAKYRATIKNTMEFDPEILKRFVNFMNNPDEETAVAQFGKATSTSASAPCLSPCRDCPCSGTARLRASRKNTAWSTAVLTATRRPTVIWWTGMSVKFSP

SEQ ID NO: 49199 - DNA, 507 bp, Unknown
  Obtained from environmental sample
  misc_feature (1)..(507): n is a, c, g, or t
atgccgggactgcccatgttcgggcacggccagattgagggcttcgaggaaaaatacggcatggagtaccgccgttcttaccgcgacgagaaggccgacggttatctggtggacaggcatgagcgtgaaattttccccttgatgaagcggcgggccctgttttcaggcagcagcgagttcaggctgtacgatgtgtttactgaaggcggatcggttaacgaaaacgtattcgcgtattccaaccgcgcgtggatccacggccatgaggaaagggcgcttatcttttataataattcgtattacgaaactgccggttggattaagatgagcgatccggcgattccgcatggcagcggcaaacagcgggacagcctgcaccaggcccttgccctgcatgacggggacaactggtttacgctgttcagggatcagcgatctaatctgtggtacataagatcgtcaaaggcgataagcgagaacgggttctttgtcgcgcttaaaggatag

SEQ ID NO: 49200 - protein, 168 aa, Unknown
  Obtained from environmental sample
  misc_feature (1)..(168): Xaa is any amino acid
MPGLPMFGHGQIEGFEEKYGMEYRRSYRDEKADGYLVDRHEREIFPLMKRRALFSGSSEFRLYDVFTEGGSVNENVFAYSNRAWIHGHEERALIFYNNSYYETAGWIKMSDPAIPHGSGKQRDSLHQALALHDGDNWFTLFRDQRSNLWYIRSSKAISENGFFVALKG

SEQ ID NO: 49201 - DNA, 1017 bp, Unknown
  Obtained from environmental sample
  misc_feature (1)..(1017): n is a, c, g, or t
gtgggggcaaaagttcgctccgatgatattcttgttggcaaagtaacccccaaaagcgaaaccgagactacacccgaatttaagctccttaactcgatattcggcgagaaggccaaagaggtgcgggattcctccctccgggtgccgcacggtattgagggaacgatcattgatattcagcgtctaaggcggacagaaggcgatgatcttaaccccggagtggatgaggtggttaaggttttaattgccacaaaacgaaaactccgtgaaggggataagatggcaggccgtcacggcaacaagggcgttgttgcccgcatccttccggaagaagatatgccctacatggaagacggtacgccgcttgatctttgccttactcctctgggggttccttccagaatgaacattggccagttactcgaaacagagcttggctgggccgcctcaactctggacgagtggtattccgcgccggtgttccagtcgccttcgactgatcaaattgaggaaaagctgaaagaagcggggcttcctgtaacaagcaaggccatactcagagacggccgttcaggcgaaccgtttataaatccaattttctgcgggatcatttacttcctcaagcttcaccatctggtagatgataaaatgcacgcccgcgcaacaggcccctactcgctggttacccagcagccgttgggcggcaaggcccagttcggcggccaaaggttgggcgaaatggaagtctgggcgcttgaagcctacggagcggctcacactttgcaggagctccttactattaaatccgacgatatgaccgggaggtctaagatctacgaagccattgtaaagggcgagccttcgaccacagcgggaatacctgagtctttcaacgttctggttcaggaattgcggggcctggcgctggatcttaccatttatgataacaagaacaagcagattcccctcaccgagcgtgatgaggatcttattgccaagagcgggtccaatttttaa

SEQ ID NO: 49202 - protein, 338 aa, Unknown
  Obtained from environmental sample
  DOMAIN (240)...(316): RNA polymerase Rpb2, domain 7
  misc_feature (1)..(338): Xaa is any amino acid
MGAKVRSDDILVGKVTPKSETETTPEFKLLNSIFGEKAKEVRDSSLRVPHGIEGTIIDIQRLRRTEGDDLNPGVDEVVKVLIATKRKLREGDKMAGRHGNKGVVARILPEEDMPYMEDGTPLDLCLTPLGVPSRMNIGQLLETELGWAASTLDEWYSAPVFQSPSTDQIEEKLKEAGLPVTSKAILRDGRSGEPFINPIFCGIIYFLKLHHLVDDKMHARATGPYSLVTQQPLGGKAQFGGQRLGEMEVWALEAYGAAHTLQELLTIKSDDMTGRSKIYEAIVKGEPSTTAGIPESFNVLVQELRGLALDLTIYDNKNKQIPLTERDEDLIAKSGSNF

SEQ ID NO: 49203 - DNA, 645 bp, Unknown
  Obtained from environmental sample
  misc_feature (1)..(645): n is a, c, g, or t
ttggatggcacaaccatcgaactcccgccaggcatgagtattgaaagaacagtgcaaaaatggttcggcaacgccaaaaaggccgaaaggggcttggtgagggtggacgcgctggaaagggagcgcatgagacagataatggaacttgagcgagcaagcggccaagatgcaccaacaataaacaatgtgagaaaaaagacctcgccgcaagtcaaacaagcaggctcaaccgctcaggggaagaaaaaaatggatcagcaaaaagaccacaagcgaaacgatgtaaagggcagggcctttagatcccagatggtggaaggtttcgaggtgctgattgggaggggcgacaccgacaatgacactttgacttttaaggtggccagcccaccggacttttggctccacgtcgcttcagtgccagggagccacgttgtgatcaggaaccccgacaaaattagcgagccgcccaaggctgtactggagcgcgcggcggaacttgcggccttctatagcaaagctagggatggcggcaaggttgaagttcattggtgccgtgcggccgatgtccacaagccgaggggcttcgagcctggcaaggtctttctgaaaaactacaaaagcctaaaggtatatccgaaacaatag

SEQ ID NO: 49204 - protein, 214 aa, Unknown
  Obtained from environmental sample
  DOMAIN (102)...(191): Domain of unknown function (DUF814)
  misc_feature (1)..(214): Xaa is any amino acid
MDGTTIELPPGMSIERTVQKWFGNAKKAERGLVRVDALERERMRQIMELERASGQDAPTINNVRKKTSPQVKQAGSTAQGKKKMDQQKDHKRNDVKGRAFRSQMVEGFEVLIGRGDTDNDTLTFKVASPPDFWLHVASVPGSHVVIRNPDKISEPPKAVLERAAELAAFYSKARDGGKVEVHWCRAADVHKPRGFEPGKVFLKNYKSLKVYPKQ

SEQ ID NO: 49205 - DNA, 798 bp, Unknown
  Obtained from environmental sample
  misc_feature (1)..(798): n is a, c, g, or t
atggccgaagggcctgaagagacgctgaaactgaccgaacacacacagccagccatcctcacgcacagcatcatggccttggaattttgtcgcgcaagactgccagagccagattttgtggcagggcacagccttggcgaatatagtgcgctagtggctgctggctccattaatttcgaggctgccgtagtcgccgtcaaggctagggggcgcttcatgcaagaggctgtcccatttggcaccggcgacatggtcgccgtcattggcatggcggcatcagacgtggaggccgcttgcactgctgccaccgaatcaacgggcaaggtggtggttcccgcaaactacaatggcgcggggcagatagtcatcgcagggcatacagaggcggttgacgcggccgttgaaatattgaaaagcaagggcggccgtaagatgatgaaactgcctgtcagtgcgccattccacagcccgctgatggagccggcgcaaagggcaatggaaccaataattaagtctttggaaatcaaaccccccatttgccccctcatcaacaatgtggacgccgtgccagtgacagacccagaggtcatccgccaagggcttatccgccagatacccagcccggtgcgctgggaggacacgatgaaattccttttgtcccagggcgtgacgacctacattgggcttggcggcaaggtgctgaccacaatagccatcaagatggcaaaagaggccggggtagagataaaggcgctgtcaatcggcgccccggacgacctggagcaactgcaaaattaa

SEQ ID NO: 49206 - protein, 265 aa, Unknown
  Obtained from environmental sample
  DOMAIN (1)...(265): Acyl transferase domain
  misc_feature (1)..(265): Xaa is any amino acid
MAEGPEETLKLTEHTQPAILTHSIMALEFCRARLPEPDFVAGHSLGEYSALVAAGSINFEAAVVAVKARGRFMQEAVPFGTGDMVAVIGMAASDVEAACTAATESTGKVVVPANYNGAGQIVIAGHTEAVDAAVEILKSKGGRKMMKLPVSAPFHSPLMEPAQRAMEPIIKSLEIKPPICPLINNVDAVPVTDPEVIRQGLIRQIPSPVRWEDTMKFLLSQGVTTYIGLGGKVLTTIAIKMAKEAGVEIKALSIGAPDDLEQLQN

SEQ ID NO: 49207 - DNA, 300 bp, Unknown
  Obtained from environmental sample
  misc_feature (1)..(300): n is a, c, g, or t
gtgtcctcccagcgcaccgggctgggtatctggcggataagcccttggcggatgacctctgggtctgtcactggcacggcgtccacattgttgatgagggggcaaatggggggtttgatttccaaagacttaattattggttccattgccctttgcgccggctccatcagcgggctgtggaatggcgcactgacaggcagtttcatcatcttacggccgcccttgcttttcaatatttcaacggccgcgtcaaccgcctctgtatgccctgcgatgactatctgccccgcgccattgtag

SEQ ID NO: 49208 - protein, 99 aa, Unknown
  Obtained from environmental sample
  misc_feature (1)..(99): Xaa is any amino acid
MSSQRTGLGIWRISPWRMTSGSVTGTASTLLMRGQMGGLISKDLIIGSIALCAGSISGLWNGALTGSFIILRPPLLFNISTAASTASVCPAMTICPAPL

SEQ ID NO: 49209 - DNA, 894 bp, Unknown
  Obtained from environmental sample
  misc_feature (1)..(894): n is a, c, g, or t
gtggatataaaaccagaggatatattatttgacccttgctgcggcacaggcggttttttgattgcagggatgcacaggatgttagagttggcaaaggataaagcccaaaaaaacagcataagaaaaaaccaaatctatgggattgaactccgcgaagatatgttttccattgcaacgactaatatgattttaagaggcgatggcaaaagcaacatagaacaaaatgattttctcaaaacgtcaacggctgagttgaagcaaaaaggatttacggttagctttatgaacccgccttattcacaggcaaaaaccagagctacgcagcacttagccgaaatcggttttatagagcatctgctggattgtatgagtgcaaactcccgcgttgtggttatagttccgcagtcaaccatggtaggtaaaaccaaagaaactagggcggtgaaaaaatccatattggaaaaacatactttaaaaggcgtgataacattgaacaaacagacattttatcgcataggcacaagcccgtgcatagcggtatttaccgcaggcgttccgcacaaaaaggaaaaacttgtaaagtttataaactacgaagatgacggttatattgtgaataaaaatatagggcttgtaaggacggagcgcgcccaggcacaacatcaaaaacttatggatgtatggtgcaacgaccgcgatgctgaaattaaattcatggtcaaaacacggataaaagctgatgacgaatggctgcactctttttattgctttaatgacgaaataccaaccgatgcggattttgaaaaaacaatggcggattatctaacctttgagttcaatatgatttctcacaaccgaggatatttattcggtatggaggagaaaaatgagtaa

SEQ ID NO: 49210 - protein, 297 aa, Unknown
  Obtained from environmental sample
  DOMAIN (3)...(279): N-6 DNA Methylase
  misc_feature (1)..(297): Xaa is any amino acid
MDIKPEDILFDPCCGTGGFLIAGMHRMLELAKDKAQKNSIRKNQIYGIELREDMFSIATTNMILRGDGKSNIEQNDFLKTSTAELKQKGFTVSFMNPPYSQAKTRATQHLAEIGFIEHLLDCMSANSRVVVIVPQSTMVGKTKETRAVKKSILEKHTLKGVITLNKQTFYRIGTSPCIAVFTAGVPHKKEKLVKFINYEDDGYIVNKNIGLVRTERAQAQHQKLMDVWCNDRDAEIKFMVKTRIKADDEWLHSFYCFNDEIPTDADFEKTMADYLTFEFNMISHNRGYLFGMEEKNE

SEQ ID NO: 49211 - DNA, 510 bp, Unknown
  Obtained from environmental sample
  misc_feature (1)..(510): n is a, c, g, or t
atgagtaattgggaagcatttccgatggaacagatttttacggaatttgaaaaaggcaaatgttccaacgctgtggccctaacgccatcggacaatggcggattgccgtatatcggggcaaagtttacagacggcggggtgatgaaattcacaaaaaaagaaccgcgattggcaatgaacggaaacggaattatttttgttaatagcggagatggctctggcggtttggcgttttataaaagagaaaaattcataggctcaacaggaatttcaataggcagaaatccaaaattgaataaatatcattttatgtttatcgcaacttcaatttgcaagaatgccaacaaatatggttttgggtacgcccgcacagaaaagagattaaaacgtgatagaattctgctgcccgcaaaagctggtcaaccggattggaaatacatggaaaactatatgcgtaaagttgagcagaaattgttggctaggtataagaaatatctgaaaattatttaa

SEQ ID NO: 49212 - protein, 169 aa, Unknown
  Obtained from environmental sample
  DOMAIN (86)...(154): Protein of unknown function (DUF1603)
  misc_feature (1)..(169): Xaa is any amino acid
MSNWEAFPMEQIFTEFEKGKCSNAVALTPSDNGGLPYIGAKFTDGGVMKFTKKEPRLAMNGNGIIFVNSGDGSGGLAFYKREKFIGSTGISIGRNPKLNKYHFMFIATSICKNANKYGFGYARTEKRLKRDRILLPAKAGQPDWKYMENYMRKVEQKLLARYKKYLKII

SEQ ID NO: 49213 - DNA, 366 bp, Unknown
  Obtained from environmental sample
  misc_feature (1)..(366): n is a, c, g, or t
atggaaaggatatgtatgttaatggaaataaaagataaaaacacattgcttattgttgacgatgagaatatcagtataaaagtcttggtagacatattgagtttggaatacactatttttacagcgacaagcgggcaaaatgccattgaaaaagccaaagaaaataaacctgaccttattctgctggatgttgtaatgccggatatggacggatacaatacgctttccgaacttaaaaaatgtgaagatacttacaaaatcccggtaattattatcaccgggcttgacaatgaagaaaacgaagaaaaggcgcttaccctcaatgcggctgattatctgacaaaacccatcaacccgatgatgtaa

SEQ ID NO: 49214 - protein, 121 aa, Unknown
  Obtained from environmental sample
  DOMAIN (14)...(118): Response regulator receiver domain
  misc_feature (1)..(121): Xaa is any amino acid
MERICMLMEIKDKNTLLIVDDENISIKVLVDILSLEYTIFTATSGQNAIEKAKENKPDLILLDVVMPDMDGYNTLSELKKCEDTYKIPVIIITGLDNEENEEKALTLNAADYLTKPINPMM

SEQ ID NO: 49215 - DNA, 468 bp, Unknown
  Obtained from environmental sample
  misc_feature (1)..(468): n is a, c, g, or t
ttgatagaactcgcgattaaagaaggaagatctgtaaaaccggatctcaagattggggtctgcggagaacacggcggagatcctgcgtctattgacttctgttatagagcagggttgagctacgtatcatgttcacccttccgggtgccgttagcgcgtcttgccggcgcgcaggcggttataaaaaataccggaaagaaaataatgggaggggaaacagttaaggctgcaaaacccgccactgccaaggtgaagggcagtaaaaaacctttaaagggaggcaagaaaatggcagtaacatctgcaaagaagccagcggcgaaaaaacctgctgcaaagaaacctgcggctaagaagaccgcaaagaaacctgcggctaagaaggccgtaaagaaacctgcggctaagaaagccgtaaagaagccggctgcaaaaaagacagccgcaaaaaaaacggctgcaaaataa

SEQ ID NO: 49216 - protein, 155 aa, Unknown
  Obtained from environmental sample
  misc_feature (1)..(155): Xaa is any amino acid
MIELAIKEGRSVKPDLKIGVCGEHGGDPASIDFCYRAGLSYVSCSPFRVPLARLAGAQAVIKNTGKKIMGGETVKAAKPATAKVKGSKKPLKGGKKMAVTSAKKPAAKKPAAKKPAAKKTAKKPAAKKAVKKPAAKKAVKKPAAKKTAAKKTAAK

SEQ ID NO: 49217 - DNA, 663 bp, Unknown
  Obtained from environmental sample
  misc_feature (1)..(663): n is a, c, g, or t
atgatttataaaacctttgggaaaacaggcgtaaaagtttcggctcttggcttcggcgcgatgcgcctgcccatgaaagaagttgacggcaagaaaattgtcgatgaagaccttgccgtccctctcatgcaaaaggcttttgacatgggcattaactatgttgataccgcgccgctttattgcgaaaccttaagcgaaaacgccgtaggcaaggcgctgaaaggctaccgcgataaggtgtacctgtccacgaaaaaccctatcgaagacgcagacggcgatcactggatggggcggctggaaaaatcgctgaagaaactcgacacggattacattgatttttatcacttttggggaatctcgttaaaaagtttcgagtcatggcagggattgaaattcggccctcttgaagccgcgtacaaggcaaaagagcgggggcttatcaggcacatttctttttcgtaccacgacgcggctgaaaattataaaaagatagtggactcggggtactttgaaacaacccttgttcagtacaatatgcttgaccgttccaacgaggataacatcgcttatgcgaagtccaaagggcttggcgttgcggtaatgggacctgtaggcggaggacggcttggcgctccaagcgggaaaatacaggggctgtga

SEQ ID NO: 49218 - protein, 220 aa, Unknown
  Obtained from environmental sample
  DOMAIN (7)...(220): Aldo/keto reductase family
  misc_feature (1)..(220): Xaa is any amino acid
MIYKTFGKTGVKVSALGFGAMRLPMKEVDGKKIVDEDLAVPLMQKAFDMGINYVDTAPLYCETLSENAVGKALKGYRDKVYLSTKNPIEDADGDHWMGRLEKSLKKLDTDYIDFYHFWGISLKSFESWQGLKFGPLEAAYKAKERGLIRHISFSYHDAAENYKKIVDSGYFETTLVQYNMLDRSNEDNIAYAKSKGLGVAVMGPVGGGRLGAPSGKIQGL

SEQ ID NO: 49219 - DNA, 858 bp, Unknown
  Obtained from environmental sample
  misc_feature (1)..(858): n is a, c, g, or t
atgatccgtttcgctaaatacaaaaaagattccgcgacagagcaggaaatgacgaagcaaaaaaatcgttttggaaaggttatcgaaaaatactgctggaaagacgaccgctttgtgcgcggcatcacggaacacgacgttacagtcgggaagaaaggcgatccggaagcgaacatctggcttaaccctcagagctgggcggtaatcagcggctatgctgatgaaaagcgcggcaaacaagtgcttgatttagtctacaagaaacttaacacaaaatatggagcgcgtcttatgtctccttcgtaccgcaagcacgcttttgacggggcgcttgccctgctgttcaaccccggcacaaaagagaacggcggcatcttcctgcaaactcagggctggataatcctcgccgaagctttgcttggacacggaaaccgcgccgttgagtattatctggaaagctgtccggcggcgcagaatgaaattgccgacacgcgccttatggagccttatgtttactcgcagtttactgaaagcgtggacagcccctttgagggtcgcagccatgttcactggctgacaggcacggcaagcactgtaatggtcggcagcgtcgagggcattttgggattaaggccggacattgaagggcttagcctgtcaccggcgattccctcttcgtggaaatcctttacaatggaaaagattttccggggcaagaaacttcacataaaagtgaataaccccaacgggcgcgagagcggctgcagaagcctgaccgtcaacggaaaacttgttgaaggcgattacatccccgcctcgatcttaaaagccgcgaacgagattgttttggatatgtag

SEQ ID NO: 49220 - protein, 285 aa, Unknown
  Obtained from environmental sample
  misc_feature (1)..(285): Xaa is any amino acid
MIRFAKYKKDSATEQEMTKQKNRFGKVIEKYCWKDDRFVRGITEHDVTVGKKGDPEANIWLNPQSWAVISGYADEKRGKQVLDLVYKKLNTKYGARLMSPSYRKHAFDGALALLFNPGTKENGGIFLQTQGWIILAEALLGHGNRAVEYYLESCPAAQNEIADTRLMEPYVYSQFTESVDSPFEGRSHVHWLTGTASTVMVGSVEGILGLRPDIEGLSLSPAIPSSWKSFTMEKIFRGKKLHIKVNNPNGRESGCRSLTVNGKLVEGDYIPASILKAANEIVLDM

SEQ ID NO: 49221 - DNA, 810 bp, Unknown
  Obtained from environmental sample
  misc_feature (1)..(810): n is a, c, g, or t
ttgattatgccaaacaaaaaaccgaatttagtagtgcgggttgggggaaacgataaacaagaaagcaatgaggattaccgctttccgctgtattattcagaagataccgctcgcacgtggaagaaattcggcactcatccaggtccaggacagaattacggcggaaagttagcgatatcctcagatggacgcgttgttttgtgggcaccgcgagagaaaagcacactttatagaacaactaactggggcgcaacttggacacaaagcactggaagcggaatatccaacactcctttccccaaggcagacccagttgatgccgcagtgttttacgcctttggcaacggcgttcataggagcaatgactcaggaaaaacattcacaaaagtaggcggcaattttagctggaccaatgaaatgacagtaacgcccggtgttaaagggcatatatgggtaacgggacatgcgtgggacggcataaacggcggatacttggcgcgttccacagacggcggggttacgttccaaaatgtagatccggctgacgaccccaaatatacgcaaagagtagtgcactccgaggcggtgggctttggcaaggcggcacccgggcaaacttatccggctatatacatatacgggactatagacggaaaaaaaggtatatggcaatcaattgacgaggctaaaaactggactcgcatagacgacccaaaatatgcttttggcgaccttgccaacggcaaattcctgcgcggcgatatgaacactttcggcgtagtgacaagtccaccgcagggcgaggcatag

SEQ ID NO: 49222 - protein, 269 aa, Unknown
  Obtained from environmental sample
  misc_feature (1)..(269): Xaa is any amino acid
MIMPNKKPNLVVRVGGNDKQESNEDYRFPLYYSEDTARTWKKFGTHPGPGQNYGGKLAISSDGRVVLWAPREKSTLYRTTNWGATWTQSTGSGISNTPFPKADPVDAAVFYAFGNGVHRSNDSGKTFTKVGGNFSWTNEMTVTPGVKGHIWVTGHAWDGINGGYLARSTDGGVTFQNVDPADDPKYTQRVVHSEAVGFGKAAPGQTYPAIYIYGTIDGKKGIWQSIDEAKNWTRIDDPKYAFGDLANGKFLRGDMNTFGVVTSPPQGEA

SEQ ID NO: 49223 - DNA, 597 bp, Unknown
  Obtained from environmental sample
  misc_feature (1)..(597): n is a, c, g, or t
atgagcgatttgatagaaaaaaaggacggttatactggagaacacaccaggcgagtaagcgaatatgttgctattttgctgcgtgaaatggtgaggcgcggctataaactcaccgaatcagaaattcaaaaaatagcggaatcttctctgttgcacgatatggggaaaattgcaataccagataacattcttcttaaaaacggaaaattgaccgatgatgaatttgaagcgattattaaccacagcacaacaggagcggattctttgcaaaactccctgcaatttgcaaaggatgacgactttttgaaaagtgcctttataatggctaaacatcaccacgaaagatggaacggcagcggctaccctgacggcaaaaaagaagatgaaataccgcttctcgcacgtataatagcaattgccgatgtttacgatgcgctgcgttctaaacgctcgtataaagagccgttaagccgtgagaaagcaaaatcaattatattagaagaaaacgggcgcccatttgaccctgaactagttgatgtttttttagcggtagaaccggagttccataagttttgcgaggctactaggaatatatga

SEQ ID NO: 49224 - protein, 198 aa, Unknown
  Obtained from environmental sample
  DOMAIN (12)...(146): HD domain
  misc_feature (1)..(198): Xaa is any amino acid
MSDLIEKKDGYTGEHTRRVSEYVAILLREMVRRGYKLTESEIQKIAESSLLHDMGKIAIPDNILLKNGKLTDDEFEAIINHSTTGADSLQNSLQFAKDDDFLKSAFIMAKHHHERWNGSGYPDGKKEDEIPLLARIIAIADVYDALRSKRSYKEPLSREKAKSIILEENGRPFDPELVDVFLAVEPEFHKFCEATRNI

SEQ ID NO: 49225 - DNA, 948 bp, Unknown
  Obtained from environmental sample
  misc_feature (1)..(948): n is a, c, g, or t
atggctgtatcattgctggagtacatgaggtcgatacagcagctgactcccacaatggcgggggtgctgcaaacgtatcgcgagaacgcgcccatcttgggcgagggcatcagcttgggctacccgttgccggcgctcaggtttgaaaacacggtgggccgcgtcggctcgttcgtgcggcaaaagacgctgccgaataccggcttccgtgcgctcaacaaccctttcccggcggctgagggcgagacggaaaagataacggagaacctctccctgggcggcgggcgcgtggtgatcgaccgcgctctcatccgcgccggcggacaggacggcgtcgtcacgcagatgacgatgcagacggcgtctttcgctcgcgtatggaataactgcttctacaacgggctttcaagcgaccccaacgctttcgcggggttgagctcccgcatcgccggcgcccagctgctcgacaacggcggcgccgcgctcgatctcaagcttcttgatgaagcgctgctcaaggtgcgcggcggcaaccgcgtcatcgtcatgggcacggggatggcggcgcggttgttcaaagcggcgaaaatgtccgtaaacgtgaactacacgccggaaacgttcggcgtcagcccggcgacgtacaacggcgtgcccatcatgctcgccggcgagaaggtggaccaaagcgaggtgctggactttaccgaggccggcaacactacgtcgatttatgtactgtctctcgacgacagcggagtcgtcggcatacagaccgcgccgctcgaagtcatctacgacgacccgaacaaagtggacagctcgttcgagatcgagtgggacagctcgttcgtgatcaagaatccgaggtcggcttatcggataaagaatatcgcggatcaggccataacgcccgccggaatattctacggcgcggggacgccgtaa

SEQ ID NO: 49226 - protein, 315 aa, Unknown
  Obtained from environmental sample
  misc_feature (1)..(315): Xaa is any amino acid
MAVSLLEYMRSIQQLTPTMAGVLQTYRENAPILGEGISLGYPLPALRFENTVGRVGSFVRQKTLPNTGFRALNNPFPAAEGETEKITENLSLGGGRVVIDRALIRAGGQDGVVTQMTMQTASFARVWNNCFYNGLSSDPNAFAGLSSRIAGAQLLDNGGAALDLKLLDEALLKVRGGNRVIVMGTGMAARLFKAAKMSVNVNYTPETFGVSPATYNGVPIMLAGEKVDQSEVLDFTEAGNTTSIYVLSLDDSGVVGIQTAPLEVIYDDPNKVDSSFEIEWDSSFVIKNPRSAYRIKNIADQAITPAGIFYGAGTP

SEQ ID NO: 49227 - DNA, 525 bp, Unknown
  Obtained from environmental sample
  misc_feature (1)..(525): n is a, c, g, or t
gtgggcagattattcggtctttttatcctgatcgaattgggagacaaactctacattattgatcaacacgcggcgcatgagcgtatcctttacaaccgttttctttcacagcctgttccaaaacaggagcttttagctcctattcccttccggactgacagtaacgatgaagacaatttccttgaagcaaaacgcgatgagctaaaacgtcttggcattgatattgaaaaagacggggatgcctggcgcattgaagccttacctacggactggcggtgcggtgacgcggaaactgtaaaagaaattcttgaactgcgtactgcgggtgaaaacattgccgaacgctgggctgctacactctgctgccgggccgcaattaaggacggcgattatccggacgatgaaaccgcttttgctcttggaaaagaagcgcttatgcttcccgatccgcgctgtcctcacggccgaccggtttggactgaaatcagcagggaggcgttgtttaaagcggttaggcgaagttga

SEQ ID NO: 49228 - protein, 174 aa, Unknown
  Obtained from environmental sample
  misc_feature (1)..(174): Xaa is any amino acid
MGRLFGLFILIELGDKLYIIDQHAAHERILYNRFLSQPVPKQELLAPIPFRTDSNDEDNFLEAKRDELKRLGIDIEKDGDAWRIEALPTDWRCGDAETVKEILELRTAGENIAERWAATLCCRAAIKDGDYPDDETAFALGKEALMLPDPRCPHGRPVWTEISREALFKAVRRS

SEQ ID NO: 49229 - DNA, 540 bp, Unknown
  Obtained from environmental sample
  misc_feature (1)..(540): n is a, c, g, or t
atgatggcgagagatcaaaactccttttattattttattggcatccttgacggctacagccggaagatgcttaactggaggctctgcaaaaacatggagggtgttaacgctgaaatactggttgccgaaaccaaagaggtgtaccctgaagcggccggcccgcggctgataagcgacaacggcagccagttcgtatcaaaagattttgaagagctgcttgcgcttttggaattctcccacacgcttacatccgcgaatcacccgcagagcaacggcaaactggaacggttccaccgcaccctgaaaactgagcatgtaaggagggcatcgtatttagaatgccatgacgcctgcataaggctggcggaatggatcgcgtattacaacagcgaaaggcttcacagcgcgatctggtatttaacgccgaatgacgttttttacggcaggacggctaaacggcttgcagaacgcaaagaaaagttgcatgctgcatttatcaagagacaggaatactggcggacgcaaaacgctggttcctga

SEQ ID NO: 49230 - protein, 179 aa, Unknown
  Obtained from environmental sample
  DOMAIN (1)...(147): Integrase core domain
  misc_feature (1)..(179): Xaa is any amino acid
MMARDQNSFYYFIGILDGYSRKMLNWRLCKNMEGVNAEILVAETKEVYPEAAGPRLISDNGSQFVSKDFEELLALLEFSHTLTSANHPQSNGKLERFHRTLKTEHVRRASYLECHDACIRLAEWIAYYNSERLHSAIWYLTPNDVFYGRTAKRLAERKEKLHAAFIKRQEYWRTQNAGS

SEQ ID NO: 49231 - DNA, 471 bp, Unknown
  Obtained from environmental sample
  misc_feature (1)..(471): n is a, c, g, or t
atgaaaagccgcgtcatatttattcccgtccctgaagacttgcgttataagttggcggacggagcgttaattgattttcccattaatcccggcattccctttcctgtagaaatccgcgaagacaatgaaaacgcgtctttggaaaacatgtccgttgaatcacttttttacgggatgctgagggtaataaaggaaggaaaggttgacaaggaatggctggattattacacaggccttataatgtatttgcgtcccgatatatataataaaataaaggaaataaaagataacggccttgacgatgaaaatttcattaatgcgcataacttaattcaggagggaaacatagaagccggattagcctgcattcatgattttattgaggacaggccgaaagcgtggaacggctggtttatgttaggctgggcgttaaggctgctcggcagatgggaagacggaaaaagcgcataa

SEQ ID NO: 49232 - protein, 156 aa, Unknown
  Obtained from environmental sample
  misc_feature (1)..(156): Xaa is any amino acid
MKSRVIFIPVPEDLRYKLADGALIDFPINPGIPFPVEIREDNENASLENMSVESLFYGMLRVIKEGKVDKEWLDYYTGLIMYLRPDIYNKIKEIKDNGLDDENFINAHNLIQEGNIEAGLACIHDFIEDRPKAWNGWFMLGWALRLLGRWEDGKSA

SEQ ID NO: 49233 - DNA, 366 bp, Unknown
  Obtained from environmental sample
  misc_feature (1)..(366): n is a, c, g, or t
ttgattttaacgatccaagagaatcattcgcgattaagggaaaatttgtccgcgcagaaaattgttgaaggcaaaaaagagatggtcgcccttggattattttttacagaaaacgcggttcctatgggttttaaattgcgtattaacgatttccttaccgcgataagggcggattaccgcagcataacggaagaagaactagaggctcaagccacggtcaaagccgccgccaaacctgccgccgctccggccgccggagccaaacctgccgccgctccggccgccggagccaaacccgccgccgcgcctgccggagcaaaacccgccgctcccgccgcggccaaaccggcggcgccctcaaagtaa

SEQ ID NO: 49234 - protein, 121 aa, Unknown
  Obtained from environmental sample
  misc_feature (1)..(121): Xaa is any amino acid
MILTIQENHSRLRENLSAQKIVEGKKEMVALGLFFTENAVPMGFKLRINDFLTAIRADYRSITEEELEAQATVKAAAKPAAAPAAGAKPAAAPAAGAKPAAAPAGAKPAAPAAAKPAAPSK

SEQ ID NO: 49235 - DNA, 549 bp, Unknown
  Obtained from environmental sample
  misc_feature (1)..(549): n is a, c, g, or t
gtggtatatacatcgtcatttgaaggcgcgaaagttgtggcaaacgtgaaaaccggccttctggggaaactgcgcgataccaacaattttgtaaatttacgtttttgttttaagcctgtaggggaaacaaatacggttacattttttgtcgccggccgcgtcatttcaagcgccccctacggcaattcgcctgatataaatatttttaacattcagtttacaaacaggccgcccgatgattttatcgagattatggggcgtcttttggacgcgactgtaaattcatcaaaacgcaaagacgacagaatacaaataaacgcggacaatatccgcaagttaaaccttttatcaagcgaaagcaccgtttttatagataatgttcccagacgctgcatattaagggatttatctttctcgggctcaaaaataataatgatgggaataacaaaattcctgcttaataaagacgccatattgcggattgattttaacgatccaagagaatcattcgcgattaagggaaaatttgtccgcgcagaaaattgttga

SEQ ID NO: 49236 - protein, 182 aa, Unknown
  Obtained from environmental sample
  misc_feature (1)..(182): Xaa is any amino acid
MVYTSSFEGAKVVANVKTGLLGKLRDTNNFVNLRFCFKPVGETNTVTFFVAGRVISSAPYGNSPDINIFNIQFTNRPPDDFIEIMGRLLDATVNSSKRKDDRIQINADNIRKLNLLSSESTVFIDNVPRRCILRDLSFSGSKIIMMGITKFLLNKDAILRIDFNDPRESFAIKGKFVRAENC

SEQ ID NO: 49237 - DNA, 735 bp, Unknown
  Obtained from environmental sample
  misc_feature (1)..(735): n is a, c, g, or t
atgggcgttagggtacacttcccggtagaaccccataattcatgggcgcttgtaaagccgccttttgaaatcccggcttttgaaccccagtccactattgccgatgacggttctatcacacccgttgaaggcaacaacggcatcaccggaagaagccggtttgaagccaaagaagacggacagcccgcgtacggcgttgtaaaaaatgtcggcgtcattaaatccgtagctgtaaatgtatacggccttaacttcccgcacggtctttcaaccgtccttatcgacaatcagggaactcaaaagaacgtattcatgggttacttaagattcgacggatggggagaacttatttggaataaccccgcttatattcaagaagtaagaaaccgcgatatcaggctctatcctctttatccggaatcaactccgttcattaaattcggcggattcctgcttcagcgcgacgcggctttggaaggcggagactttatcgtatatttcaaagacgtaagaattatctatgataaagctgttcttgatacagagaaagacatagacgacgaagcgttatggcagattattcttgaccgcgaaacagcccgtaaaacatgggaaatggaaaagttcggtcaaacacaggttcttcgttatctggaacttaacaaacaggcgaaagaacttccgttcgacagtcctgatcggcagcagcaagaacaggccgcaagagacagatag

SEQ ID NO: 49238 - protein, 244 aa, Unknown
  Obtained from environmental sample
  DOMAIN (1)...(183): Flagellar filament outer layer protein FlaA
  misc_feature (1)..(244): Xaa is any amino acid
MGVRVHFPVEPHNSWALVKPPFEIPAFEPQSTIADDGSITPVEGNNGITGRSRFEAKEDGQPAYGVVKNVGVIKSVAVNVYGLNFPHGLSTVLIDNQGTQKNVFMGYLRFDGWGELIWNNPAYIQEVRNRDIRLYPLYPESTPFIKFGGFLLQRDAALEGGDFIVYFKDVRIIYDKAVLDTEKDIDDEALWQIILDRETARKTWEMEKFGQTQVLRYLELNKQAKELPFDSPDRQQQEQAARDR

SEQ ID NO: 49239 - DNA, 522 bp, Unknown
  Obtained from environmental sample
  misc_feature (1)..(522): n is a, c, g, or t
atgagaaatgacacaaaattaggcaatattttttctcccccggctcaggaagccatgaggaaagaatatgaaaagtacgaagaagtaaggcatactattgtaaacgatttaaaaatacatatagaagatttacttaaagaaatcagcgttactaccaaccctgtcataagcggcagaataaagaatttcgcgagttattacggaaaatacctgcgcttgttaaaaagcaacgtaaaagaccctgttattacagaccttttgggaataagaatcatctgcccttttatcgaagacttaggcgttatagaagaaatagttaaaaacaattttaacatcatggaaacagaaagaaaaggccattacaatttcaggnaattcggctatgagtctacacacctgttaattaagatacctaaagatttnaatcgaaaacacggaaaccccgnaacagatttaatagaatacagatacgcacaattttacaggacgcatgggcggaagttgaccacgaaatgtttataa

SEQ ID NO: 49240 - protein, 173 aa, Unknown
  Obtained from environmental sample
  DOMAIN (58)...(164): Region found in RelA / SpoT proteins
  misc_feature (1)..(173): Xaa is any amino acid
MRNDTKLGNIFSPPAQEAMRKEYEKYEEVRHTIVNDLKIHIEDLLKEISVTTNPVISGRIKNFASYYGKYLRLLKSNVKDPVITDLLGIRIICPFIEDLGVIEEIVKNNFNIMETERKGHYNFRXFGYESTHLLIKIPKDXNRKHGNPXTDLIEYRYAQFYRTHGRKLTTKCL

SEQ ID NO: 49241 - DNA, 705 bp, Unknown
  Obtained from environmental sample
  misc_feature (1)..(705): n is a, c, g, or t
atgaaaagaaaacttgcggcaattaacgcaagcctgtctttggcggatatgatttttcaggaaatacgaagctatcagcggaaatacagcaaggaaatgggaaaaaggcgggaaagttttttccaaaagattgaagaatcaacggatcatcttttgtttgatgcggaaaatgtaaaaaccgcccctcccattattgaaaatgacaattctcaaattacaacagattataatgaatcaattgacgatttacttgtaaaagccctatccgcccacaataacaatcaatttaacgaggcaatcagtcaatatacaaggattttagagttaaaaccaaacgataatatactgtctattatttacaaacaccgtggaatggcaaactttgcctgttcttgttataacgaagccatagacgacttcagcaactctcttgagcttgacaatcaatcttataaagccgcttattaccggggcgttgtttattccgttataaagcaatatttaaaagccatagacgactatacgctttcattatcaattaatccgtatcagtcattctgtttattcaggcgcggacaggcatattatcacataggcgattatcctcaggcgctggcggactgcgaaaattctcttgctttggaaccgaacaataaatcagcattgaagtttaaagaactccttcaaaataaactaagaatgtaa

SEQ ID NO: 49242 - protein, 234 aa, Unknown
  Obtained from environmental sample
  SIGNAL (1)...(15)
  DOMAIN (185)...(218): Tetratricopeptide repeat
  misc_feature (1)..(234): Xaa is any amino acid
MKRKLAAINASLSLADMIFQEIRSYQRKYSKEMGKRRESFFQKIEESTDHLLFDAENVKTAPPIIENDNSQITTDYNESIDDLLVKALSAHNNNQFNEAISQYTRILELKPNDNILSIIYKHRGMANFACSCYNEAIDDFSNSLELDNQSYKAAYYRGVVYSVIKQYLKAIDDYTLSLSINPYQSFCLFRRGQAYYHIGDYPQALADCENSLALEPNNKSALKFKELLQNKLRM

SEQ ID NO: 49243 - DNA, 2193 bp, Unknown
  Obtained from environmental sample
  misc_feature (1)..(2193): n is a, c, g, or t
atgctcaagggaaaacaggggcgcttccgtcagaaccttttgggcaagcgcgttgactattcaggccgttcggtcattaccgtcggcccggatctcaagatttggcagtgcgggcttccgacaaaaatggcgattgaactgttcaagcccttcatcatgaaaaaacttgttgacaaggatgttgtctacaatattaaaaaagccaagatgctgcttgaagccgagagcgcggaaattttcgcaatcctcgacgaggtggtaaaagaacacccggttctgctgaaccgcgcgcccaccctgcaccgtcttggtatacaggcctttgagccggtgcttgtggaaggcaaggcgatcaaactgcatccccttgtctgccacgctttcaacgccgactttgacggcgaccagatggcagtccatgtgccgctgacccaggcggcccagatggagtgctggaccctgatgctctccgcccgtaaccttcttaacccggcgaacggcagaaccatagtgttcccctcccaggacatggtgctgggaataaacttccttacccgcgtcaaaccgaacggcaagcggccggagaatttaaatccggaaagcaaaagcaggcctccctattattcctcgccggaagaagcccttatggctgtggaaaataaattcctcgattggggatcaatcatccggatcaaacccgtgaaattccctatatgggacaagattgaccatgagatggaaatcccgaaggacggaatcatcgaaaccaccgtgggaaggctgatattcaacgaggaacagcccaaagagattcccttcatcaattatgaaatgaaagacaaagagcttcgcgcccttattgagcacatcttcaagaaaaacggttcctggattacggtaaagatgctggacgcgatcaaatcgacaggttaccgttatgcgacagttttcggcgctaccatcggcattgatgatattgtggttcccaaggaaaagccggaaatgatcgataaggcaaacagggaagtcgaggcgattcaggcccagtggcgcaagggcattatgacccaggaggaacgctacaataaagttgtcgaggtatggaccaaaaccaacgacgagcttacaaacatcatgatgaaaaccctggaagcggatcacgacggctttaactcaatttacatgatggcaaactccggtgcgcgcggaagccgcaaccagatacgccagcttgccgcgatgcgcggccttatggccaagccgtcaggcgatattattgagctgcccatacgctcaaacttcaaggaagggctttccgttatcgagttctttatttcgactaacggtgcgcgtaagggtcttgcggataccgctcttaaaactgcggaagccggctaccttacccgccgccttgttgatattgcgcaggatatggttgtaaacgaagaagactgcggcacaatcaacggtatctcctactcggcggtcaaacagggtgaggaaattatcgagccgttaagggatcgcatagtcggaaggtttacgctggagcgcgttaaacatccgattacgggcgaacttataatcgacgtaaacgaagaaattaccgaagaaattgccgaggcgattgaaagcgcgggggttgagaccgtgcgtataagaacggttttaacctgtgaagcgaaatacggcgtttgtcaaaaatgttacgggcgtaaccttgccacaaaccgcacggtcgaaatcggagaagcggtcggaacaatcgcggcgcagtccatcggccagccgggtacgcagcttactatgcgtacgttccacatcggcggcgttgcgaccaaggccagcgaagaaagccgcattattctgaaatatcccgtatatatcagggatgtcgccggaactcacataacgcttgataacggccacctgctctttacacgacgcggacacgccatagtcaacaaggtaatgagggaatttaaaattgaaaaaggcgataatctcgtcgctgttgacggaaagaaaatcaaccgcggcgatgtaataattcagcgcggcggtcaggatattgtttcaccggagattgcgtatgccatgattctgaaaaatcaagacgaggaaacgctttatcttatcggtccggaacaaaaaatgaaatcaggaacggttctgatttctcggccaatctga

SEQ ID NO: 49244 - protein, 730 aa, Unknown
  Obtained from environmental sample
  DOMAIN (160)...(326): RNA polymerase Rpb1, domain 3
  misc_feature (1)..(730): Xaa is any amino acid
MLKGKQGRFRQNLLGKRVDYSGRSVITVGPDLKIWQCGLPTKMAIELFKPFIMKKLVDKDVVYNIKKAKMLLEAESAEIFAILDEVVKEHPVLLNRAPTLHRLGIQAFEPVLVEGKAIKLHPLVCHAFNADFDGDQMAVHVPLTQAAQMECWTLMLSARNLLNPANGRTIVFPSQDMVLGINFLTRVKPNGKRPENLNPESKSRPPYYSSPEEALMAVENKFLDWGSIIRIKPVKFPIWDKIDHEMEIPKDGIIETTVGRLIFNEEQPKEIPFINYEMKDKELRALIEHIFKKNGSWITVKMLDAIKSTGYRYATVFGATIGIDDIVVPKEKPEMIDKANREVEAIQAQWRKGIMTQEERYNKVVEVWTKTNDELTNIMMKTLEADHDGFNSIYMMANSGARGSRNQIRQLAAMRGLMAKPSGDIIELPIRSNFKEGLSVIEFFISTNGARKGLADTALKTAEAGYLTRRLVDIAQDMVVNEEDCGTINGISYSAVKQGEEIIEPLRDRIVGRFTLERVKHPITGELIIDVNEEITEEIAEAIESAGVETVRIRTVLTCEAKYGVCQKCYGRNLATNRTVEIGEAVGTIAAQSIGQPGTQLTMRTFHIGGVATKASEESRIILKYPVYIRDVAGTHITLDNGHLLFTRRGHAIVNKVMREFKIEKGDNLVAVDGKKINRGDVIIQRGGQDIVSPEIAYAMILKNQDEETLYLIGPEQKMKSGTVLISRPI

SEQ ID NO: 49245 - DNA, 2256 bp, Unknown
  Obtained from environmental sample
  misc_feature (1)..(2256): n is a, c, g, or t
atgattatggtgtttcacgacgctcacgaagcttatatagactatggcaactatcgcatatcatattttctgttcgacaataattacaaaactctgagtgacactggttggcatatcgtcccaaccccaccgccccccggtattacgccggcggaggcgtcaaagttcacaccgaaacacgagaacatcacacctggtgaagactctaagggtaaatggaatcagcgcttgataatgcagattgccgacgtccttgatccttccagaagcgataccaactgggggactatggccgcgcccacatcgttcctcttcaactactacggcggtgccggcggtcgcgtccaccgcggcatcagcgcgcctttcaagggggtatggactgtgaccgccggcaactacgccaaccgtaattggggcggggattggtcgtacaacaactctggcgccaaagctacactcagcgacgaccatatgatcaattggggctaccccataacgccggatttcaccgaatccccggcgggagataccataggcaagcctgttaggcggttgcatagaaagctgtgcggttccgacgcttccgtatccatagacaatgtgttgatagaggagtgggacggctacacgtggcgcagggtgttcggcaacgggccgctccccggacgcgaggtggtaaacgtcgtaatccgcgacacgttgccgcagggcgtgacgttcatcaattttatcgaaccttacccgatgggaaaagcgccaaagataaacgggcgcgttatcacatgggaaatcgacaaactgctggtaggcgagaaaggtacgatcaaatatacggtacgcgccgacaaaccgtccggcaataaagatgtggtcatcccctcaaacgcttgggctatagccgacagggagtcgccgatgcgcagcacggcgacgcttgttgtgacgaacgactcgcttccgccgcctccgccggagcccaccacgctgtacaagagggcgaataaagccgcgtactccgcgggcgacacggcggtctacacagtcgcctacaagcagacgcacgggtaccccgcggtcagcaattcggctaaccagtgggagggtacgaataagtcaatcagtacagacgggaaaaccatctccttcggaacaagcaatattgacatgcgcttcaccccggcgtccggcacgaacgtcacgcttaccggcactatgtccccgcagtcgtacggcccgtccttctacgtattcgcgcggcgtaccggcaccgccgcaaacaccgccgttgaactgaagtttgagcgtaagtacatacaggcggataatttccccggtgtgatggtcacgcttacctcaaacggccgcgccatagacagcgtaggcgtgccgatggccgacgccgagacctctatcaactacaagttcgtttttaagaatgacagtttgctgatgtggatgggcgacacgtccgcccccattgcgtttagggtgactaagggtattgccgttcagaatggcgccgccggcgtgcgctatgcgtctggtaacggcaattcatcgattaccggttgggcgagccgttccgacctcgcttacaacgtaacgatacgcgacaccatcccgttcggcgtgagaatgatcggttcgcccgccggcagtatcaacaccggaacgctcgcgcctaaacagttgaccggcagcgtaagcggcaatgtgattacatggactgtggtaagcggtttcgacagcccgctgggcgccaacgattccctcaccttaacgtggcgcggcatagtcgacacgtctaaaacaggcgccgtcgtcaacaccgcctacgcggatctcaccggttaccccaaggacgccgtcggcgctcaggcgcggtcaaaattcgcgcttgtcaaggggcctgacgaccccgatccgcccgacccgcccgatccgccgaagggcgaactgaccttgcaggttactccgccggggtatccagcggtgtgtatgttttcgggatcggtcaaggttatgctgacgtcgttgcggagcgacgccgtcatttggtataccaagaacgggcaagagccggactcgatgtcgtttaactctcggcgttatacggggcagccgcttgagttcatagacagcacggcgcttagggctgtggcctatgccgacggttgcgaaccggtcttttcggaaacgcacatctacaaaccgctaaacaccgttccgattggcacgccatcttctatataa

SEQ ID NO: 49246 - protein, 751 aa, Unknown
  Obtained from environmental sample
  misc_feature (1)..(751): Xaa is any amino acid
MIMVFHDAHEAYIDYGNYRISYFLFDNNYKTLSDTGWHIVPTPPPPGITPAEASKFTPKHENITPGEDSKGKWNQRLIMQIADVLDPSRSDTNWGTMAAPTSFLFNYYGGAGGRVHRGISAPFKGVWTVTAGNYANRNWGGDWSYNNSGAKATLSDDHMINWGYPITPDFTESPAGDTIGKPVRRLHRKLCGSDASVSIDNVLIEEWDGYTWRRVFGNGPLPGREVVNVVIRDTLPQGVTFINFIEPYPMGKAPKINGRVITWEIDKLLVGEKGTIKYTVRADKPSGNKDVVIPSNAWAIADRESPMRSTATLVVTNDSLPPPPPEPTTLYKRANKAAYSAGDTAVYTVAYKQTHGYPAVSNSANQWEGTNKSISTDGKTISFGTSNIDMRFTPASGTNVTLTGTMSPQSYGPSFYVFARRTGTAANTAVELKFERKYIQADNFPGVMVTLTSNGRAIDSVGVPMADAETSINYKFVFKNDSLLMWMGDTSAPIAFRVTKGIAVQNGAAGVRYASGNGNSSITGWASRSDLAYNVTIRDTIPFGVRMIGSPAGSINTGTLAPKQLTGSVSGNVITWTVVSGFDSPLGANDSLTLTWRGIVDTSKTGAVVNTAYADLTGYPKDAVGAQARSKFALVKGPDDPDPPDPPDPPKGELTLQVTPPGYPAVCMFSGSVKVMLTSLRSDAVIWYTKNGQEPDSMSFNSRRYTGQPLEFIDSTALRAVAYADGCEPVFSETHIYKPLNTVPIGTPSSI

SEQ ID NO: 49247 - DNA, 762 bp, Unknown
  Obtained from environmental sample
  misc_feature (1)..(762): n is a, c, g, or t
gtgctcaacatggccgaagccttctaccagcaggtagtcgatccctttgtgcaaggctacctgcgcgggctgacgcccaacccttgtataagctgcaaccgttgtattcgttttggcctgctctatcataaggcgctggagctagagtgccaggcggtggctaccggccactatgcgcgtattacctaccagcagggacgttaccacctgctgcagggcagagatcgcggcaaggaccaaagctatatgctctatagcgctaaccagcagcagttggctatgaccatctaccctttaggtgattttacgaaaacagaagcgcgtcacctagcggctcaacgtggcctaaagacggcagcgcgtcccgaaagccaagacatctgttttgtgccagaaggcgactatgcagcattaatcgaacagttagctccccaagccagccagcccgggccgatcctttaccacaatgggcagctaattggccagcacagaggcttaattcactatacggtcggtcagcgtcgtgggcttggcctagcttggcccgagtcgctatatgtccttagcctagcagtggagcaaaacgcgctgatcgtgggtgaacagcgttacctttggcaaaatgaattagtcgccgaagatattcattggatagcggagcaggctcctgaccccgcgcagaccatcagcgctaaaatccgctacgccgctcccgcggctgcggttacgctgctgccctggaggaagactgctaccggctag

SEQ ID NO: 49248 - protein, 253 aa, Unknown
  Obtained from environmental sample
  DOMAIN (1)...(253): tRNA methyl transferase
  misc_feature (1)..(253): Xaa is any amino acid
MLNMAEAFYQQVVDPFVQGYLRGLTPNPCISCNRCIRFGLLYHKALELECQAVATGHYARITYQQGRYHLLQGRDRGKDQSYMLYSANQQQLAMTIYPLGDFTKTEARHLAAQRGLKTAARPESQDICFVPEGDYAALIEQLAPQASQPGPILYHNGQLIGQHRGLIHYTVGQRRGLGLAWPESLYVLSLAVEQNALIVGEQRYLWQNELVAEDIHWIAEQAPDPAQTISAKIRYAAPAAAVTLLPWRKTATG

SEQ ID NO: 49249 - DNA, 429 bp, Unknown
  Obtained from environmental sample
  misc_feature (1)..(429): n is a, c, g, or t
gtggtcagattcggacgaggaacaattggaatgcgtaataagcacactaatgagcaaattaaattaagtagtaaaggaatagataaattattgcatagagcctctaccaatggagaggtctataaaaaatcgcttgcacatttgccaaaaataatagagaatatggtctatatttcaagtgaaccaaatagaaatgagactaaaaaaggctttaatgaatataggcgttatttaactagaataaaaatggacggcaaagactatacagtattatctatcgtaggcaaaagcaaagaaggattttattacgaccaacaattattccttgtttcggggagtgagcttgtaaaagaaaggctcgcagacgtgggtcagcttggttgggcggaaaaccgcccggctggcactgagagcgaacctagtaattaa

SEQ ID NO: 49250 - protein, 142 aa, Unknown
  Obtained from environmental sample
  misc_feature (1)..(142): Xaa is any amino acid
MVRFGRGTIGMRNKHTNEQIKLSSKGIDKLLHRASTNGEVYKKSLAHLPKIIENMVYISSEPNRNETKKGFNEYRRYLTRIKMDGKDYTVLSIVGKSKEGFYYDQQLFLVSGSELVKERLADVGQLGWAENRPAGTESEPSN

SEQ ID NO: 49251 - DNA, 1068 bp, Unknown
  Obtained from environmental sample
  misc_feature (1)..(1068): n is a, c, g, or t
atgggggttcgttttagccgcagaccgcacgcggtattcgcttatggttacgatgtgcttcgctggggcggctgggcggcgcggtttatcatgcccaatgtcgggggcatgcctgtctatcattcaaaaatggattcaaagggaatcacaagacttcgtaagacaatagttgacggaccttatccgctggcaatagcgccggaagggaaaatcacctattccgccgataccgtttcacggcttgaacccggcattttccgcattggatttcaggcggttcaacagatagaagataagagcatgaattgccccgtggaagttcttcctgtatcaattcatttccgtttcggcattatagggaaaagttcaaaagaacgccttttaagaaagattgaaagctattgctgtcttccaaaaaaaacaagaaaacttcctttagccgaaagactaatactgtgcagagaatatattcttgaggtaaatgaaaaacgttacaacatcgccaacgacggttctctttcttttaatgaacgtcttgatcgcctggtaaatgccgcgcttgaaaccgcggaaagaatgcttggcataaagggggaaagagattcattctcccgtatgcataaaatacgccagatatgctgggacagaatttatctgcccggcgtggacaaacttaatcatctttcatacattcagcgcaactcggccgacattggagcgggagaagcgtggtatatcgcgcgtcatcaggaacttgttgatttttgcctgtccttccgaaacgaacctcctacggaagaagcttctcttcacagtaaagttgagtacattcaaaatctttggaattttgccagccgtactatgggcggcgcggtggaagataaaaataatatttttatccgaaaggtgataattcaaccgggacctttcataaatttaagcgactatctttctgattataatagggataaaaaagccacggtcaacgctgtaatgtcgaagctggaaaaagcgtttttggattgcattgatattgcggataagacggaaaaagacagatataaataa

SEQ ID NO: 49252 - protein, 355 aa, Unknown
  Obtained from environmental sample
  misc_feature (1)..(355): Xaa is any amino acid
MGVRFSRRPHAVFAYGYDVLRWGGWAARFIMPNVGGMPVYHSKMDSKGITRLRKTIVDGPYPLAIAPEGKITYSADTVSRLEPGIFRIGFQAVQQIEDKSMNCPVEVLPVSIHFRFGIIGKSSKERLLRKIESYCCLPKKTRKLPLAERLILCREYILEVNEKRYNIANDGSLSFNERLDRLVNAALETAERMLGIKGERDSFSRMHKIRQICWDRIYLPGVDKLNHLSYIQRNSADIGAGEAWYIARHQELVDFCLSFRNEPPTEEASLHSKVEYIQNLWNFASRTMGGAVEDKNNIFIRKVIIQPGPFINLSDYLSDYNRDKKATVNAVMSKLEKAFLDCIDIADKTEKDRYK

SEQ ID NO: 49253 - DNA, 321 bp, Unknown
  Obtained from environmental sample
  misc_feature (1)..(321): n is a, c, g, or t
gtggtatttagtatgataatatgtgaaaatctttctaaaatgttcaattcaaattcgggaataaaaaatattaatcttcaatttacaccgggaataatttacggcattatcggctataatggagcgggtaaaacaacattgtttaactgtattgaaggcctttatactccgacatcgggatctgtttcccatgataatgttaaaacgataaatgaagaagaattcctgccttatcgaagaaatattgcttttttgccagtgaagattatttgtatccgtattttacttgtatggaaaatattgagttggcgacaatcttaa

SEQ ID NO: 49254 - protein, 106 aa, Unknown
  Obtained from environmental sample
  misc_feature (1)..(106): Xaa is any amino acid
MVFSMIICENLSKMFNSNSGIKNINLQFTPGIIYGIIGYNGAGKTTLFNCIEGLYTPTSGSVSHDNVKTINEEEFLPYRRNIAFLPVKIICIRILLVWKILSWRQS

SEQ ID NO: 49255 - DNA, 687 bp, Unknown
  Obtained from environmental sample
  misc_feature (1)..(687): n is a, c, g, or t
ttgagtagacatggaagcagcggctgttatctgcgccgcgggcgcgtccgcgcgaatgggcggaataaaaaagaataccaaaagttaaattcaaattctacagttcttggctcagcggttttggcggttgcgtctgttccggctatagagttaatagtaatcgccgtttgcgcggattcgcgggacgcggcgcaggacgcggcgcgggatgctcttgcccccgggactttatccgtgcaaaaaccgaaaatattatttgtaaacggcggggagagcaggcgcgcttccgtgtttaacgcgcttgcgcttctttcgcaatacagcccttgttatgtgctaatccatgacggagcaaggccgtgggtaaccgcaagccttattcacaatacgctggaaagcgtaaaaaaacacggcgccgttattcccctgcttccgcttacagacactccaaaagaatacgattcaaactttattacaagacaccttaaacgggcaaatacgggaaccgcgcagacgccgcaggggtttaagtttcctgaaattcttttcgcccatcaaaaagccgccgaaattaaagacgaggaatttaccgacgacgccgaaatctggggaagattttacgggcctgtggcggtaatccccggcgatcctgaaaaccgtaaaattacttttcgggaggatatatga

SEQ ID NO: 49256 - protein, 228 aa, Unknown
  Obtained from environmental sample
  DOMAIN (13)...(228): Uncharacterized protein family UPF0007
  misc_feature (1)..(228): Xaa is any amino acid
MSRHGSSGCYLRRGRVRANGRNKKEYQKLNSNSTVLGSAVLAVASVPAIELIVIAVCADSRDAAQDAARDALAPGTLSVQKPKILFVNGGESRRASVFNALALLSQYSPCYVLIHDGARPWVTASLIHNTLESVKKHGAVIPLLPLTDTPKEYDSNFITRHLKRANTGTAQTPQGFKFPEILFAHQKAAEIKDEEFTDDAEIWGRFYGPVAVIPGDPENRKITFREDI

SEQ ID NO: 49257 - DNA, 522 bp, Unknown
  Obtained from environmental sample
  misc_feature (1)..(522): n is a, c, g, or t
ttgatacccatgtatagactaatttgttatatttatgttaggattaaaataatggccagttcaaagacttttcaggttgatcaaaaggtagtttatcccagccagggcgtggggataattaaatccatcattcaaaagaaatttaaagacgcgaaaattccctactatgttatctatattgaagttaccgacatgacaataatggttccggttgacaaggccgcgagtcttggcatccgttccacagtttccagagacgaagcgtccaaggcgattgagtcaatcaaggatgactacgatccaatcccttcggactggaagatgcgttatcagatgaatctggatctgcttaaaaaagggagtatcagggatatagcgagcattgtgcgctccctgtatcacagaagcaaagtaaaagagctgcccattctggaacgcaaactctacgattccgctcaaaggctgcttgttgacgaagcgtncatctcgttaaaaaaatccaaagaagaaattcacagatga

SEQ ID NO: 49258 - protein, 173 aa, Unknown
  Obtained from environmental sample
  DOMAIN (23)...(133): CarD-like/TRCF domain
  misc_feature (1)..(173): Xaa is any amino acid
MIPMYRLICYIYVRIKIMASSKTFQVDQKVVYPSQGVGIIKSIIQKKFKDAKIPYYVIYIEVTDMTIMVPVDKAASLGIRSTVSRDEASKAIESIKDDYDPIPSDWKMRYQMNLDLLKKGSIRDIASIVRSLYHRSKVKELPILERKLYDSAQRLLVDEAXISLKKSKEEIHR

SEQ ID NO: 49259 - DNA, 834 bp, Unknown
  Obtained from environmental sample
  misc_feature (1)..(834): n is a, c, g, or t
atgcgtgtttttaaagtgcaaaaaaatgaaataatagaatttcaaaagctggaaggttcaaatattgtttactcattttttgttaatggacaaaaatatgttgtaaaaaagttaataggtacgtctataataaactgggaacaggaaaaagccgcatataattcattaaagccgttaaatataacagatgaattagtcagttataataacggcattaaaatatcgaaatttattgatgacagcaaagcgttaggttacggtgaatccaatattatagaatctctggacttaattcgcaaaatccatgaaagcggaatttcaatagattttgattacaatattattgagaatatggataagtatatttcacgttgtaaagaagaatcaaaagagttaattgcgttaaaagaatgtcgggatacaataaataaaattcaagcgatgcttgacaaattgaatatcccaaaagttctttgtcacggcgacgcatgcgtaatagcgaattttttacggttacctgataaaagcataaaaataattgattgggaacaagccggcatggcggatccgcttcttgatattgcaatttcggcattacatcaaggttttgaaaatattgatcctgtgtggtgtcttcatcaatatttaaaaagaatacctgagaagcaggaatatttaagattattttcttttttggctttggacagttatgcgttaatggcatggagcatatatgaaaatacgggtagtttctgggatttttttgcttacgccaataaatatagtgaattggttttaaaatattataaggagagattttatgaacaacaataa

SEQ ID NO: 49260 - protein, 277 aa, Unknown
  Obtained from environmental sample
  DOMAIN (13)...(229): Phosphotransferase enzyme family
  misc_feature (1)..(277): Xaa is any amino acid
MRVFKVQKNEIIEFQKLEGSNIVYSFFVNGQKYVVKKLIGTSIINWEQEKAAYNSLKPLNITDELVSYNNGIKISKFIDDSKALGYGESNIIESLDLIRKIHESGISIDFDYNIIENMDKYISRCKEESKELIALKECRDTINKIQAMLDKLNIPKVLCHGDACVIANFLRLPDKSIKIIDWEQAGMADPLLDIAISALHQGFENIDPVWCLHQYLKRIPEKQEYLRLFSFLALDSYALMAWSIYENTGSFWDFFAYANKYSELVLKYYKERFYEQQ

SEQ ID NO: 49261 - DNA, 348 bp, Unknown
  Obtained from environmental sample
  misc_feature (1)..(348): n is a, c, g, or t
gtgttatttgacgaagataaaagtgaaattattttatatccaagaaataagagtaaaacaaattatgttattccagacggaatacaatacattggcgactgtgcattttctggttgcaaacgcctggttaatatcgttctccccgagagtatcagatccattggtgatgacgcatttgcagaatgtaaacggcttaaaacggccaccctctccaataaactgcggcacgctgtagaatatataattaaaagccaaaaaaaagataaaactgtttgtcactcaagaaaccctaaaatcgggagaaaggcatttgaatggcttgaagtgcagtttatttacagggattaa

SEQ ID NO: 49262 - protein, 115 aa, Unknown
  Obtained from environmental sample
  misc_feature (1)..(115): Xaa is any amino acid
MLFDEDKSEIILYPRNKSKTNYVIPDGIQYIGDCAFSGCKRLVNIVLPESIRSIGDDAFAECKRLKTATLSNKLRHAVEYIIKSQKKDKTVCHSRNPKIGRKAFEWLEVQFIYRD

SEQ ID NO: 49263 - DNA, 891 bp, Unknown
  Obtained from environmental sample
  misc_feature (1)..(891): n is a, c, g, or t
ttgatggccgagggcggccctgctggcgcggcgctgtacaacatgaccgacatgttcttcatcggccagactggcgacaccaatatggtcgcggcggtctccttggcctttcccctattcatgatggcgcaggccattggcaacatattcgcggtgggggcctccagctacatttcgcgtaaactgggggaaaaagaccacgatgaggcaaagcgcacctcagccgtgtctttctatgccgccataggggtcggcctgctgatgaccgccgctttttttacattcaaggaaccgctcatgtggatggtcggcgccagcaaagacactttttcgcacacagacgaatatttttccgtgctggcggcgttcatgcccttggcggcggctgcgggatccatgagcgggcagatgcggagcgagggcgccacgcaaaaggccatgactatgcagctcatcggcatcgtgctgaacatcgtcctagaccccattttgatactggggtgcaacatgggcacggccggcgcggggtgggccacggtagcggggtgggttctttcatttgcctacggcatccgctatttcttgtccaaagagacggccctttccatagccaccaaggacttcatgcctaacaaaaaaatggtggccgatgtgctttccattggcgtgcccgcagggataaacgcaatggttatgagcatatccaacatattaagcaaccgcatttccgccagctatggcgaccacgtggtggctggctttggcatacagatgcgcgtcgtcagcgtggtttttatgatggtgttcgcgctggttctgggctaccagccattcgcgggttacaactatggcgcaaagcagtttgtcaggcttcgcagggcttcaagctga

SEQ ID NO: 49264 - protein, 296 aa, Unknown
  Obtained from environmental sample
  DOMAIN (7)...(163): MatE
  misc_feature (1)..(296): Xaa is any amino acid
MMAEGGPAGAALYNMTDMFFIGQTGDTNMVAAVSLAFPLFMMAQAIGNIFAVGASSYISRKLGEKDHDEAKRTSAVSFYAAIGVGLLMTAAFFTFKEPLMWMVGASKDTFSHTDEYFSVLAAFMPLAAAAGSMSGQMRSEGATQKAMTMQLIGIVLNIVLDPILILGCNMGTAGAGWATVAGWVLSFAYGIRYFLSKETALSIATKDFMPNKKMVADVLSIGVPAGINAMVMSISNILSNRISASYGDHVVAGFGIQMRVVSVVFMMVFALVLGYQPFAGYNYGAKQFVRLRRASS

SEQ ID NO: 49265 - DNA, 630 bp, Unknown
  Obtained from environmental sample
  misc_feature (1)..(630): n is a, c, g, or t
atggcgaggtttggaaactattttgtaaacatcatcaccatgcagcgggggaaatcgcaatattactcaaatcgcgccgtcgaggcactgcttgcgggcgacttgcccgctggaaaggggctcgttgaaaatgcgctgaaaatagacccagcttcgtcccaagcctggaacatcaagggcgtgctagaaaaaaacctgaagaacacagatgcggcattccaagcattcagaaccgccatcaggcacaaccccaaggacacggcggccatcagcaatctggctgggctgtatagggcagaggggctattcgaggaatacacgaaattaaagactatagagaacaggctgcgaaaaaatgatccgtattactatgcattcctcgcagcggaagccttggacggcaataaagcaaaatcggcggccaagctgattaatagagcgataaagctgcactccaaagacccagattttttcatcatcctttgctccgcgcttgaactgcaaaacaaatttcccgaagccatgaaggcgctggaagaggcaaaaagaaattcagtgccgggcagacaagcggacatggacgcgatcatagcagactttaagattaggcatgggttggaaacaagctga

SEQ ID NO: 49266 - protein, 209 aa, Unknown
  Obtained from environmental sample
  DOMAIN (53)...(86): Tetratricopeptide repeat
  misc_feature (1)..(209): Xaa is any amino acid
MARFGNYFVNIITMQRGKSQYYSNRAVEALLAGDLPAGKGLVENALKIDPASSQAWNIKGVLEKNLKNTDAAFQAFRTAIRHNPKDTAAISNLAGLYRAEGLFEEYTKLKTIENRLRKNDPYYYAFLAAEALDGNKAKSAAKLINRAIKLHSKDPDFFIILCSALELQNKFPEAMKALEEAKRNSVPGRQADMDAIIADFKIRHGLETS

SEQ ID NO: 49267 - DNA, 477 bp, Unknown
  Obtained from environmental sample
  misc_feature (1)..(477): n is a, c, g, or t
ttggcgttgaagccccagttgatcctcgccgacgagccaatctctgcccttgacgtttccatacaggcgcagatactaaaccttttcaaagacatacaaaaagagatggggctttcctatctctttatcgctcacgatctctcggttattgagtacatctctgaccgcgtagcggtaatgtaccttgggaagatcatggagataagcaacaacgacgatctctacaacaacccgcgccacccttacacccaggcgcttttgtcagcggctccgattccagaccccaaagttgaagcccaacgcaaacgcatcatcctgacgggggacgttccctctccgaacgttcaaaggccgggctgttatttctacgatcgttgccagcaccgcatggacaaatgcaaggtaactccaccggaactaaaagcagggaaggacgggaatgaggaacataaggtggcttgttttctctgcgaataa

SEQ ID NO: 49268 - protein, 158 aa, Unknown
  Obtained from environmental sample
  DOMAIN (66)...(133): Oligopeptide/dipeptide transporter, C-terminal region
  misc_feature (1)..(158): Xaa is any amino acid
MALKPQLILADEPISALDVSIQAQILNLFKDIQKEMGLSYLFIAHDLSVIEYISDRVAVMYLGKIMEISNNDDLYNNPRHPYTQALLSAAPIPDPKVEAQRKRIILTGDVPSPNVQRPGCYFYDRCQHRMDKCKVTPPELKAGKDGNEEHKVACFLCE

SEQ ID NO: 49269 - DNA, 1209 bp, Unknown
  Obtained from environmental sample
  misc_feature (1)..(1209): n is a, c, g, or t
ttgcgaaactgttgccctctttgccatggttctttccatgacaacccttggttaataaaacaaacaacagtcgaggcctgtgccgccgttgttaatatgcattcgcgtacaataacaataggcggctttggttgcgttgagtcagtcgctattggaggcggtcttcccccggttattcagaccatgtggaaggaccgcctttcgttttctgaccttgaaggaaaatcggccgaggccgtaattgcccgtattgatgggctaaagaagatgggttgtggcctacttcgcttcgcggttcctgacttaaacgccgccgaagttcttggaaacctctcttccatggtttcaatacccttggttgcggacatccacttcgattataaaatagcccttcgttgccttgacttcccaatagcaaagatacgcataaaccctggcaatatcggcggcagggacaaagccgaggcggttctgaaaaaagcggctgcaaattcccgccccataagggtcggggttaatgcgggtagccttccgttggatattcggcagcgcgtggactccggtttcctggaaagcgccgaggctctggtactggcggctgaacgggaaattgccgtatttgacgagttgggctttagcgatgttctggtctcaatgaaggcatcgtcagttgccgatactataaaggcgaacagaattttcgcggaacggaacgacattcccctccatgttggggtaaccgaggcgggtccgctgattgccggggtggtgcggaatgccgcggcgtttgtggccctgttgggcgagggaattggcgataccgtccgtgtctccctttcggataccatggagaacgaggtaattgccgcgcgggaaatccttgaaacggtaagggagctgaagggggcagggggaacctcgtgcccgcgtggcgtgcgcattgtttcctgtccccgttgcggacgaagcggttttgacacccacgcttttaccgcgctttggctaaacaggctttatgccatggacaagaatattaccgtagcgataatgggttgcgcggtaaacggcccggaagaagccaggcacgcggatataggcattaccggcgcgggagacaaggtgcttatcttcagaaagggaaagataatacgcaccatcaacaccgatgaagcggacgccgctttcgaggaggagctaaggaggctttaa

SEQ ID NO: 49270 - protein, 402 aa, Unknown
  Obtained from environmental sample
  DOMAIN (32)...(402): GcpE protein
  misc_feature (1)..(402): Xaa is any amino acid
MRNCCPLCHGSFHDNPWLIKQTTVEACAAVVNMHSRTITIGGFGCVESVAIGGGLPPVIQTMWKDRLSFSDLEGKSAEAVIARIDGLKKMGCGLLRFAVPDLNAAEVLGNLSSMVSIPLVADIHFDYKIALRCLDFPIAKIRINPGNIGGRDKAEAVLKKAAANSRPIRVGVNAGSLPLDIRQRVDSGFLESAEALVLAAEREIAVFDELGFSDVLVSMKASSVADTIKANRIFAERNDIPLHVGVTEAGPLIAGVVRNAAAFVALLGEGIGDTVRVSLSDTMENEVIAAREILETVRELKGAGGTSCPRGVRIVSCPRCGRSGFDTHAFTALWLNRLYAMDKNITVAIMGCAVNGPEEARHADIGITGAGDKVLIFRKGKIIRTINTDEADAAFEEELRRL

SEQ ID NO: 49271 - DNA, 1032 bp, Unknown
  Obtained from environmental sample
  misc_feature (1)..(1032): n is a, c, g, or t
gtgtataaaataggcaatgagatatatctgggccaccccggcatcaaggtgcttccggaactgcccggcaacctgataagccgtccgacgctctcgtggatataccgcagcaaggcggcccgcgaatataacatagaagtctcctacctgacctacggtatgggctggaacgccgactacgtcctctccgtcgccgatggcaagacggcgggcgggctttccggctgggtgaccgtcaacaaccagagcggcgcggcgtacgccgacgccaagctcaagctcgtggccggcgaggtcaaccgcgtgcgcccggaggcggcgttcgcggcacctcgggcggctaagatgtctatgatggcgatggccgacaacgccgccgggttcacggagagcgggatgttcgagtaccacgtttacgatctcggccgcccggtcaccgtcaaggagaaccagacgaaacagataagcctccttgaagcgcagggggttaatgttgtaaaagagtacgtcaccaccccgtcggggccgaactacttcctatataatagtataaacgagggcgcggtgaaacagcccgtcgtcgcctacctgtcgttcaagaactcaaaggagaacaacttggcgaccccgctgcccgccggaaccgtccgcatatacaccgccgactccaagggaaaccagcagttcatcggcgaagaccgcatagaccacacgcccaagaatgaagaaatcagactaaagctgggcgaagcctttgacgtcactgccatgtggaagcaaacggacttcaaaaaaatcagcggctggggcaagtacagttacgtctatgagagcgagttcgagatagaaataaaaaatgcaaagagcgaaaatgtgtctgtaagcgtctttgaggacataccaggcgactgggaaatattggagacgagccccgctttcacaaaggggtcggcttggtcggccaaatttgtggtggacgtgcctgccgatggaagcgcaacgctgaagtacagagcaaaagtaatgatgtaa

SEQ ID NO: 49272 - protein, 343 aa, Unknown
  Obtained from environmental sample
  misc_feature (1)..(343): Xaa is any amino acid
MYKIGNEIYLGHPGIKVLPELPGNLISRPTLSWIYRSKAAREYNIEVSYLTYGMGWNADYVLSVADGKTAGGLSGWVTVNNQSGAAYADAKLKLVAGEVNRVRPEAAFAAPRAAKMSMMAMADNAAGFTESGMFEYHVYDLGRPVTVKENQTKQISLLEAQGVNVVKEYVTTPSGPNYFLYNSINEGAVKQPVVAYLSFKNSKENNLATPLPAGTVRIYTADSKGNQQFIGEDRIDHTPKNEEIRLKLGEAFDVTAMWKQTDFKKISGWGKYSYVYESEFEIEIKNAKSENVSVSVFEDIPGDWEILETSPAFTKGSAWSAKFVVDVPADGSATLKYRAKVMM

SEQ ID NO: 49273 - DNA, 489 bp, Unknown
  Obtained from environmental sample
  misc_feature (1)..(489): n is a, c, g, or t
atgcactggggtgaggagtacaagtttaactacaacaaggaacaggaaagacttgccgccttcctcgccgatcagcaggtagatctggttataggccatcatccccatgtgattgaacctctggtgatcatgaagcgggaagacggcggatcaatgccggtcttttattctcttggtaattttctttcagcccatatgacgcccataaaagacactcttttgggcggcataatgtatgtgaagctgaaaaaatcagagaaaacaatcagcatagaagaaatagggcttgtccccattatcactcatttcgatgtgagcctgtcaggcttcagtatttaccctctgcaggaatacaccgaagaaatggcatccagacactggaaccgccgcagaggcgacaacaccgtgacacacagctattttatgaaaacagccgctgatatgttcgggccgaatttgattctggaaaacccttttacaaaaaagtga

SEQ ID NO: 49274 - protein, 162 aa, Unknown
  Obtained from environmental sample
  misc_feature (1)..(162): Xaa is any amino acid
MHWGEEYKFNYNKEQERLAAFLADQQVDLVIGHHPHVIEPLVIMKREDGGSMPVFYSLGNFLSAHMTPIKDTLLGGIMYVKLKKSEKTISIEEIGLVPIITHFDVSLSGFSIYPLQEYTEEMASRHWNRRRGDNTVTHSYFMKTAADMFGPNLILENPFTKK

SEQ ID NO: 49275 - DNA, 837 bp, Unknown
  Obtained from environmental sample
  misc_feature (1)..(837): n is a, c, g, or t
atggcaggcagggttcccctttccagttttgtgcgctacgagcagggaaccggccctctcacaatcagccgtgaaaaccaaagtcgtattattcatgtcaccgccggtgcccggccgggcgcaaaaatgaatactcttcattcgcgggtggatgagcttatcaagcaggagattcccattgaagacgacgttatcattgagataggcggcgacaacgcccagatgataaagatgttcacacgattccttttgatctgcgttgtggcggtttttctggtattcggcgttatggcgtctcttttcgaatcgttccgcgatccgtttatcatcatctttacgataccgctttcgctaatcggtattgtgtcgatttatctgattaccaatactatcttcaacgtgctgaccgcggtgggcctgctggtactgttaggcgtaatcgtaaacaacggtatcgtattggtggactacaccaacctgctgcgtaagcggggttattctctgcacgacgcctgcgtcgaggcagccggcaaccgcctccgcccgatactgatgaccaccctcaccacggtcttcggccttattcccatggcgttcttccccggcgaaggctcggaactggtggcgcctatcggcaaaacggtactaggcggtcttaccatcggcacgctgatgactctgtttctgatgccgaccgtgtacgccgtgttgaacaagcgttcggatgaacgtgctgcccgcgccgaagcgcggcgtgaaggcatagcattggagaaagcggccgcgccaaacaaaagaaagcccaatcggctgcgaccgcagccgcaaccgcgttag

SEQ ID NO: 49276 - protein, 278 aa, Unknown
  Obtained from environmental sample
  misc_feature (1)..(278): Xaa is any amino acid
MAGRVPLSSFVRYEQGTGPLTISRENQSRIIHVTAGARPGAKMNTLHSRVDELIKQEIPIEDDVIIEIGGDNAQMIKMFTRFLLICVVAVFLVFGVMASLFESFRDPFIIIFTIPLSLIGIVSIYLITNTIFNVLTAVGLLVLLGVIVNNGIVLVDYTNLLRKRGYSLHDACVEAAGNRLRPILMTTLTTVFGLIPMAFFPGEGSELVAPIGKTVLGGLTIGTLMTLFLMPTVYAVLNKRSDERAARAEARREGIALEKAAAPNKRKPNRLRPQPQPR

SEQ ID NO: 49277 - DNA, 1119 bp, Unknown
  Obtained from environmental sample
  misc_feature (1)..(1119): n is a, c, g, or t
atgtcggtcttaagccttgttttctcggacggaacttcagccaaattgccgcctatcacggattcaaacgcgtttgtgccaaggcagtacgttctttcagatgcagcgcagggcaggactatttcttcaattagaattgagaataacaatacccaccgcgaagtttcggtcggaaaaattgaaatttttgacccgacatccacaacgggcggtctggtgccgcagaactctctttctaccgcacgcgacgcgattataacgatggaaggaatagaaataacgcgcccgaccaataatatagacgaccttattcccggccttactcttaatgtaaggggggtatccgagcgtcctgtggacttaaaagtaaaaggcgacacggaaaaagtaaaagaagcgataataaattttgtcggaaactacaacaggcttatagccgaaataaacgtgcttaccgcaagaagcgtatcctcagggtccggaaccaaaacaagcgtagacgattcggtattaaatgaattgacttatttaaccgcggatgaaagagcggaaatgagaaccagacttggcgcttttaacggggatcttacgctgaaccagcttaaaaacaggcttttacagtccgttaccgcgccctaccccaccagccttgaacgcgatctttcgcttcttgcgcaaatcggaattggaaccaacgcggcaagaggcgccggttatgagccgtccaagcttcgcggttatcttgaaatagacgagaaaaaactggactcctcgcttgagaataaaattccggctatcaaggaacttttcgcgagcgatacatccggcgacatgattgcggataccggagttgcgtataacgttgacgcgattgtaaaaccgtttgtggaagtcggcggaattatcacattaaaaacaaataccatagattcgcgaataactcaggatgaaaggcgcgtcagcactatggaacgccagcttgcggcaaagaacaggaacttaaaattcaatacgcaagaatggaagccgcttacgcgcgaatggaatccatgtccacttctcttgacaatttcagccagcaaaaccgtcaaagcaacaacaggtaaggtatggaaataa

SEQ ID NO: 49278 - protein, 372 aa, Unknown
  Obtained from environmental sample
  DOMAIN (81)...(339): Flagellar hook-associated protein 2 C-terminus
  misc_feature (1)..(372): Xaa is any amino acid
MSVLSLVFSDGTSAKLPPITDSNAFVPRQYVLSDAAQGRTISSIRIENNNTHREVSVGKIEIFDPTSTTGGLVPQNSLSTARDAIITMEGIEITRPTNNIDDLIPGLTLNVRGVSERPVDLKVKGDTEKVKEAIINFVGNYNRLIAEINVLTARSVSSGSGTKTSVDDSVLNELTYLTADERAEMRTRLGAFNGDLTLNQLKNRLLQSVTAPYPTSLERDLSLLAQIGIGTNAARGAGYEPSKLRGYLEIDEKKLDSSLENKIPAIKELFASDTSGDMIADTGVAYNVDAIVKPFVEVGGIITLKTNTIDSRITQDERRVSTMERQLAAKNRNLKFNTQEWKPLTREWNPCPLLLTISASKTVKATTGKVWK

SEQ ID NO: 49279 - DNA, 786 bp, Unknown
  Obtained from environmental sample
  misc_feature (1)..(786): n is a, c, g, or t
ttgaagctgtctaacgaagagtacatatcgttgaacgagtcttttctgcgcaatcaagcggggataattgccgcgaagttggcggacggcgcgccgtgcccggtctgcggttccgtcgagcatcccgccccggcgaaattgacggtcggcgacgtgacggaggcgaggctcaaaagcgcgaaagcgacggttgacagagcgcaggaagggtgtaatcaaaagagtacggagtgcgccgggctgaagagcgaaattgaaacgcgcgaaaagagtttttttgcggagttttccgcgatcattccgaatgtaaatatggatacggcaggcgtgcagttgaccgacgcgtatactctggcgcagaggcgggtgaaagagttgatcgactacatgaaaaacgcggagaaaaaactgaccgaacggcgtacgcagagggacagcgccgcaaaacggagcggcgaagcggagatttcgtataacaaagcgataacgcttgcggcggaacgcgagaggcacgagggcgaacaaaaaaaatctcgcgatcaggcgcacacggactacgtccattcgctaagcgtcaacggattcgcggatgaagcggagtacgccgccgtacttgtcacggaggaaacgctctctaatatgatcaaacggcttgccgattacgagaaagacggcgagcggctaaagcgcgacatcaatcgtttggagggggagacggcgggcaaagaaaggcccgatacggaaaagttagcccgccgagaaaaacgcggtagtcggcgcgattaa

SEQ ID NO: 49280 - protein, 261 aa, Unknown
  Obtained from environmental sample
  misc_feature (1)..(261): Xaa is any amino acid
MKLSNEEYISLNESFLRNQAGIIAAKLADGAPCPVCGSVEHPAPAKLTVGDVTEARLKSAKATVDRAQEGCNQKSTECAGLKSEIETREKSFFAEFSAIIPNVNMDTAGVQLTDAYTLAQRRVKELIDYMKNAEKKLTERRTQRDSAAKRSGEAEISYNKAITLAAERERHEGEQKKSRDQAHTDYVHSLSVNGFADEAEYAAVLVTEETLSNMIKRLADYEKDGERLKRDINRLEGETAGKERPDTEKLARREKRGSRRD

SEQ ID NO: 49281 - DNA, 1392 bp, Unknown
  Obtained from environmental sample
  misc_feature (1)..(1392): n is a, c, g, or t
atggccgacttcgcggcgcagttggcggaatgccgtaagcctttccccgcctctgaaaagatatacgtggaaggcggcatgtccggcgtcagggtgcctttcaggcgcgtatccttgacctgcgccgaatccgtcacgctctacgacacgatgggtccctacaccgacccgaatgcgatgatagacttggccaagggcctcgcgccccttcggctgccctgggtgctggagatgggcgacgtggaggaactggacgcgccgtccagccgctaccgcaggcagagggacggcgaccaggcactggacggcatacgctttccgtccccccgcaggccgctccgcgcaaaggcgggccgccgcgtcacgcagcttcactacgccaggaatggcatcatcacgccggagatggagtacatcgcaatcagggagaacctgggcaattcagcaaacagccacatcacgccagaattcgtgcgccaggaggtagcggcaggcagggcggtgataagcgccaacgtgaaccacccggaggccgagccgatgatcataggcccggccttcctcgtaaaaataaacgccaacatcggcaactcggccattgcctcctctattggcgaagaggtggagaagatggtctgggccataaggtggggcgcggacacggttatggacctaagcaccggcgccaacatccacgagaccagggaatggatactcaggaactcccccgtgcccataggcacggtgcccatttaccaagcactggagaaggtgggcggcagggcggaggagctttcctgggacattttccgcgacacgctggtggagcagtgcgagcagggtgttgactatttcaccatccacgccggtgtccgcctgatgcacgtccccctcacggctgctaggagaacggggattgtcagcaggggcggctccatacttgcaaaatggtgtctggcgcaccacaaggaaaacttcctgtacgcccacttcgacgaggtgtgcgagctgcttgcctcctacgacgtggcagtgagcctgggcgatggattcagaccaggctgcgtagcggacgccaacgacgcggcgcagttcgcggagttggacacgctgggcgagttgaccctgcgggcccgtgcgctggattgccaggccttcatagaaggccctggccacgtccccatgcacctgatacgcgaaaatatgggaaaggcagcaaagggtctgccacggcgcgcccttctatacgcttggccccctggtgaccgacattgcccccggctacgaccacataacgagcagcataggtgccgctgttatagggatgcttgggactgccatgctctgttatgttaccccaaaggaacacttgggtttgcccaacaaagatga

SEQ ID NO: 49282 - protein, 463 aa, Unknown
  Obtained from environmental sample
  DOMAIN (122)...(456): ThiC family
  misc_feature (1)..(463): Xaa is any amino acid
MADFAAQLAECRKPFPASEKIYVEGGMSGVRVPFRRVSLTCAESVTLYDTMGPYTDPNAMIDLAKGLAPLRLPWVLEMGDVEELDAPSSRYRRQRDGDQALDGIRFPSPRRPLRAKAGRRVTQLHYARNGIITPEMEYIAIRENLGNSANSHITPEFVRQEVAAGRAVISANVNHPEAEPMIIGPAFLVKINANIGNSAIASSIGEEVEKMVWAIRWGADTVMDLSTGANIHETREWILRNSPVPIGTVPIYQALEKVGGRAEELSWDIFRDTLVEQCEQGVDYFTIHAGVRLMHVPLTAARRTGIVSRGGSILAKWCLAHHKENFLYAHFDEVCELLASYDVAVSLGDGFRPGCVADANDAAQFAELDTLGELTLRARALDCQAFIEGPGHVPMHLIRENMGKAAKGLPRRALLYAWPPGDRHCPRLRPHNEQHRCRCYRDAWDCHALLCYPKGTLGFAQQR

SEQ ID NO: 49283 - DNA, 516 bp, Unknown
  Obtained from environmental sample
  misc_feature (1)..(516): n is a, c, g, or t
gtgcatggggacgtggccagggccttctatgaaggcctggcaatccagcgcacgggcccgcagggtcaactcgcccagcgtgtccaactccgcgaactgcgccgcgtcgttggcgtccgctacgcagcctggtctgaatccatcgcccaggctcactgccacgtcgtaggaggcaagcagctcgcacacctcgtcgaagtgggcgtacaggaagttttccttgtggtgcgccagacaccattttgcaagtatggagccgcccctgctgacaatccccgttctcctagcagccgtgagggggacgtgcatcaggcggacaccggcgtggatggtgaaatagtcaacaccctgctcgcactgctccaccagcgtgtcgcggaaaatgtcccaggaaagctcctccgccctgccgcccaccttctccagtgcttggtaaatgggcaccgtgcctatgggcacgggggagttcctgagtatccattccctggtctcgtggatgttggcgccggtgcttag

SEQ ID NO: 49284 - protein, 171 aa, Unknown
  Obtained from environmental sample
  misc_feature (1)..(171): Xaa is any amino acid
MHGDVARAFYEGLAIQRTGPQGQLAQRVQLRELRRVVGVRYAAWSESIAQAHCHVVGGKQLAHLVEVGVQEVFLVVRQTPFCKYGAAPADNPRSPSSREGDVHQADTGVDGEIVNTLLALLHQRVAENVPGKLLRPAAHLLQCLVNGHRAYGHGGVPEYPFPGLVDVGAGA

SEQ ID NO: 49285 - DNA, 402 bp, Unknown
  Obtained from environmental sample
  misc_feature (1)..(402): n is a, c, g, or t
gtgaccgacattgcccccggctacgaccacataacgagcagcataggtgccgctgttatagggatgcttgggactgccatgctctgttatgttaccccaaaggaacacttgggtttgcccaacaaagatgatgttcgcacgggtgtgataacatacaagttggccgcccacgccgcggacatagccaaaggcaacgagcaagctctgctacgggacagagccttgagccgcgcccgttttgacttccgttgggaagaccaatttgccctttccctagacccagaaacagcacgtgcatttcacaaagaatcactctcttcgcaaacaggcgactccaaattttgctccatgtgtgggccagatttttgcgctatgaaaaatacacaaaagttaaaaacttag

SEQ ID NO: 49286 - protein, 133 aa, Unknown
  Obtained from environmental sample
  DOMAIN (1)...(132): ThiC family
  misc_feature (1)..(133): Xaa is any amino acid
MTDIAPGYDHITSSIGAAVIGMLGTAMLCYVTPKEHLGLPNKDDVRTGVITYKLAAHAADIAKGNEQALLRDRALSRARFDFRWEDQFALSLDPETARAFHKESLSSQTGDSKFCSMCGPDFCAMKNTQKLKT

SEQ ID NO: 49287 - DNA, 1590 bp, Unknown
  Obtained from environmental sample
  misc_feature (1)..(1590): n is a, c, g, or t
atgttccgtcattttaaaaatatacttgcggaaaaaaatattaatgactgtcccacaaaaaaggaatacataaaagaattaaccaaccggcttggagtttttaaacggcagcctgatgtaaatccttatcttgattcacttacccgctcaattggttttaaaccgctcgattccatcgatcaatttgtgtgtgactttattctcgaagaaaatcccgtatcgattcaggacatgaagcagaaccttgaaaattacaaggaggcggatcggcaggcaaaaggggcgattgcgaaaatcggcatgctgaaaaaaatctgcgctaaagcggcggaatggctcaattatgacgggcttatcatcaaacaggaatatttgaaactcagcattgagcgggaaaatgaaaaacaaaagaaagacaatgccatgcgtcagcttgtggaaacgcagagcaaactggatttcactaaccgcgaaattaatgcactaaaccaaaaacagttggacgcagaacaggaattaagggctttagatcagagtcttgccgataacaatgcacataggctctacgaagaaattagagcgcggattgaacgaataaaactcgaccttgccaagcaaacagaacaggcagaaaaatatagggacttaaaatcccaatgcgaaacacttttgaaccgtgccttgacagaaaactttgacgcggaagacgccgcccttgccgaagaagcgaagaaatatcaaaacgaaagatacatagccgaacagaaaaaaaatgaaacccaaaatttactccgtgatattcgttctgaaatggcggaacttgatcgaggcatactccgctatcctgatgctccacgtgaattgcggacggctcttgaaaaggccggcattgaggctttctttcttgcggaagcggcggaaattaccgcgcctgactgggttgacgctgttgaaggctgtctcaacacacgacgcttcgccattctggttgaccctgttcattttcaaaaagccattgaagtatacaaccgcctcccccgttctgtagccggcgcgtttatccctaatatagaaaagatgcgggatgcaaaggcaaagcttggttctctcgcggaaattgtcaaggccgaaggttatgcccgtatttatatcgactataccctggggaaggtaatgcgctccgaactcacaaatcttaaaacgtatgattccgcggttaccaaggaatgtatgacctatatgaaccataccgcttcacggatcaaagaagatatttacctccgtcattatcttggaagggccgctttggacaagcgtaaaaaagaccttgccgccgaagcggaacgcgtcgaagcggaattgctcaccgccgagagagaggaacgggaagcgcgtggtcacgaggattgttgtaaccgcgttattcgttatctgcccgaattaaaatatctttttccttccattgcaggcgcggaactgcttgcaaatcaacttgcagccgcagaggaagaacttgccgcgatagatacccaatccttcaaggaactggaaaataaacgtgatgaattggtgaagtatcttgaactgtaa

SEQ ID NO: 49288 - protein, 529 aa, Unknown
  Obtained from environmental sample
  misc_feature (1)..(529): Xaa is any amino acid
MFRHFKNILAEKNINDCPTKKEYIKELTNRLGVFKRQPDVNPYLDSLTRSIGFKPLDSIDQFVCDFILEENPVSIQDMKQNLENYKEADRQAKGAIAKIGMLKKICAKAAEWLNYDGLIIKQEYLKLSIERENEKQKKDNAMRQLVETQSKLDFTNREINALNQKQLDAEQELRALDQSLADNNAHRLYEEIRARIERIKLDLAKQTEQAEKYRDLKSQCETLLNRALTENFDAEDAALAEEAKKYQNERYIAEQKKNETQNLLRDIRSEMAELDRGILRYPDAPRELRTALEKAGIEAFFLAEAAEITAPDWVDAVEGCLNTRRFAILVDPVHFQKAIEVYNRLPRSVAGAFIPNIEKMRDAKAKLGSLAEIVKAEGYARIYIDYTLGKVMRSELTNLKTYDSAVTKECMTYMNHTASRIKEDIYLRHYLGRAALDKRKKDLAAEAERVEAELLTAEREEREARGHEDCCNRVIRYLPELKYLFPSIAGAELLANQLAAAEEELAAIDTQSFKELENKRDELVKYLEL

SEQ ID NO: 49289 - DNA, 513 bp, Unknown
  Obtained from environmental sample
  misc_feature (1)..(513): n is a, c, g, or t
atgctcactgacggcagagacgggaagaaatacaagactgtggtgattgggggaaagaggtggatggctcagaatctgaattatcagtcggggcagtcatggtgttataacaataataattccaactgcgacaaatacggtcggttgtatgactggaataccgcaaagatggtttgcatgacgggatggcatttgccgtctcgccaagagtggattaatttggtggcggtggtgggtggtaacaaggtggcggctaagaagttgagagcgaaaaacggttggaataaaaaaggtaacggtacagacgattatggattttcagccttgccaggcggctaccgtaactcaagtggcaagttcggcaatgtcggcgaggagggcgattggtggacggctacggagtacaatgatagcaacgcttaccgccaatatatggactacctcaacaacggattgtttgatggcaactactataaggattacgggcgttctgttcgttgcatccaagattag

SEQ ID NO: 49290 - protein, 170 aa, Unknown
  Obtained from environmental sample
  misc_feature (1)..(170): Xaa is any amino acid
MLTDGRDGKKYKTVVIGGKRWMAQNLNYQSGQSWCYNNNNSNCDKYGRLYDWNTAKMVCMTGWHLPSRQEWINLVAVVGGNKVAAKKLRAKNGWNKKGNGTDDYGFSALPGGYRNSSGKFGNVGEEGDWWTATEYNDSNAYRQYMDYLNNGLFDGNYYKDYGRSVRCIQD

SEQ ID NO: 49291 - DNA, 1467 bp, Unknown
  Obtained from environmental sample
  misc_feature (1)..(1467): n is a, c, g, or t
atgcgctacaaattctccagcgtggcaaaagtggatggcggttattacatctacattccatcttgggcagggcaaaaattcaaaacaactggtggccaacctgtttgcacaggcactccagctcctccagctccaggtgcaagcagttcctcaattgcttcttctaatacttcttcctcttctgccgcaagtgcaagcacaagcggttgcgttgacccaatgtatggtgttcctccaaatggcacaaaatcctgcattaaaaaagacggcaaatgctacacctgcaatccagaccgtggcaatgaatgttcgcaaccgtggatttggcaggcgaacagcatagatacctattggtataaagaggtctcttgctcagaaaccagcggaggtggtaccacttataatttgacttgcaccggccttgctcaaacaggggttgcaggcacggcagttacccagcctaccgtaaaatgcaatgctgataatgcaaccgctacctttgcaagcgcacctatttggaataacccggtagcgggtacttacaatgtgacagcaacggcaaattgcggcggaaacaaaacggtcagttgcggaacgctaacagttagcgcggctcctacaaccgaccaactcacttgcacaggacttgctcaaacaggagttgcaggaactgcaataacacaaccaaccgttaaatgcggtactagcacactaaccagtggtatcacttggacaaatgcacctagttgggctaaccccaccgccaacacctacgctgtatcggctgcggcaacttgcggaggaagcaacaaaacggcaacttgcggaagcataaaggttaacccaaaattgagctgcggcaacccatcgccagcaacggtaatcgctggcactgcggtaaccgcaccagccgtgacttgtggttccactactattcaaaatacaagttcaaatatcgtttggagcggggcccctgattactggagcggtccggctgctggtacttataacaatattaaagcaactgcaaataccggagattgcagcggtcagacagcgacttgcggctctttgacggttaatagcaaactcacttgcaactccgtcacgcaagcgataacaagtgggacaaaagctaccaagccagatgtgatgtgcggaaccactaaggttatcagcggtatcacttggaccccaaatttagacaataatctcacggcaacagttaataatgtgacggcagcggctagctgcggcggtagcaatcaaacagctacttgcgcaggtacaataacggttaccgctcaacaacaacccactccaagctcttcaagcggtggcaatagcggcggcaacccaagttataccccaacatcacctggaagcgaaacatcaaaagttactcagtattgggatgcttgcaaaccgagttgctcatggagcggcaaaggcgggcaagcaagctaa

SEQ ID NO: 49292 - protein, 488 aa, Unknown
  Obtained from environmental sample
  misc_feature (1)..(488): Xaa is any amino acid
MRYKFSSVAKVDGGYYIYIPSWAGQKFKTTGGQPVCTGTPAPPAPGASSSSIASSNTSSSSAASASTSGCVDPMYGVPPNGTKSCIKKDGKCYTCNPDRGNECSQPWIWQANSIDTYWYKEVSCSETSGGGTTYNLTCTGLAQTGVAGTAVTQPTVKCNADNATATFASAPIWNNPVAGTYNVTATANCGGNKTVSCGTLTVSAAPTTDQLTCTGLAQTGVAGTAITQPTVKCGTSTLTSGITWTNAPSWANPTANTYAVSAAATCGGSNKTATCGSIKVNPKLSCGNPSPATVIAGTAVTAPAVTCGSTTIQNTSSNIVWSGAPDYWSGPAAGTYNNIKATANTGDCSGQTATCGSLTVNSKLTCNSVTQAITSGTKATKPDVMCGTTKVISGITWTPNLDNNLTATVNNVTAAASCGGSNQTATCAGTITVTAQQQPTPSSSSGGNSGGNPSYTPTSPGSETSKVTQYWDACKPSCSWSGKGGQAS

SEQ ID NO: 49293 - DNA, 522 bp, Unknown
  Obtained from environmental sample
  misc_feature (1)..(522): n is a, c, g, or t
atggaaagcgagcaaacggtgatgagcggtttagtaaaaattatagcctttgatttggaaaccacaggcctcgatgcaagcaaagaggagataatagaattaggagctataatgttttccgtgaaggagagcagaggtcgcttggttcccgatgaattagaggaattccagtatttgcttaaaacttcaaaaaaaatatccaatgaagccacaaagataaatcacataacaaacgaaatgctttctgccgcatcagcaccggtggaggttttgcaaaaattcaaaatcttttgcgataaagccaactgcctaattgctcacaacgccgcttttgacaccagctttttaagcaccgcctacgggaaacacctggtaaccgcacctacattgccaattttggacagcatgaagatagctcgcaatataatacagctcccctcttacaagctgggtgtaatagccaaagccctgaaggcagaaacgaaatttcatgaaaatcaaagatatctcgtgccgatctga

SEQ ID NO: 49294 - protein, 173 aa, Unknown
  Obtained from environmental sample
  DOMAIN (14)...(171): Exonuclease
  misc_feature (1)..(173): Xaa is any amino acid
MESEQTVMSGLVKIIAFDLETTGLDASKEEIIELGAIMFSVKESRGRLVPDELEEFQYLLKTSKKISNEATKINHITNEMLSAASAPVEVLQKFKIFCDKANCLIAHNAAFDTSFLSTAYGKHLVTAPTLPILDSMKIARNIIQLPSYKLGVIAKALKAETKFHENQRYLVPI

SEQ ID NO: 49295 - DNA, 1041 bp, Unknown
  Obtained from environmental sample
  misc_feature (1)..(1041): n is a, c, g, or t
ttgattaagctcgacctttggatgagcaaacgtccatgctgggcttgcatagtctatgacagcntgcgtatattcttgcttgaacattgcacaataagagccacggctttggtttacacctcgctcttggccgctgttccgctggtaattctgctcacctcaataagcctgtacttaggcgttggggatttattcataactcacctaccggaattattgccggatgttttagcgaaaataatgccgcacataaatggggctatacacatatttttgccggggaacttcatagagttagacgctatggtaaccgtgattttagaaaatataatgccattcctcactatggcacaagggataaggctcggttctttaggcgttgtgggcgggtttgggctgctcgtgacatttatactcgccatagataccatagagaccaatatgaacatagtttggggagtaaatgaaagccgaggctatgggcaaaaagccgccatattcatccccttcttgcttttgttcgcaggtggcatagctatactcagcttgtttttgcactatatgcaaaaagccctagaaagtattttgctggaacaatcgccctttggggaagtgagccagctgttgatagatttaagcatcccggtagttttgctgctcctcgctatattcgctctgtggcttttgtattgctatatgccttatgtgccagggagaaaaggttttttgaaaaccacaatagaaaaaacaaaaacaaggtggttcgctgcccttatatccgctgcgttcacatttgtggccgtatccgtttttattctggctatggcaatattgcaagctgggatgttcacaaaatggtcgctcttctacggctcgcttgctgttttccccatgataatgttcatactattcggtttttggagcattgtgctttttggcaacaccctctgctggagaataacggatagaaaagatagtaatggcaaatatagacctcagagatattttctgcgtaaaatatggaaagcgagcaaacggtga

SEQ ID NO: 49296 - protein, 346 aa, Unknown
  Obtained from environmental sample
  DOMAIN (26)...(324): Ribonuclease BN-like family
  misc_feature (1)..(346): Xaa is any amino acid
MIKLDLWMSKRPCWACIVYDSXRIFLLEHCTIRATALVYTSLLAAVPLVILLTSISLYLGVGDLFITHLPELLPDVLAKIMPHINGAIHIFLPGNFIELDAMVTVILENIMPFLTMAQGIRLGSLGVVGGFGLLVTFILAIDTIETNMNIVWGVNESRGYGQKAAIFIPFLLLFAGGIAILSLFLHYMQKALESILLEQSPFGEVSQLLIDLSIPVVLLLLAIFALWLLYCYMPYVPGRKGFLKTTIEKTKTRWFAALISAAFTFVAVSVFILAMAILQAGMFTKWSLFYGSLAVFPMIMFILFGFWSIVLFGNTLCWRITDRKDSNGKYRPQRYFLRKIWKASKR

SEQ ID NO: 49297 - DNA, 411 bp, Unknown
  Obtained from environmental sample
  misc_feature (1)..(411): n is a, c, g, or t
atgatcagatcggccgagatgggcatgaacgtgacgctctgcggcccgccgacgctgcttccgcagcatacggactcgctaggagtgcccgttaccgacaacatcgacgaggcgctggacggggctgacgttgtgatgctgctgcgcgtgcagcttgagcgtcagtcaagcgccgtcttcccctccgtgcacgagtaccgcgagcgctacggatttgacttggagaggctgtctcggatgaagaaagaggtggtgatcatgcaccccggcccgattaacaggggcgtggagttggcgtctaacgtggcggattccggcaattccgtgatattggatcaggtgaccaacggtgtcgccgttcggatggcggtgctttacctgctgggaggtggagggggagaaaatggttaa

SEQ ID NO: 49298 - protein, 136 aa, Unknown
  Obtained from environmental sample
  DOMAIN (1)...(128): Aspartate/ornithine carbamoyltransferase, Asp/Orn binding domain
  misc_feature (1)..(136): Xaa is any amino acid
MIRSAEMGMNVTLCGPPTLLPQHTDSLGVPVTDNIDEALDGADVVMLLRVQLERQSSAVFPSVHEYRERYGFDLERLSRMKKEVVIMHPGPINRGVELASNVADSGNSVILDQVTNGVAVRMAVLYLLGGGGGENG

SEQ ID NO: 49299 - DNA, 1182 bp, Unknown
  Obtained from environmental sample
  misc_feature (1)..(1182): n is a, c, g, or t
gtgtcgccgttcggatggcggtgctttacctgctgggaggtggagggggagaaaatggttaaaaaagggtctggcagcgtagaatacccgcgcagcaacgagccgcagtcgaggccgctcgttatcgcgaacggccgggtgatcgatccggcctccggtatcgacgggacgcggacggtcgtacttgacaatggtgtcgtcaagctcgtcacggatagaccgtttgtcaagtctatgggcgaagagttgtttcccggttgcggggaggacggcgtcgatgttattgacgccgccgggttgtgggttgttcccggtcttgtggacatgcacgtccacctccgcgaacccggtcgggaggacaaggagacgatagcgacgggcgctcaggcggctgcggctggcgggttcaccgccgtggcctgtatgcccaacacgagtccggtgctagacgaggcctccaagattcgctacgtgatccaacgcggcgagagttgcccctgccgcatataccccatcggcgcgataaccaaagcccttgagggtgaggaactcgccccggtcggcgagatggtcaaagcgggcgcagtcgcggtctccgacgacgggaagccggtggccaaggcgaacgtaatgcgcaacgccctcaactactccaagtcgtttaacatccccgtgatatgccacagcgaggagccgtcgctcagcgccaaggggcacatgaacgaggggccgacatcggcgcgcctcggcgtcaggggcataccggtcgtcgccgagaccatcgccgtgtcgagagacatactgctggcggagtacacaggcgcgagggtgcacatagcgcacgtatcgaccgccgggtcggtgcgattggtgcgggaggcgaagcaacgcggcgtaaacgttacggcggagagctgcccgcactacttcacgctcaccgatgaagacgtcggcctctacgatacgaacaagaagatgaacccgccgctgcgtaccgccgcagacagggaggcggttatagcgggccttgccgacgggactatcgatgtcatagccagcgaccacgcccccgacgttccggaggagaaagacgttgaaatccaacacgcggcgttcggcgtgatcgggaggagaactcccttggccttgtggcttacgtcctggttaaaaaggcttatatga

SEQ ID NO: 49300 - protein, 393 aa, Unknown
  Obtained from environmental sample
  DOMAIN (101)...(385): Amidohydrolase family
  misc_feature (1)..(393): Xaa is any amino acid
MSPFGWRCFTCWEVEGEKMVKKGSGSVEYPRSNEPQSRPLVIANGRVIDPASGIDGTRTVVLDNGVVKLVTDRPFVKSMGEELFPGCGEDGVDVIDAAGLWVVPGLVDMHVHLREPGREDKETIATGAQAAAAGGFTAVACMPNTSPVLDEASKIRYVIQRGESCPCRIYPIGAITKALEGEELAPVGEMVKAGAVAVSDDGKPVAKANVMRNALNYSKSFNIPVICHSEEPSLSAKGHMNEGPTSARLGVRGIPVVAETIAVSRDILLAEYTGARVHIAHVSTAGSVRLVREAKQRGVNVTAESCPHYFTLTDEDVGLYDTNKKMNPPLRTAADREAVIAGLADGTIDVIASDHAPDVPEEKDVEIQHAAFGVIGRRTPLALWLTSWLKRLI

SEQ ID NO: 49301 - DNA, 543 bp, Unknown
  Obtained from environmental sample
  misc_feature (1)..(543): n is a, c, g, or t
atggcaattttagcgagaaaattacaagaaagtaaaaccaaagctattggcgaactcaaagatacattaaaagccgcaaacgactttatctttactgaataccgcggtcttactgtagaacaaatcacagagttaagaaaacaactgcggacaaagggcgtagtttataaagttgtaaaaaataattacgcgcaaattgtttttaaagagttgtcggatcaggatgtatccaaataccttgtaggacctaccgcggtagcgattaccccgaaggattccaacgaagtagcgaagatactctttgagttcttaaaagaagttccagctttaaaggtaaagggcgcgttgctaagcaacgctgtatacgataccgctcaaaccgaggcgttctccaaactgccgggcagactggaacttatttctatgcttatgtcggtaatgaacggtcccgcgcgcggtcttgtttccgctctcaacgacattccgtcaagattggtgcgtacagttaaagctgtcgccgatcaaaaggagaaagcaggttga

SEQ ID NO: 49302 - protein, 180 aa, Unknown; identical to SEQ ID NO: 18474
  Obtained from environmental sample
  DOMAIN (7)...(105): Ribosomal protein L10
  misc_feature (1)..(180): Xaa is any amino acid

SEQ ID NO: 49303 - DNA, 480 bp, Unknown
  Obtained from environmental sample
  misc_feature (1)..(480): n is a, c, g, or t
gtggatataaattaccgagaaaacaaacttttttactgtatttcaacagtaccgcccgcagcggtgacgacttccttaattttcgccgcctcgtccttggaaacgccttccttgaggggtttgggcgcgccttcgacaaggtcttttgcctctttaagtccaagtccggttacgccgcggacttccttaataacggcaattttcttggcttcgtcaaatgctttaagaatgacgttaaactctgttttctcttcggacgccggagcggctccaccgccgccgccgccaccgccggctaccgctaccgcaacaggcgcggcggcggaaacaccgaatttttcttccatcatttttaccagttctgaaacttcaagaactgacatggaagcaatcgcttctaaaatttcttctttgctggctgccatattatcttctcctaaattgtgttatgcgcttcatacgaaacgcttgtccgcctga

SEQ ID NO: 49304 - protein, 159 aa, Unknown
  Obtained from environmental sample
  misc_feature (1)..(159): Xaa is any amino acid
MDINYRENKLFYCISTVPPAAVTTSLIFAASSLETPSLRGLGAPSTRSFASLSPSPVTPRTSLITAIFLASSNALRMTLNSVFSSDAGAAPPPPPPPPATATATGAAAETPNFSSIIFTSSETSRTDMEAIASKISSLLAAILSSPKLCYALHTKRLSA

SEQ ID NO: 49305 - DNA, 393 bp, Unknown
  Obtained from environmental sample
  misc_feature (1)..(393): n is a, c, g, or t
atggcagccagcaaagaagaaattttagaagcgattgcttccatgtcagttcttgaagtttcagaactggtaaaaatgatggaagaaaaattcggtgtttccgccgccgcgcctgttgcggtagcggtagccggcggtggcggcggcggcggtggagccgctccggcgtccgaagagaaaacagagtttaacgtcattcttaaagcatttgacgaagccaagaaaattgccgttattaaggaagtccgcggcgtaaccggacttggacttaaagaggcaaaagaccttgtcgaaggcgcgcccaaacccctcaaggaaggcgtttccaaggacgaggcggcgaaaattaaggaagtcgtcaccgctgcgggcggtactgttgaaatacagtaa

SEQ ID NO: 49306 - protein, 130 aa, Unknown
  Obtained from environmental sample
  DOMAIN (62)...(130): Ribosomal protein L7/L12 C-terminal domain
  misc_feature (1)..(130): Xaa is any amino acid
MAASKEEILEAIASMSVLEVSELVKMMEEKFGVSAAAPVAVAVAGGGGGGGGAAPASEEKTEFNVILKAFDEAKKIAVIKEVRGVTGLGLKEAKDLVEGAPKPLKEGVSKDEAAKIKEVVTAAGGTVEIQ

SEQ ID NO: 49307 - DNA, 399 bp, Unknown
  Obtained from environmental sample
  misc_feature (1)..(399): n is a, c, g, or t
gtgaaagacgttattaagttcagatttgcggggatcgggattgtgctggcgatgtgcgcggtgttcgcggttggggttatgctgctttggaacgcgcttatgccgcagattttcgggcttccgcaggtgggttacttgcaagcggcggggcttttgctgctcgcgaggctcttgttcggcggcctcagccaccgtcacggcgggcctttgggacatagaggtatgcaccacggcggcaatatgctgcgggagaggtgggcggggatgtcggaagcggagcgggcggcggtcatcagcaggggcgatccgcgcttttgggactttatgagggacaggggacggccggatatgggcgacagggggcggacggagacagccgggaaaccggagcaaaagtga

SEQ ID NO: 49308 - protein, 132 aa, Unknown
  Obtained from environmental sample
  SIGNAL (1)...(23)
  misc_feature (1)..(132): Xaa is any amino acid
MKDVIKFRFAGIGIVLAMCAVFAVGVMLLWNALMPQIFGLPQVGYLQAAGLLLLARLLFGGLSHRHGGPLGHRGMHHGGNMLRERWAGMSEAERAAVISRGDPRFWDFMRDRGRPDMGDRGRTETAGKPEQK

SEQ ID NO: 49309 - DNA, 387 bp, Unknown
  Obtained from environmental sample
  misc_feature (1)..(387): n is a, c, g, or t
atgcaaagtatccgcgattatattgaaaagtatccttcggcatggaacggctggtttgttctgggctgggcactgcgtcgcctgggccgctgggaagatggcgctgccgctttcggcaaggctattgaaatgggaggatgcggcagcgatacccgtaacgagcttgccatttgtctgatggaatccggcaaccttaaaggcgcccgtcgtgaactcgaatctgccctgtacgacgatcctgaaaatgtaaaaataatttccaacatgggcatacttgccctgaaaagcggcaataacgacgaagccgccgcttttttccgcaccgtgctggaacttgatccgcaagacccgattgcgttaaatttttttaacaagaatgcaagttag

SEQ ID NO: 49310 - protein, 128 aa, Unknown
  Obtained from environmental sample
  DOMAIN (83)...(116): Tetratricopeptide repeat
  misc_feature (1)..(128): Xaa is any amino acid
MQSIRDYIEKYPSAWNGWFVLGWALRRLGRWEDGAAAFGKAIEMGGCGSDTRNELAICLMESGNLKGARRELESALYDDPENVKIISNMGILALKSGNNDEAAAFFRTVLELDPQDPIALNFFNKNAS

SEQ ID NO: 49311 - DNA, 903 bp, Unknown
  Obtained from environmental sample
  misc_feature (1)..(903): n is a, c, g, or t
atggatataatagaagtttccccgttacgggggaaaatgaaaaaacttacaatagcaaaacaatttttagtccctaaagaacttaaggaaaacggcctttccaacgcgaaaataattttcagggacgacgccttaagaagcattatccgccattggactatggaatccggagtgcgcaaccttgaacgcgaaacggcgcgctgcataaggcgcatcgcgcgcggggccgtaaaaacggggtacggcaaggaaaaacctgtaacatcattcaaaaagataataacgcccgcggtaatagaaaaactgctcggcaaaaaattatacaaacgcgatcttgttttcagcgaagcccgtataggcgtaacatacggtcttgcgtggacggaaacaggcggcgcgattttgcccgtagagacaatccgttacaacggaaacggggaacttttaattaccggaaacttgggcgacgtaatgaaggagagcgcgcgcatcgctctgtcttacctgcacagcacgtgcgacaggtacaatttttccattaaagacttaagcaagtctaattatcacatacatgttccggagggcgcgatcccgaaggacggtccttccgcgggaatcaccctcgcttcgtcattgctgtccaccctatgcaaaattcccccgcgcccctgcgtcgccatgacgggggagcttacccttacgggccgggttctgcccataggcggattaaaagaaaaaatgcttgccgcccggcggaacagagcccggcatatcattatccctaaacagaacgagcgagatttggacgatattcctgactatgtgaaaaaagatatcagctttcaccctgttgagcgttttgaagaagtgctgacattggcgctgcccgaccgcgggcgttaa

SEQ ID NO: 49312 - protein, 300 aa, Unknown
  Obtained from environmental sample
  DOMAIN (93)...(297): Lon protease (S16) C-terminal proteolytic domain
  misc_feature (1)..(300): Xaa is any amino acid
MDIIEVSPLRGKMKKLTIAKQFLVPKELKENGLSNAKIIFRDDALRSIIRHWTMESGVRNLERETARCIRRIARGAVKTGYGKEKPVTSFKKIITPAVIEKLLGKKLYKRDLVFSEARIGVTYGLAWTETGGAILPVETIRYNGNGELLITGNLGDVMKESARIALSYLHSTCDRYNFSIKDLSKSNYHIHVPEGAIPKDGPSAGITLASSLLSTLCKIPPRPCVAMTGELTLTGRVLPIGGLKEKMLAARRNRARHIIIPKQNERDLDDIPDYVKKDISFHPVERFEEVLTLALPDRGR

SEQ ID NO: 49313 - DNA, 906 bp, Unknown
  Obtained from environmental sample
  misc_feature (1)..(906): n is a, c, g, or t
atgtccttttatcggtcctacggaacgggaaaaacgttacttgctaaaattcttgccaagaaacttaaagtgcctttcgccattgtagacgctaccaccctaacagaagcgggctatgtcggcgaagatgtcgagaatattctcttaaaattgattcaaagcgccggcggcaatatcgccgcggcggaaaggggcattgtctatatcgatgaaatcgacaagatagcgcgcaaaggcgaaaatgtttccataacgcgcgatgtctcgggcgagggcgtccagcaggctctgttaaaaataatcgagggaacaatcgcttccgtgcctcctcaggggggaagaaagcatcccaatcaggaacttatcaggatcgataccacaaacattctgtttatctgcggcggcgcttttgtgggtcttgaaaaattaatcgcgcggcgcgttgtaaaccagcctttggggttcggatcgggaatgtcaggctcagaaaaaagcctgaaagaactttacgactccattcaccccgacgaccttattcacttcggcatgatcccggagtttataggaaggcttcccattacggtaggtcttgaggaattaaaacgggaagaccttaaacgaattataacggaaccccgcaacgccatcgtaaggcagtatcaggcttccatggcttatgacaatgtaaaactcgagtttacagagaaggcaatcgactctatcgcggatttggcaatcaagcagaagacgggtgccagagggcttcgcgccattgtcgagaaacttatgacggacatcatgtttgacatcccctcgatgaagggcgacaagcatgttatcgttacccatgatacggttgaaaagtccgagcctcctcaaataatttatctgcaaaagagcgcgtaa

SEQ ID NO: 49314 - protein, 301 aa, Unknown
  Obtained from environmental sample
  DOMAIN (8)...(218): ATPase family associated with various cellular activities (AAA)
  misc_feature (1)..(301): Xaa is any amino acid
MSFYRSYGTGKTLLAKILAKKLKVPFAIVDATTLTEAGYVGEDVENILLKLIQSAGGNIAAAERGIVYIDEIDKIARKGENVSITRDVSGEGVQQALLKIIEGTIASVPPQGGRKHPNQELIRIDTTNILFICGGAFVGLEKLIARRVVNQPLGFGSGMSGSEKSLKELYDSIHPDDLIHFGMIPEFIGRLPITVGLEELKREDLKRIITEPRNAIVRQYQASMAYDNVKLEFTEKAIDSIADLAIKQKTGARGLRAIVEKLMTDIMFDIPSMKGDKHVIVTHDTVEKSEPPQIIYLQKSA

SEQ ID NO: 49315 - DNA, 1047 bp, Unknown
  Obtained from environmental sample
  misc_feature (1)..(1047): n is a, c, g, or t
atgccaaaacctctaccgtataaagcaggttcactcatttatttccagggggatcccgcggataaggtgttccttttacaagtcggaaaggtaaatctggttttgcangacattgaaaccggacaggatgtgcatgatctggtgtcgcagggcgaattcttcggggtgaaatccgccatgggccgttaccccagggaagagaacgccatggcgattatggacgcaaccgtaatggcctttacggttcccgagtttgaagctctggctatggccaataccagaataataatgaagatgctcaaggttttttccaatcaactacgaaaaatccataagcaggtttcaagtttgatggcgacagaagagcaaaacccggaggcgggcctgtttagcgtcggggaatactacttaaaagccaaaagctacggtcaggcaaggtatattttcagccgttatctgactttttacccctctggaaaatatgcgatgcaggccgcaagcaatttacaacaggctgaaatgtcgcttgccaagtccggcgccgttggagccctgggagcagctggttccgtaggaacacccaggcccatgggcgttccttcagcccctgcaacgccgcctgcttctgtagcacctgccagccctgcgtccggcccgaacctaaacgattctgcaaagtcttattacgatgcggtcagccttgtttcccagcaaaaataccagcaggcgtatctgtcgtttaagaagatcgcggacgcaaatgaggatcctgagtatgtcgccaaaagtacctttgagattgggcactgcctcttcttgctaaataaatttgacgattgcatacgctactacacattgatgataaccaagtatcccaagcatcctgatttggcggacgcccttttctacatggggcagtcatacgagaaaaataaccggaaggacatggcggggactttctacaaaaaaatccttaccatgccgggggacgaagaagacgggactcatgtaaaagccaggcgggccctgaaagcgctggaggcgtaa

SEQ ID NO: 49316 - protein, 348 aa, Unknown
  Obtained from environmental sample
  DOMAIN (4)...(94): Cyclic nucleotide-binding domain
  misc_feature (1)..(348): Xaa is any amino acid
MPKPLPYKAGSLIYFQGDPADKVFLLQVGKVNLVLXDIETGQDVHDLVSQGEFFGVKSAMGRYPREENAMAIMDATVMAFTVPEFEALAMANTRIIMKMLKVFSNQLRKIHKQVSSLMATEEQNPEAGLFSVGEYYLKAKSYGQARYIFSRYLTFYPSGKYAMQAASNLQQAEMSLAKSGAVGALGAAGSVGTPRPMGVPSAPATPPASVAPASPASGPNLNDSAKSYYDAVSLVSQQKYQQAYLSFKKIADANEDPEYVAKSTFEIGHCLFLLNKFDDCIRYYTLMITKYPKHPDLADALFYMGQSYEKNNRKDMAGTFYKKILTMPGDEEDGTHVKARRALKALEA

SEQ ID NO: 49317 - DNA, 420 bp, Unknown
  Obtained from environmental sample
  misc_feature (1)..(420): n is a, c, g, or t
atggtaacaattaacgccgcgaaagctttctggatgcaggatcaaatcggttcccttgaggacggaaagctggctgacataatggtattaaaagccgggaaagatgatccttatgagaatttggcctctgcttccatgcaggacatagaattgctcactttggcgggaaagccaatttacggcgaaatgcgttttcttgacatttttcccgattcggaaatgccggaaggatacacagaagtcaaagtgggcaaaagacccatgtttgtaattggagatcctgcggctttgtacagggaaattcggcgcagaacgggttttaagaaggtactggatttccttccctttgagccgtccgatcagggcaaggcaaaggcgtctaaaaaaacatcggcaaaaccctggaaggaatccacttaa

SEQ ID NO: 49318 - protein, 139 aa, Unknown
  Obtained from environmental sample
  misc_feature (1)..(139): Xaa is any amino acid
MVTINAAKAFWMQDQIGSLEDGKLADIMVLKAGKDDPYENLASASMQDIELLTLAGKPIYGEMRFLDIFPDSEMPEGYTEVKVGKRPMFVIGDPAALYREIRRRTGFKKVLDFLPFEPSDQGKAKASKKTSAKPWKEST

SEQ ID NO: 49319 - DNA, 906 bp, Unknown
  Obtained from environmental sample
  misc_feature (1)..(906): n is a, c, g, or t
atgtgtgagttcaagtctcaccgccggcagaacataatggaaaagtacattaactgcatcgcacataaaacaagcgaaggcaatcttcttattggggaagattataccgccctgtttgactgcggcatggctcattgcgcggacggcaccatacaaaatattaaaaacgccctgaaagacaggccgttagactatctctttattacgcatacccattatgaccacatcggctcgctgccttttttcagaaaagaatggccgtcactgcgccttgttacgtcgcaggcgggggcggcggttcttttaaaagacactccgcgcagggttatccgcgaactttcaattgtggcgggaaaagagtttaattgcgaatttgacgcctcttacagcgacgacgactttcacgcggatattatcgtcaaagagggtgatattatccctcttggcgggatatcggttcaagtattagaaacacccgggcatacaagggatacgctcagttttttcataccggagctcgagatgctgatagtaagcgaaacaaccggagttctactgcccgacaataccatatatcccccttatctgaccagctttatcgacacggtcaactccatagaaaaatgccgcaagatgccttttaaatttttgtccctgccgcataaagggctatcggaagaaatagacgcgaacgctttctttgacaaaacgctggcggcctgtacagaatgcagagattttattttgggaatgaacaataaaaagctcgatcaggacgcgatgcttgatttgttctttaaaaaatacggaaccgaagaactttttacttaccagcccaaggacgcttttttcgcaaacgcccgcgccacaatcgcctgcaccctgcgcgaattcgctccgcaatga

SEQ ID NO: 49320 - protein, 301 aa, Unknown
  Obtained from environmental sample
  DOMAIN (26)...(221): Metallo-beta-lactamase superfamily
  misc_feature (1)..(301): Xaa is any amino acid
MCEFKSHRRQNIMEKYINCIAHKTSEGNLLIGEDYTALFDCGMAHCADGTIQNIKNALKDRPLDYLFITHTHYDHIGSLPFFRKEWPSLRLVTSQAGAAVLLKDTPRRVIRELSIVAGKEFNCEFDASYSDDDFHADIIVKEGDIIPLGGISVQVLETPGHTRDTLSFFIPELEMLIVSETTGVLLPDNTIYPPYLTSFIDTVNSIEKCRKMPFKFLSLPHKGLSEEIDANAFFDKTLAACTECRDFILGMNNKKLDQDAMLDLFFKKYGTEELFTYQPKDAFFANARATIACTLREFAPQ

SEQ ID NO: 49321 - DNA, 468 bp, Unknown
  Obtained from environmental sample
  misc_feature (1)..(468): n is a, c, g, or t
atggtaggcgaacccaaggacggcgatctcgcgatgaagatacgtcattcctgcgaggagtaccttgaccttaaaatagaccacctcgggataatttaccgcgatgccatgcaggacacggcccttgcctcaaaaatgcccataacaatttataaacccaaatccatactttcccaggcaatataccgcatcgccgataaaattctggaaagcggcgaggacgcttttgcgccggacaaggatcaaatcgaggtgagtttccaggaagcgggactggaagcggaagtcgactttgaaagcaagatggcgtacattgaggaactgcttcattcgggcaccctcaccacaagcgaccttatagagacggttaaaacccagcaaatcgaaatttccaaactcagaaaagaatgtaactttatcaagaagaaactcacaaaagccgtagagatgggctacattccaaagtaa

SEQ ID NO: 49322 - protein, 155 aa, Unknown
  Obtained from environmental sample
  misc_feature (1)..(155): Xaa is any amino acid
MVGEPKDGDLAMKIRHSCEEYLDLKIDHLGIIYRDAMQDTALASKMPITIYKPKSILSQAIYRIADKILESGEDAFAPDKDQIEVSFQEAGLEAEVDFESKMAYIEELLHSGTLTTSDLIETVKTQQIEISKLRKECNFIKKKLTKAVEMGYIPK

SEQ ID NO: 49323 - DNA, 1302 bp, Unknown
  Obtained from environmental sample
  misc_feature (1)..(1302): n is a, c, g, or t
gtggatcagatctcatttaactttgacgaaatgaaaggcatgatgagcaagcaggatcagagcgcgtccgaagcggaaagcgcggtaaaagagatctacgccagcattgacaatttgaacaaaatgatagaagaccagtctgaaaatataaacacctcgtcttccgccattgaggaaatgacggccaacatcaattcggttaccaaaaccctgatcgcgaactccaagaatgtcaccgaattggcggaggctgctgaaaacggcaaaacaggccttcagacggtagcgcagaaaatactggagatttcccatgattcagaggggctccttgaaataaacgccgtgatgaacaacattgcaagccagacaaacctgctttcaatgaacgccgcgattgaagcggctcacgccggcgaagcggggagagggttcgcggtcgttgccgacgaaattcgcaagctcgccgaatcgtccgggaaacagtcgaagacaaccgcgacaatgctgaagaaggtaaaagcgtcaatagacagcattaccgtatcttcaaaagaagttctttcccggtttgaaattattgataccggagtgaaaacggtttcccagcacgagcagaacatccgaagcgcgatggaagaacaggaagtcgggggaaggcagatactggaatcagttggccgcctgaaagagataaacgggtcggtcaagaagggcgcggcggacatgctggaatcaggcgatcgcctgaaccagcagacggaagactttataggcatcagcaaagaaaccatggacggcatgaacgaaatagtgaacggggccatggcggagataaagaccgccgtaacccatgtagaggaaatgagcagcgaaaacagcaggaattttgagggcttaaaattagagacgcagaaattcaaggttgaatcgggcagtgaacagaagaaagtcatcatagttgacgacgaggatacggttcttaccctgacaaaagccatactggaacaagactacgacgtaaccacatgcgactccggccagaaggctttgaacctgttcttccagggctatactcccaatctggtattattggatttaaccatgcctgaaatgggcggctgggacacctatatcaggatacgcgacataaccaaactgcacaaatgtccgatagcgatttactcgacctcggaatccccggaggacaaagccaaagccaaggaaatgggcgcggtcgactttatacacaagcccgccaacaaggccgatctgctgacgaaggtagcaaggctggttaagtaa

SEQ ID NO: 49324 - protein, 433 aa, Unknown
  Obtained from environmental sample
  DOMAIN (30)...(309): Methyl-accepting chemotaxis protein (MCP) signaling domain
  misc_feature (1)..(433): Xaa is any amino acid
MDQISFNFDEMKGMMSKQDQSASEAESAVKEIYASIDNLNKMIEDQSENINTSSSAIEEMTANINSVTKTLIANSKNVTELAEAAENGKTGLQTVAQKILEISHDSEGLLEINAVMNNIASQTNLLSMNAAIEAAHAGEAGRGFAVVADEIRKLAESSGKQSKTTATMLKKVKASIDSITVSSKEVLSRFEIIDTGVKTVSQHEQNIRSAMEEQEVGGRQILESVGRLKEINGSVKKGAADMLESGDRLNQQTEDFIGISKETMDGMNEIVNGAMAEIKTAVTHVEEMSSENSRNFEGLKLETQKFKVESGSEQKKVIIVDDEDTVLTLTKAILEQDYDVTTCDSGQKALNLFFQGYTPNLVLLDLTMPEMGGWDTYIRIRDITKLHKCPIAIYSTSESPEDKAKAKEMGAVDFIHKPANKADLLTKVARLVK

SEQ ID NO: 49325 - DNA, 1014 bp, Unknown
  Obtained from environmental sample
  misc_feature (1)..(1014): n is a, c, g, or t
gtgaaggagtataaaatgaaaatcggttttaagttaactgtgattatggtcgcgcttggactgttcgcgattgcctcagtcagtattaccctgcttatcaaagcgcgggtcagtatctcgggcctttccggaaaatacgtcgtctccatggcaaatgactccgccgctgatgttacaaattttattgaatcatacatggacagggtggaaaataccgcccatgttatggaacagtaccgttatatgataaccgccaatcgccggactttctttaattttatactcgcgggtcttgcgcgtgaaacccctggaattgtcgcggtatggtgcgtttgggagccggacgctttggaaggggacgacagtcagtacattggaacaaaaggaacaagttccggcgggcgtttttcaccgtattatttctgggataagggaaagatcgagcaaagcatcctggaagattttgaggatccggcgtacataataaccaaaaaaacaggtttgccgatagttgtagacccttacgagtacgaagtgggcggcaagaaagtattaataacctcagttaccgcccctatacgcgcggacggcagggttgtgggggttgtaggttttgacattccccttgcggagattcagagaatttcgcaaacccaaaaaccttttcccgattccgtaacagccgtattcagcaacaacggcactatcaccgcgcactttgacgaaagccgtatcggaaaaaatttaaaagaaacagaagctgacatggcgggcaggcatatgaatgattttcttaatgccgttacaacaggcaaagcatattcattcagcaattacatcaaagcgttagacgcggatatgaatatgtttatcgttcccattccggtcggggactcgacaatcccatggagctacgcgatagccgttatgcacgatacaataatggcgccggtcaacgaaatgataaacattaccatagtgataagcgctgcggtatggcctctcggccgataa

SEQ ID NO: 49326 - protein, 337 aa, Unknown
  Obtained from environmental sample
  SIGNAL (1)...(25)
  DOMAIN (171)...(252): Cache domain
  misc_feature (1)..(337): Xaa is any amino acid
MKEYKMKIGFKLTVIMVALGLFAIASVSITLLIKARVSISGLSGKYVVSMANDSAADVTNFIESYMDRVENTAHVMEQYRYMITANRRTFFNFILAGLARETPGIVAVWCVWEPDALEGDDSQYIGTKGTSSGGRFSPYYFWDKGKIEQSILEDFEDPAYIITKKTGLPIVVDPYEYEVGGKKVLITSVTAPIRADGRVVGVVGFDIPLAEIQRISQTQKPFPDSVTAVFSNNGTITAHFDESRIGKNLKETEADMAGRHMNDFLNAVTTGKAYSFSNYIKALDADMNMFIVPIPVGDSTIPWSYAIAVMHDTIMAPVNEMINITIVISAAVWPLGR

SEQ ID NO: 49327 - DNA, 804 bp, Unknown
  Obtained from environmental sample
  misc_feature (1)..(804): n is a, c, g, or t
atggaacaagattctaacagaagtatgaaagaagccgccggtattgccgcggtagacgcgctggtaaaaagcggtatgaaacttggtcttggcacggggtctaccgccattcacgcggtccgcagggtcggagagcttctggctaacgggacgttaagggacataagcgcatttgccaccagtttccagacggagatcgagtgtgaaaaacttgggatacctttttactcattgaattcaaaggagcttgcaagcggtcttgaccttaccattgacggagccgacgaagttgatccgaaaaaccgcctgattaagggcgggggaggggcggtattaatcgaaaagttagccgcatattcctccgcgttattcgccgttgttgtggatgagtcaaaactcgttcaaagcatcggaactgtttttcctgttcctgtcgaggttgttccttccgccagagttcaggccgcgagggtctttgaaaaactcggcgcatctgttatacttcgggaagcgcttcggaaagtggggcctgtcatcaccgaacacgggaatttaattcttgacatccgtttcagctccccggttgatcctgtatatatggaagccgagattaacaaaactgccggcgttgtggaaaacnggtttttttacgggaaatatccccgtagtttacgtcgcccgttcaaacggaacaatagaaacaagaggtgggaaatgaaagaaaatataaaagaaatcgccgcccgcgttaaagtactgcgggaaattgaggaaattccgatgaagctctcgtgccgattctga

SEQ ID NO: 49328 - protein, 267 aa, Unknown
  Obtained from environmental sample
  DOMAIN (55)...(225): Ribose 5-phosphate isomerase A (phosphoriboisomerase A)
  misc_feature (1)..(267): Xaa is any amino acid
MEQDSNRSMKEAAGIAAVDALVKSGMKLGLGTGSTAIHAVRRVGELLANGTLRDISAFATSFQTEIECEKLGIPFYSLNSKELASGLDLTIDGADEVDPKNRLIKGGGGAVLIEKLAAYSSALFAVVVDESKLVQSIGTVFPVPVEVVPSARVQAARVFEKLGASVILREALRKVGPVITEHGNLILDIRFSSPVDPVYMEAEINKTAGVVENXFFYGKYPRSLRRPFKRNNRNKRWEMKENIKEIAARVKVLREIEEIPMKLSCRF

SEQ ID NO: 49329 - DNA, 918 bp, Unknown
  Obtained from environmental sample
  misc_feature (1)..(918): n is a, c, g, or t
atggggcattacggtttttactcgcggatcctttgcgataaattcggttcttttatgacttattcaagcgcgttatctgaaaatgttgttcccggcgccgcgtggcagcttgacgttcaggaattaaacgaattgtaccgcttccgcaatatcagcaaaaagacaaaagtttacggcattacgggcaatccgctgaaaacaagcataagcacatggatttttaatacggtcttcggcattgaaaatatcgacgccgtatatgtgccgtttccggcggactcaattaatgattttctggaacttgccgaagaaatggatgttcaatggctttcggttacaataccttacaaggaagctgtcctgcccatgcttgtaaggcgttccgcggctgtacattcaataggagcgtgcaatgttatgttccgttccgccgacggctggtttggggacaatacggattgcacaagtttttcagcgtcaattctggcttccctcggcaaaaataatcttaaatggaaaaaagttaccatcatcggggcgggcggagtcgcgcgcgcggtcgccgcggaagttttccgtttgggaggcaaagcccttattttgaatcgcaccattcacaaagcaaaagatcttgcgtcactgtacgattttcgctgggggggtctggacgaacacggaattgaattagtgtataaatattcggacattatcattcaggcaacaacagtcggaatggcgggatacgatgcttccgatcctttggaactctacagttttaccggaaaagaaattgtgatggatttggtatattttcccgcgcagactccgtttttaacgcgcgccgtcgccgccgggtgcaaaatcatcaacggttacgatatggtaacgtatcaggcttgccatcaatataatcaataa

SEQ ID NO: 49330 - protein, 305 aa, Unknown
  Obtained from environmental sample
  DOMAIN (161)...(278): Shikimate / quinate 5-dehydrogenase
  misc_feature (1)..(305): Xaa is any amino acid
MGHYGFYSRILCDKFGSFMTYSSALSENVVPGAAWQLDVQELNELYRFRNISKKTKVYGITGNPLKTSISTWIFNTVFGIENIDAVYVPFPADSINDFLELAEEMDVQWLSVTIPYKEAVLPMLVRRSAAVHSIGACNVMFRSADGWFGDNTDCTSFSASILASLGKNNLKWKKVTIIGAGGVARAVAAEVFRLGGKALILNRTIHKAKDLASLYDFRWGGLDEHGIELVYKYSDIIIQATTVGMAGYDASDPLELYSFTGKEIVMDLVYFPAQTPFLTRAVAAGCKIINGYDMVTYQACHQYNQ

SEQ ID NO: 49331 - DNA, 861 bp, Unknown
  Obtained from environmental sample
  misc_feature (1)..(861): n is a, c, g, or t
atgaaactcaattataattcggcggcggaattgcgggcctttcttgacgaaaacggcctgggcatgagaaaaaaattcggccaaaactttttaattaatccttctctgcgccaggctcttgtccgtgccctggaagcggagaagggagaatcagtttgggaagtcggccccggtctgggggcaatgacctccctgctgcttgaagaaggtttttctgtccgcgcctttgaaatagattcaggcttcgcgcgattgttaagggaactttttgccggtaacacgggctttaccctgattgaaggggacgtattgaaaacctggccggatcagcctgccgcgccgtaccttttggggaatcttccntacaatatcgccgcgtctttattggccggttttattgagcaaagacgttttttcaaacggatcgttgtcaccgttcagcgcgaagttgccctgcgtatggcagccgttcccaactgcgccgattattcttctttttcggttgtctgcgcatcggcgtaccgggtaaaacctttgatgatcattaaaagcgcttctttttatccccggcccaatgtagattcacaagccgtactattggaattacgggaggacgcggccgcccgcggtttgcctgcctgtttttatccgctggtacgccgtcttttttcatcacgaagaaaaacgataaaaaacaatctgaccggtttcttcagccccgggcagggaactcaggcggcaatggcgcttgaagcgctggaaaaaagcgcccttgacggcaataagcgggcggaacacctgacccttgaggacttcgcggcacttgcaaaaacaatagaagatatgggagtattacattga

SEQ ID NO: 49332 - protein, 286 aa, Unknown
  Obtained from environmental sample
  DOMAIN (19)...(281): Ribosomal RNA adenine dimethylase
  misc_feature (1)..(286): Xaa is any amino acid
MKLNYNSAAELRAFLDENGLGMRKKFGQNFLINPSLRQALVRALEAEKGESVWEVGPGLGAMTSLLLEEGFSVRAFEIDSGFARLLRELFAGNTGFTLIEGDVLKTWPDQPAAPYLLGNLPYNIAASLLAGFIEQRRFFKRIVVTVQREVALRMAAVPNCADYSSFSVVCASAYRVKPLMIIKSASFYPRPNVDSQAVLLELREDAAARGLPACFYPLVRRLFSSRRKTIKNNLTGFFSPGQGTQAAMALEALEKSALDGNKRAEHLTLEDFAALAKTIEDMGVLH

SEQ ID NO: 49333 - DNA, 843 bp, Unknown
  Obtained from environmental sample
  misc_feature (1)..(843): n is a, c, g, or t
gtgggccggccttgcccttgccctgcttttgggcattcgcgacaatctggataccggcttcgccgccctgtaccgcgacgcgggctgctcctatatactcgccctttccggcatgcacctcgcgattcttgtttcgcttatctccttcctcctgaaaaaaccgctgggactgcggttagccgcaattgccggcgcggttataatcatcgcgtattgttttattgtcggccctttgccaagtctgaaccgcgccgcccttatgtacctgctgggggtcgtagccgtgcttggaatgctcaagcgggatatgctttcgctgctctgcatggcgtttttgctccaattgatccttgccccggcatcaggtttctcgctttcgtttatcctttcgtaccttgccctcgccgggattttgtaatcggcaaggcgcttaacgatattttcaaaggcaagatacctgcggcgctccttttgtcccttgccgcctcagtgggggctttcattgccaccgccggagtaacggcatggttnttcggcattctgcgtccggtgggcataatagccagtctggtactgacccccctgaccacggtgtttatgatcggttcgatggtatggctcggcgtgaattgcgcgctgccgccgctgtcgcctttattgagttaccccctttcactgctgtaccggcttatggaaagaacggcttttttcgcggcgcgaacgcccggcatcaaggggcagccctggctggttataacattgtcactgttgagcatggcggcaatactctggtttgaataccgtcgccgcctgacggcaaaccgcatggaaccttttgcctga

SEQ ID NO: 49334 - protein, 280 aa, Unknown
  Obtained from environmental sample
  misc_feature (1)..(280): Xaa is any amino acid
MGRPCPCPAFGHSRQSGYRLRRPVPRRGLLLYTRPFRHAPRDSCFAYLLPPEKTAGTAVSRNCRRGYNHRVLFYCRPFAKSEPRRPYVPAGGRSRAWNAQAGYAFAALHGVFAPIDPCPGIRFLAFVYPFVPCPRRDFVIGKALNDIFKGKIPAALLLSLAASVGAFIATAGVTAWXFGILRPVGIIASLVLTPLTTVFMIGSMVWLGVNCALPPLSPLLSYPLSLLYRLMERTAFFAARTPGIKGQPWLVITLSLLSMAAILWFEYRRRLTANRMEPFA

SEQ ID NO: 49335 - DNA, 516 bp, Unknown
  Obtained from environmental sample
  misc_feature (1)..(516): n is a, c, g, or t
ttgcacataacaaaagccgcgccttcccttgaacgtttccgcacaggtttaaggctcggccttacagacaggtttttaaactcatccggggagggcaagtgggccggccttgcccttgccctgcttttgggcattcgcgacaatctggataccggcttcgccgccctgtaccgcgacgcgggctgctcctatatactcgccctttccggcatgcacctcgcgattcttgtttcgcttatctccttcctcctgaaaaaaccgctgggactgcggttagccgcaattgccggcgcggttataatcatcgcgtattgttttattgtcggccctttgccaagtctgaaccgcgccgcccttatgtacctgctgggggtcgtagccgtgcttggaatgctcaagcgggatatgctttcgctgctctgcatggcgtttttgctccaattgatccttgccccggcatcaggtttctcgctttcgtttatcctttcgtaccttgccctcgccgggattttgtaa

SEQ ID NO: 49336 - protein, 171 aa, Unknown
  Obtained from environmental sample
  misc_feature (1)..(171): Xaa is any amino acid
MHITKAAPSLERFRTGLRLGLTDRFLNSSGEGKWAGLALALLLGIRDNLDTGFAALYRDAGCSYILALSGMHLAILVSLISFLLKKPLGLRLAAIAGAVIIIAYCFIVGPLPSLNRAALMYLLGVVAVLGMLKRDMLSLLCMAFLLQLILAPASGFSLSFILSYLALAGIL

SEQ ID NO: 49337 - DNA, 348 bp, Unknown
  Obtained from environmental sample
  misc_feature (1)..(348): n is a, c, g, or t
atgataaaaggcgaagtatggtgggctaatctccccgatgatcctcatggttctgagccgggaaaacgccgtcctgttttaataattcaaaatgatttattcaatcgcagcgatataagaaccacaatctgcgctgttattacatcgaatatgaaactatctcaaatgcccggtaatattacattggaaaaaggcgattccggccttgatagaacatctgtagttaatttttctcaaatcgctacaatcaacagaacacgattaatagaacaaatttccatgttacctaagaaatatattgaaaaaattaatgaaagtataagatttatttttgataccgaaatataa

SEQ ID NO: 49338 - protein, 115 aa, Unknown
  Obtained from environmental sample
  DOMAIN (2)...(112): PemK-like protein
  misc_feature (1)..(115): Xaa is any amino acid
MIKGEVWWANLPDDPHGSEPGKRRPVLIIQNDLFNRSDIRTTICAVITSNMKLSQMPGNITLEKGDSGLDRTSVVNFSQIATINRTRLIEQISMLPKKYIEKINESIRFIFDTEI

SEQ ID NO: 49339 - DNA, 621 bp, Unknown
  Obtained from environmental sample
  misc_feature (1)..(621): n is a, c, g, or t
ttggcgggcaaattgccgaacttgcaaaacggctcgcactttcactatatgccctaccaaaattcagaagaagctctttccattttgaataggctttcaaaaaatggcgaactgcaagttctaacccctatgcacaagggaactctgggaactcaaaacctgaatgcctttatgcaaaaaatactcaatttcaacgcttatggttttgattacagaaacattcattggcaaatcggcgaccctgtgatgcaactgaaaaacaactacgaaaaagatattttcaacggcgatttaggacgcataacccgcgttatgccaaccgcaaaaaaaatagaagcggattttgaaggcaaaaccataaccatagaaggcgatgaatttgagcatttaacccttgcttatgcttgcacagttcataaaagccaaggcagcgaatataaatccgtagcggttgtgctggactatacccactccattatgctgcaaagaaatttgctatacacggctgttacgagggcaaaggaaaatatttggattttggcgagccagggttctttggaaactgcggttcgcaataatagggagcggcacaggtggactgcgctctcggagtttatataa

SEQ ID NO: 49340 - protein, 206 aa, Unknown
  Obtained from environmental sample
  misc_feature (1)..(206): Xaa is any amino acid
MAGKLPNLQNGSHFHYMPYQNSEEALSILNRLSKNGELQVLTPMHKGTLGTQNLNAFMQKILNFNAYGFDYRNIHWQIGDPVMQLKNNYEKDIFNGDLGRITRVMPTAKKIEADFEGKTITIEGDEFEHLTLAYACTVHKSQGSEYKSVAVVLDYTHSIMLQRNLLYTAVTRAKENIWILASQGSLETAVRNNRERHRWTALSEFI

SEQ ID NO: 49341 - DNA, 1098 bp, Unknown
  Obtained from environmental sample
  misc_feature (1)..(1098): n is a, c, g, or t
atggacacaaaacctaaaaacccgtttttaatatctggctatcatagccccgcctatttttgcgacagagccgcagaaacaaaacaaatatattccgcattgcaaaacggcagaaatatatctttaataagcccacgccgcatagggaaaacagggcttatacacaatgtcttttattgcctaagggagaaagataaaaattcaaattgcttttacatagatgtttttgcaacccaaaatttgcttgaatttacaaaccttttaggcaaagctgttattggtcaattagaaagcaaaccgcaaacagcaataaagaaaatagccagtttctttaaaagtttcagacctctgttttcgtttgactctcagacaggagtgcctacagtttctttggatattaaatatgagcaagcacagaatagtttacaggaaattttttcatatcttaaaaagagcggcaaaaccatttacattgccatagatgaatttcaacaaattatggattatccagaaaaaggagtagaagctctgcttcgttcttatatgcaatttttgcctaatgttcatttcattttttctggaagcaaaaagcatctgatggatgctatgttttcttcggtgaacagacctttttaccaaagtacacaaaaaataattttaaaggaaatagaaattgaatcttacagaaaatttgcaatggctctgttttcaaaatacagaaaaaatttaccagcaaaagtatttgactttgtttatgaaagtttgcaagggcatacatggtacgttcaattggttctcaatttattgtttgctatggacaaaacaaattactcggagcaaaacgcaaaagacgcgataaatggaattttgcaagaagaaaacgcaacatataaaacctattgcgagatgataacaagaggacagttatacttgctcagagcaatagcgagagaacatagcgtaaaatttccttacgaatattcttttatgcaaaaacacggtttaaaagctgccagcagcgttaaattagcactcaagtctttaatggacaaaaccttaatttttaaaagacgaaaatggttattactatggttatga

SEQ ID NO: 49342 - protein, 365 aa, Unknown
  Obtained from environmental sample
  DOMAIN (19)...(264): Archaeal ATPase
  misc_feature (1)..(365): Xaa is any amino acid
MDTKPKNPFLISGYHSPAYFCDRAAETKQIYSALQNGRNISLISPRRIGKTGLIHNVFYCLREKDKNSNCFYIDVFATQNLLEFTNLLGKAVIGQLESKPQTAIKKIASFFKSFRPLFSFDSQTGVPTVSLDIKYEQAQNSLQEIFSYLKKSGKTIYIAIDEFQQIMDYPEKGVEALLRSYMQFLPNVHFIFSGSKKHLMDAMFSSVNRPFYQSTQKIILKEIEIESYRKFAMALFSKYRKNLPAKVFDFVYESLQGHTWYVQLVLNLLFAMDKTNYSEQNAKDAINGILQEENATYKTYCEMITRGQLYLLRAIAREHSVKFPYEYSFMQKHGLKAASSVKLALKSLMDKTLIFKRRKWLLLWL

SEQ ID NO: 49343 - DNA, 762 bp, Unknown
  Obtained from environmental sample
  misc_feature (1)..(762): n is a, c, g, or t
ttgtcgcaaacgttgatagtgcaattatccaatagacatactggcataggcggcgatggggtagtgctgattttgcgctccaacattgccgatgccaaaatgagaatgttcaatttagacggcagcgaaggcaatatgtgcggaaacgccattaggtgcgtggcaaaatatctctacgataataaaattgtgcaaaaaaaagaaatgaaaatagaaacaaaaagcggtataaaggaactttacctatttataaaaaatgaacaagtatattctgtaaaagtaaatatgggtcgggcagaacttgcccctgaaaaaataccagtaaaactagaaggcgaaagcataatatcaaaaccgataaccgttggtggcaaagaatattcaataacttgcgtttctatgggaaatccccacgctgtgaactttgttgaaaacgtggcaagtcttgatttgccaaaaataggccctatgtttgaaaacgacgctcttttccccgaaaaagtaaacacagaatttgttgagcttgcaggtaggaacaacttgaaaatgcgagtatgggagcgcggcagcggcgaaacgcaagcgtgcggcacaggagcctgcgccgttgctgttgcggcggttttgaatgggcattgcgataaagatgcagatataaaagttcagctccctggcggagagttaattattagatatacagatgaagctatttttatgactggcaactgcgagaaggtttttgagggcgtggttgaggtgtaa

SEQ ID NO: 49344 - protein, 253 aa, Unknown
  Obtained from environmental sample
  DOMAIN (1)...(102): Diaminopimelate epimerase
  misc_feature (1)..(253): Xaa is any amino acid
MSQTLIVQLSNRHTGIGGDGVVLILRSNIADAKMRMFNLDGSEGNMCGNAIRCVAKYLYDNKIVQKKEMKIETKSGIKELYLFIKNEQVYSVKVNMGRAELAPEKIPVKLEGESIISKPITVGGKEYSITCVSMGNPHAVNFVENVASLDLPKIGPMFENDALFPEKVNTEFVELAGRNNLKMRVWERGSGETQACGTGACAVAVAAVLNGHCDKDADIKVQLPGGELIIRYTDEAIFMTGNCEKVFEGVVEV

SEQ ID NO: 49345 - DNA, 546 bp, Unknown
  Obtained from environmental sample
  misc_feature (1)..(546): n is a, c, g, or t
ttgggattaaaagaaaattttcttgaagccgatctcgaaaaagcaatactaaaagaactcgaagcattcattttggaatttggtcatggctttacatttgttgaacggcaaaaacgcatgacaatggatggcgatgattttacacttgacttgcttttttatcatagagacttaaaacgtcttgtagccattgaattaaaaatggggaaatttattccccaatatgaaggacagatgcgcttctatttgaaatggctcaataagtacgaacgtagggaggacgaaaatgagccaataggattaattctttgcacaaaagcaagccgaaatcagatagaattgatggaattggataaatccggcattgcagtcgctgaatactggactaaattacccctaaaagatgaatttgaaagaaaaattaatgagatattaatcgaagcgcgggagcgtcttgaacgcagaaaatcgcttccaaagggaaaaatccaaaaacaacttgattacttctacgattcaaaggatgccgatattgaggataagtag

SEQ ID NO: 49346 - protein, 181 aa, Unknown
  Obtained from environmental sample
  DOMAIN (1)...(144): Protein of unknown function (DUF1016)
  misc_feature (1)..(181): Xaa is any amino acid
MGLKENFLEADLEKAILKELEAFILEFGHGFTFVERQKRMTMDGDDFTLDLLFYHRDLKRLVAIELKMGKFIPQYEGQMRFYLKWLNKYERREDENEPIGLILCTKASRNQIELMELDKSGIAVAEYWTKLPLKDEFERKINEILIEARERLERRKSLPKGKIQKQLDYFYDSKDADIEDK

SEQ ID NO: 49347 - DNA, 678 bp, Unknown
  Obtained from environmental sample
  misc_feature (1)..(678): n is a, c, g, or t
atgaaaagcggtcccgacccggattttccctatttaaccgaacaagactactacagctttggaaatcccaaagaatggaccaatgacgtagtcgcggtaggcgggaatttgtcgcccggaatgctgctttccgcgtacgaacaggggattttcccctggtataaccccgaagacccaattttttggcagtcgcccgacccgcgctgcgtgattttccccgataaattacacatttccgactctatgcgcaaaattctgaaaaaagacgtatataaaattacgtttaacgaagattttacaggcgtaatgaacggctgcgcgaatacaaaacgcagaaatcagaacggaacgtggatttccggcgatattatcaaggcttatacggaaatgcaccgccttggatgggctcattccgcggaaacatggcaaaacggtgaacttgtaggcggctgttacggggttctgatgggcaaagcatttttcggtgaatctatgttctctttaaagccgaatgcgtcaaaagccgcctttttaagccttgcggtaacgctttttacacatggaatagcctttatcgactgccaggtgcccaccccgcacctgctcagtctgggcggagaggtaatgccgcgcaaggaatttctggcgctgttaaaaatgtctaaaatttcacgttaa

SEQ ID NO: 49348 - protein, 225 aa, Unknown
  Obtained from environmental sample
  DOMAIN (38)...(211): Leucyl/phenylalanyl-tRNA protein transferase
  misc_feature (1)..(225): Xaa is any amino acid
MKSGPDPDFPYLTEQDYYSFGNPKEWTNDVVAVGGNLSPGMLLSAYEQGIFPWYNPEDPIFWQSPDPRCVIFPDKLHISDSMRKILKKDVYKITFNEDFTGVMNGCANTKRRNQNGTWISGDIIKAYTEMHRLGWAHSAETWQNGELVGGCYGVLMGKAFFGESMFSLKPNASKAAFLSLAVTLFTHGIAFIDCQVPTPHLLSLGGEVMPRKEFLALLKMSKISR

SEQ ID NO: 49349 - DNA, 597 bp, Unknown
  Obtained from environmental sample
  misc_feature (1)..(597): n is a, c, g, or t
atgtttgccgtactcctcatgcgtcgtggagcctatacagcggagtttgccggatgtaagcgccggtttaagcatgttggaagcgtccagcgccccgcccgaaaccgcgccggctccgacaagggtgtgaatctcgtctataaaaagaatggccttttcttttttcatcatttcttccacgacgcgtttaactctttcctcaaaatcgccgcggtatttcgtgcccgccaaaagagcgcccatatcaagcgagaaaatactgaatcctttcagagtaggcggcacatcgcccgcgacgattctctgcgcgaggccttcggtaatcgccgtttttcccacgccggaatccccgacatggatggggttgtttttcagcctgcggcaaagcacctgaacggtcctgtccagttcttcctccctgccgatgacgggctcaagcttgttgttacgcgcaagttccgtaaggtctgccgcgtaacgttcaagcgctgtctttttgccctgctttgctctttgcccgtccgcctgctcgtcgtcggcggtatcggcggtttcttttccgccctcgtttccggaactgtgggacagcacctgtaa

SEQ ID NO: 49350 - protein, 198 aa, Unknown
  Obtained from environmental sample
  misc_feature (1)..(198): Xaa is any amino acid
MFAVLLMRRGAYTAEFAGCKRRFKHVGSVQRPARNRAGSDKGVNLVYKKNGLFFFHHFFHDAFNSFLKIAAVFRARQKSAHIKRENTESFQSRRHIARDDSLREAFGNRRFSHAGIPDMDGVVFQPAAKHLNGPVQFFLPADDGLKLVVTRKFRKVCRVTFKRCLFALLCSLPVRLLVVGGIGGFFSALVSGTVGQHL

SEQ ID NO: 49351 - DNA, 942 bp, Unknown
  Obtained from environmental sample
  misc_feature (1)..(942): n is a, c, g, or t
gtgctgttgtcagagcttaacaacgaaaacaaatatcccgcggacgaggccggcttcaaaacaggcgatcgcataatcgaggtaaacggcaggaaaatcaactacttccatgagatcaaggaaaacatcgccataaacccggaaaagctgttgcctgtgacggtggatcgtgaaggcgaaaaaacgacattgtttgtcaggccaaatcttgataaaagcacaggaatgggaataataggcgtctccttttgggccgataccgtaattgacgatatagtcccgggcagcgacgcggccattgccgggctattgccgggtgatcgcataacaggcgtaaacggaacgcccgtggtcaataccgttgaattctccagggcgctggaagccggttccgcaacagcggctatcagctatgagcgtaacggtgttgaaggaaaagctgaactagtgctttctgaatccggcggagacgacctgggcattatgtggcccagggtaacatacaggactccgccgctttcgccgcctgctgccgtggtaaaaggagtctctgaaagctggaagacgcttgttatttcgctgcgaagcctttcgcttctttttaaaggcataaaacttaccgaagcggtttcaggccctgtacggatcacctatatggtaggcgatattgccacggaaggtttcgggaggagtttcgtgacaggccttcgttccctggcggattttctcgcgctgatctcaatcgccctcttcgtaatgaaccttctgcccctgcctgttctggacggaggcatgatcgttcttgccctcgtggaatggatacggcgcaaaccgatccacccaaaagcgataagggtattccagaccgtaggcgtggttcttatttccgggctgatgattttcgccctgtttggagatataatgtacctcacgcggcgataa

SEQ ID NO: 49352 - protein, 313 aa, Unknown
  Obtained from environmental sample
  DOMAIN (98)...(306): Peptidase family M50
  misc_feature (1)..(313): Xaa is any amino acid
MLLSELNNENKYPADEAGFKTGDRIIEVNGRKINYFHEIKENIAINPEKLLPVTVDREGEKTTLFVRPNLDKSTGMGIIGVSFWADTVIDDIVPGSDAAIAGLLPGDRITGVNGTPVVNTVEFSRALEAGSATAAISYERNGVEGKAELVLSESGGDDLGIMWPRVTYRTPPLSPPAAVVKGVSESWKTLVISLRSLSLLFKGIKLTEAVSGPVRITYMVGDIATEGFGRSFVTGLRSLADFLALISIALFVMNLLPLPVLDGGMIVLALVEWIRRKPIHPKAIRVFQTVGVVLISGLMIFALFGDIMYLTRR

SEQ ID NO: 49353 - DNA, 870 bp, Unknown
  Obtained from environmental sample
  misc_feature (1)..(870): n is a, c, g, or t
gtgctctttaggctgctgcaatcgcgaaaagcctcactcccaatgaaagtaacgctgtccggtatggttatatcggtaaggctgatgcagccgctaaaagcccctctcccaatactgttaacgctgtttcctatagttacgccggtaatgtcggcgcaatcggaaaaagcaaattccccgattaaggtaacgctgtttggtatgtttacaccggtaaggctggtgcatccgttaaaagcccctttcccaatgctggtaacgctgtttcctatggttacgttggtaatgtcaatgcagccggaaaaagccatattcccaatgctggtaacgttgttgggtatggttatgacggtaaggcctgtgcaatcttcaaaagccatattcccaatgctggtaacgctgttgggtataattatgctcttaaggctggtgcagagtctaaaagcttcctctccaatgctggtaacgctgttgggtatagttacgccggtaaggccggtgtttctgataaaagcgcgtcccataatgccggtaacgggtagtccttgtatcgtcgacggtatatttaccgtccgttttgtacctgtatatccggtaatcgctattgatttgccgccgtactgtctggacaccataaaatcgctgtcagggtcatactgctgcggcgcgttcggttgttgttcctgttcaggctgctgccgctcaggctgctgtcgctcaggctgctgccgctcaggctgctgccgctcaggctgctgccgttcaggctgctgtcgttcaggctgctgtcgctcaggctgttgtcgctcaggctgttgtcgctcaggctgctgccgttcaggctgccgccgccgctcaggctgctgttga

SEQ ID NO: 49354 - protein, 289 aa, Unknown
  Obtained from environmental sample
  misc_feature (1)..(289): Xaa is any amino acid
MLFRLLQSRKASLPMKVTLSGMVISVRLMQPLKAPLPILLTLFPIVTPVMSAQSEKANSPIKVTLFGMFTPVRLVHPLKAPFPMLVTLFPMVTLVMSMQPEKAIFPMLVTLLGMVMTVRPVQSSKAIFPMLVTLLGIIMLLRLVQSLKASSPMLVTLLGIVTPVRPVFLIKARPIMPVTGSPCIVDGIFTVRFVPVYPVIAIDLPPYCLDTIKSLSGSYCCGAFGCCSCSGCCRSGCCRSGCCRSGCCRSGCCRSGCCRSGCCRSGCCRSGCCRSGCCRSGCRRRSGCC

SEQ ID NO: 49355 - DNA, 438 bp, Unknown
  Obtained from environmental sample
  misc_feature (1)..(438): n is a, c, g, or t
ttgtggccttgcttgccggttattcgggtaatgaagcgtatttttctgacgccaggaatgtggcaaaattattatcaaaaatatatccggagtataaagatttacctgccgatgtcgaagaaaaaatttccgcggccaggaaaaaaagaagtgaaaacagaagaccagttcaacagcagcctgagcggcggcggcagcctgaacggcagcagcctgagcgacaacagcctgagcgacaacagcctgagcgacagcagcctgaacgacagcagcctgaacggcagcagcctgagcggcagcagcctgagcggcagcagcctgagcgacagcagcctgagcggcagcagcctgaacaggaacaacaaccgaacgcgccgcagcagtatgaccctgacagcgattttatggtgtccagacagtacggcggcaaatcaatag

SEQ ID NO: 49356 - protein, 145 aa, Unknown
  Obtained from environmental sample
  misc_feature (1)..(145): Xaa is any amino acid
MWPCLPVIRVMKRIFLTPGMWQNYYQKYIRSIKIYLPMSKKKFPRPGKKEVKTEDQFNSSLSGGGSLNGSSLSDNSLSDNSLSDSSLNDSSLNGSSLSGSSLSGSSLSDSSLSGSSLNRNNNRTRRSSMTLTAILWCPDSTAANQ

SEQ ID NO: 49357 - DNA, 432 bp, Unknown
  Obtained from environmental sample
  misc_feature (1)..(432): n is a, c, g, or t
atgggcgttgttaaggctgtttgcgtcagcaaagaaaaaggcgtcgcgaaaaaagacattggcggcggagagcttgtcgctcatcacgggctcaagggcgacgcccacgccggggactggcacaggcagataagtttgctgtcgctgcaaaaaattgaggcgttcagggccaaaggggcggatgtggagttcggcgcttttggggaaaatctcgtggtagacgggattgatttcgcaaacctgccccttgggactaaattcaactgcggagacgctctgctggagatgactcaaatcggcaaggagtgccataaccattgcgagatatatcatcgcatgggcgactgcatcatgccccgtngaggtgtttttgccagggtactgcggggagggatggtgaaagtcggggacgtcattgaggcaccgcgctaa

SEQ ID NO: 49358 - protein, 143 aa, Unknown
  Obtained from environmental sample
  DOMAIN (29)...(141): MOSC domain
  misc_feature (1)..(143): Xaa is any amino acid
MGVVKAVCVSKEKGVAKKDIGGGELVAHHGLKGDAHAGDWHRQISLLSLQKIEAFRAKGADVEFGAFGENLVVDGIDFANLPLGTKFNCGDALLEMTQIGKECHNHCEIYHRMGDCIMPRXGVFARVLRGGMVKVGDVIEAPR

SEQ ID NO: 49359 - DNA, 726 bp, Unknown
  Obtained from environmental sample
  misc_feature (1)..(726): n is a, c, g, or t
gtggcggacttcgacccccagcctgttatcaccaaagataacgtaaccatgatgatagacacggtgatttatcttcaaataaccgaccccaagctctacacntacggcgtggctcatcctatgggcgctatcgaaaaccttaccagtaccacgctgaggaatataatcggtgaactggaactggacgaaacgcttaccagccgcgacatgatcaacaaccgaatgcgcctggtgcttgacgaggccaccgatccctgggggatcaaggtgaaccgcgttgaggtgaaaaacattgcgccgcccaaaagcattcaggaagcgatggaaaagcagatgcgggcggagcgcgagcgtcgtgaatccatacttaaggccgagggcgaaaagcagtccgccattctggtcgcggaagggcaaaaggcttccgccattcttaaagctgaggctgaaaaagccgcggcgatcctccaggccgaagccgccaaggaagctcaaatacgcgaggccgagggcgaagcccaggcgatcctcaacgtgcaaagggccactgcggacggccttgccatgataaaagcggtcggcgctgacgatgcccttatcaggctgaaaagccttgaggccctgcaaaaagtcgccgaaggccaggctactaagattatcataccatcagacatacagaaccttgcaggactggttaccagcgtgacagaactggcgaaaaaatag

SEQ ID NO: 49360 - protein, 241 aa, Unknown
  Obtained from environmental sample
  DOMAIN (1)...(129): SPFH domain / Band 7 family
  misc_feature (1)..(241): Xaa is any amino acid
MADFDPQPVITKDNVTMMIDTVIYLQITDPKLYTYGVAHPMGAIENLTSTTLRNIIGELELDETLTSRDMINNRMRLVLDEATDPWGIKVNRVEVKNIAPPKSIQEAMEKQMRAERERRESILKAEGEKQSAILVAEGQKASAILKAEAEKAAAILQAEAAKEAQIREAEGEAQAILNVQRATADGLAMIKAVGADDALIRLKSLEALQKVAEGQATKIIIPSDIQNLAGLVTSVTELAKK

SEQ ID NO: 49361 - DNA, 1017 bp, Unknown
  Obtained from environmental sample
  misc_feature (1)..(1017): n is a, c, g, or t
atggtaaatattgtaaaagagagaaaaaattctatgaaaaaaagaaacgcgtcagtttcattgattttatgcctttcatttatcctggcgattgctttgctgttcacgacctgcgccaaccccgacgatttaaacggtccagtagattatcgtgtcttctttgagcctaacggcggctcacatgaagctggtgagtatattgtgaagggtcatatggtgtatcagcctggggatccaaaaagagaaggatatgtttttaaaggctggtttaccgatgcagcccttaccaaaccatacaacttttataatagagttactaaaaacttaatnttatacgcgaagtggactccaaaagacaacggctcaggtgaagggagcagttctggcaacggcactgggactggctcgggtaatggcagtggttcaggtactggcacaggcagcgggtcggatactggtaatggctccggttcaggcactggcggtggttcaggtacaggcagcgggttgggtaccggcggtggttcggatactggtggtggctctggcactggtagcgggtcaggcactgacagtggttctggcaccggcggtggctcggatactggcactggcggcggttcaggtaccgatggcggctcaggcgatggttcaggtggaggcggcggctccgataatggcggagttactgaccgtggagtcgccacagttagcttcgacagcaaaggcggaaccactgttttaccgcgaaccgtacatattggtgatgctctaaatatggatcctgatgaaattcctacccgtgcaggagctacttttgaaggctggtatacagatgatggtaaagaatacatattttcttctactacaccggtaacaggagacattacactccatgcgaagtgggaaatcaccgtaagtcacggaggccacgaaattcccgatccccccggacccactatattcaccgtcagtttgaaactaacggtggcagtacagtacccgatgagagcgtaa

SEQ ID NO: 49362 - protein, 338 aa, Unknown
  Obtained from environmental sample
  misc_feature (1)..(338): Xaa is any amino acid
MVNIVKERKNSMKKRNASVSLILCLSFILAIALLFTTCANPDDLNGPVDYRVFFEPNGGSHEAGEYIVKGHMVYQPGDPKREGYVFKGWFTDAALTKPYNFYNRVTKNLXLYAKWTPKDNGSGEGSSSGNGTGTGSGNGSGSGTGTGSGSDTGNGSGSGTGGGSGTGSGLGTGGGSDTGGGSGTGSGSGTDSGSGTGGGSDTGTGGGSGTDGGSGDGSGGGGGSDNGGVTDRGVATVSFDSKGGTTVLPRTVHIGDALNMDPDEIPTRAGATFEGWYTDDGKEYIFSSTTPVTGDITLHAKWEITVSHGGHEIPDPPGPTIFTVSLKLTVAVQYPMRA

SEQ ID NO: 49363 - DNA, 612 bp, Unknown
  Obtained from environmental sample
  misc_feature (1)..(612): n is a, c, g, or t
gtgatttcccacttcgcatggagtgtaatgtctcctgttaccggtgtagtagaagaaaatatgtattctttaccatcatctgtataccagccttcaaaagtagctcctgcacgggtaggaatttcatcaggatccatatttagagcatcaccaatatgtacggttcgcggtaaaacagtggttccgcctttgctgtcgaagctaactgtggcgactccacggtcagtaactccgccattatcggagccgccgcctccacctgaaccatcgcctgagccgccatcggtacctgaaccgccgccagtgccagtatccgagccaccgccggtgccagaaccactgtcagtgcctgacccgctaccagtgccagagccaccaccagtatccgaaccaccgccggtacccaacccgctgcctgtacctgaaccaccgccagtgcctgaaccggagccattaccagtatccgacccgctgcctgtgccagtacctgaaccactgccattacccgagccagtcccagtgccgttgccagaactgctcccttcacctgagccgttgtcttttggagtccacttcgcgtataanattaagtttttagtaactctattataa

SEQ ID NO: 49364 - protein, 203 aa, Unknown
  Obtained from environmental sample
  misc_feature (1)..(203): Xaa is any amino acid
MISHFAWSVMSPVTGVVEENMYSLPSSVYQPSKVAPARVGISSGSIFRASPICTVRGKTVVPPLLSKLTVATPRSVTPPLSEPPPPPEPSPEPPSVPEPPPVPVSEPPPVPEPLSVPDPLPVPEPPPVSEPPPVPNPLPVPEPPPVPEPEPLPVSDPLPVPVPEPLPLPEPVPVPLPELLPSPEPLSFGVHFAYXIKFLVTLL

SEQ ID NO: 49365 - DNA, 300 bp, Unknown
  Obtained from environmental sample
  misc_feature (1)..(300): n is a, c, g, or t
ttggttcggcaaagggtggacttcagcgaattctcatcgcacgggcgcgggacaggcggccagaaaatttatacggtcaatgaaaaaaccggcgagattgtcggctgcgtttccctgtttgacgatgatgagataatgtgtatcaccagccaggggaaatcaatcaagttaaaagtagacgagatccgcgttatgggccgcgccgcccagggcgtgaggatcctgagcatagataagccggattttgtcatcggccttgaccgtgttgtaaaagaggacgaacctcttgaaggagaataa

SEQ ID NO: 49366 - protein, 99 aa, Unknown
  Obtained from environmental sample
  DOMAIN (42)...(91): DNA gyrase C-terminal domain, beta-propeller
  misc_feature (1)..(99): Xaa is any amino acid
MVRQRVDFSEFSSHGRGTGGQKIYTVNEKTGEIVGCVSLFDDDEIMCITSQGKSIKLKVDEIRVMGRAAQGVRILSIDKPDFVIGLDRVVKEDEPLEGE

SEQ ID NO: 49367 - DNA, 405 bp, Unknown
  Obtained from environmental sample
  misc_feature (1)..(405): n is a, c, g, or t
atgcgcacgccggattgtggaggcggagagtcagtcggctgtaaacggaaaggcacaataggcggcattatcgccactatcggccttgtgttgcccggcgttagcctgatgatgttaatatcgttgttcatacggcgtttcgccgaatatgctgtggtacaacgcgctttcagcggcatacgacttgccgtctgcgccatcattctggatacgattattaaattgttcaaagggttctggaaggactataaggcgatgattatcagtattgtcgtttttattctttcggcggttttcagcgtgtcccccatgtatatcatccctgtcgcgggccttgcgggttttctgctttattctccgaaaggcaaagacaaaattacggctaacatcgggaaggacgagtga

SEQ ID NO: 49368 - protein, 134 aa, Unknown
  Obtained from environmental sample
  misc_feature (1)..(134): Xaa is any amino acid
MRTPDCGGGESVGCKRKGTIGGIIATIGLVLPGVSLMMLISLFIRRFAEYAVVQRAFSGIRLAVCAIILDTIIKLFKGFWKDYKAMIISIVVFILSAVFSVSPMYIIPVAGLAGFLLYSPKGKDKITANIGKDE

SEQ ID NO: 49369 - DNA, 498 bp, Unknown
  Obtained from environmental sample
  misc_feature (1)..(498): n is a, c, g, or t
gtgatggcgcttattctcctttacattgagtttttcaagataggattattcgcggttggcggcggcctggcgactctgccttttttatttcttatggccaatgaccgttttacgtttatccggcggacgggctggttaaacacggaacagcttggcaacttcatcgccattgcccagtgttcgcccggcgctgtcggggtaaatatttgcgctcagaccggttttatttataatggcataccgggcggtattatcgctgtgtttggattgataagtccggccatcattattatttcagttgtcgccagggctttgcagtcaatcaaaaataataaaatctcaatcgccgttttttccggcctccgtcccgcagccacgggacttctcagcgccgcaggcctgggcgtatggcggctcgccctgtacaacccgccgccggtaatggagcgtggcatgagattatccgctggcgcgaaagcctggttgtctggtatctaa

SEQ ID NO: 49370 - protein, 165 aa, Unknown
  Obtained from environmental sample
  DOMAIN (2)...(163): Chromate transporter
  misc_feature (1)..(165): Xaa is any amino acid
MMALILLYIEFFKIGLFAVGGGLATLPFLFLMANDRFTFIRRTGWLNTEQLGNFIAIAQCSPGAVGVNICAQTGFIYNGIPGGIIAVFGLISPAIIIISVVARALQSIKNNKISIAVFSGLRPAATGLLSAAGLGVWRLALYNPPPVMERGMRLSAGAKAWLSGI

SEQ ID NO: 49371 - DNA, 720 bp, Unknown
  Obtained from environmental sample
  misc_feature (1)..(720): n is a, c, g, or t
atggcggctcgccctgtacaacccgccgccggtaatggagcgtggcatgagattatccgctggcgcgaaagcctggttgtctggtatctaagcgcctatcctaaaattcaaagctcaccccgtggtatacgttgtgttaggtgcaatcgcgggaataattatattttagaatgggaggttatcattatgccgaataaaaaacttgaactcatcaggggcgatataacaaaaatggatacggatgccattgtcaacgccgccaattcaagcctcatgggtggcggcggggtggacggggcaatacatagggcatccgggccggaactgcttgaggaatgtaaaaggatagcaagggacaggcgcggcatccccaacggtccctgccccacaggtgatgcggttattaccggcgcggggcgcctcccctgcaaaaaggtgatccatacagtgggtcctgtttggcgcggcggaagcgccggggaagcggaactgcttgcttcctgttaccaaaaaagcctcttgcttgccgaagaggccgggttaaaaagcatagcctttccgaatatcagtaccggcgtctacggataccccagggaaaaagcggcggatgtcgcggtggaagctgtgcgtaaaactttggagcaaacgccgggcattgaaagggttgtctttgtctgttttgacgatgagaattacaggctttacagtgaaaggctttga

SEQ ID NO: 49372 - protein, 239 aa, Unknown
  Obtained from environmental sample
  DOMAIN (84)...(205): Appr-1-p processing enzyme family
  misc_feature (1)..(239): Xaa is any amino acid
MAARPVQPAAGNGAWHEIIRWRESLVVWYLSAYPKIQSSPRGIRCVRCNRGNNYILEWEVIIMPNKKLELIRGDITKMDTDAIVNAANSSLMGGGGVDGAIHRASGPELLEECKRIARDRRGIPNGPCPTGDAVITGAGRLPCKKVIHTVGPVWRGGSAGEAELLASCYQKSLLLAEEAGLKSIAFPNISTGVYGYPREKAADVAVEAVRKTLEQTPGIERVVFVCFDDENYRLYSERL

SEQ ID NO: 49373 - DNA, 1395 bp, Unknown
  Obtained from environmental sample
  misc_feature (1)..(1395): n is a, c, g, or t
ttgttagacgcgaaaagcgcctccagccctatagacgcgtataagatttgggcgcagaagaaaatcacggaacttgaattagactactacaacaaccgcgacgaactcacggagcttgcgcaacggttcggtctcgtaacgcggaacacttcgcttatcgtacttgaaagcatcgacgactacgtccgctacggcattgcgccgccgacctccgagaacgagctgtacgcgcaatatcagcgcagaacgggcggtggcgggcgtataggcgtggccggaatagggtatggatcgggatcgggatatggatctggcttcggcgggagcggcggcggcaccgacgggagccgtagcggcagcggcggcaatagcaacagcagccgcggatccggtacaacgcgtgaaagctccagcagggaagaacgggtagcgaagcttgtaaaatcagaggaaccggcggccacgttagagcgccaaaaagagtcttccaacagcggtatcagtagcaataaaggcggcggagatcctagagcgcgcgttactcagatgggcgttttgggcgttgtttccgggcaggtcaagggcaagcccgtcgcgtccgccgatgtcttcggcaagggcggtttctctacggacatcgacgccattctctccgatgtgggcggtctcaaatcgggcggcgacggcagcgttggccgtaaaggcacggccggcctaagttacggatcgggatacggatcaggcttcggcggaagcggcggaagcgacagagaaatagacgatctgttgggcggattaatgggcgggagcggcgacggccttccactgaggaaaaacaccggcgaaccgaaaatatcttcgcccgacttcctgaaaggcggcgctcttatcggcggcagaagcagggcgagtattttccgcgtggttatgcagaatatggccgcgctacgctacgcctacaacaagcgtttgcgcgatgtaccgggcctacacggtaaagtaacgatcaaattcgctatcgatgagttcggaagtgtgatattcgctcaaattgtggaatccacgctcttcgaccgcgaactggaaaacaccgtgctgtcgagagttaagagttggaactttgagagaatcgacaagcccggagacgtgacagaagttacctatccattcgtgttctcaaacgacggagccgcgacgacgccccaaaacaacacaaatacgactcanaattactgggaccccggcgcgctaaacggagcgctagtggcggcaaacaatctgtctttctggtggactcgcgacttcacgctcccgccgaaatccaaatatcccacgccggataaattcaataaaatagcggggcgccctagacatatactccgcggccagagataa

SEQ ID NO: 49374 - protein, 464 aa, Unknown
  Obtained from environmental sample
  misc_feature (1)..(464): Xaa is any amino acid
MLDAKSASSPIDAYKIWAQKKITELELDYYNNRDELTELAQRFGLVTRNTSLIVLESIDDYVRYGIAPPTSENELYAQYQRRTGGGGRIGVAGIGYGSGSGYGSGFGGSGGGTDGSRSGSGGNSNSSRGSGTTRESSSREERVAKLVKSEEPAATLERQKESSNSGISSNKGGGDPRARVTQMGVLGVVSGQVKGKPVASADVFGKGGFSTDIDAILSDVGGLKSGGDGSVGRKGTAGLSYGSGYGSGFGGSGGSDREIDDLLGGLMGGSGDGLPLRKNTGEPKISSPDFLKGGALIGGRSRASIFRVVMQNMAALRYAYNKRLRDVPGLHGKVTIKFAIDEFGSVIFAQIVESTLFDRELENTVLSRVKSWNFERIDKPGDVTEVTYPFVFSNDGAATTPQNNTNTTXNYWDPGALNGALVAANNLSFWWTRDFTLPPKSKYPTPDKFNKIAGRPRHILRGQR

SEQ ID NO: 49375 - DNA, 738 bp, Unknown
  Obtained from environmental sample
  misc_feature (1)..(738): n is a, c, g, or t
atgcggagaatcctacgcacaagtgttttgcgttgtgtgtactggccgtatatgttcaaaaaagcgggttacgaattctggttacaagcaaccgagaaattttcagtcaaaaccatcttggcaattttcaaaggcgaaggagatgataataaaatccgcgagacagccaaactcatagcagaacaacttcttgccattacgtcaggttccgccgctgcggttggaaatgtagactcaattacagacgtcggtatgtctggcgatctcattggcttcgcttcactcgtagacgcttgcgatacgcaaatcagctacggtcttacggggcaaaccattgcaacaagcaagaccgaaggcggcagtctcgccttgggtgaagtgcaagctgatctgttttatgaggacgctaaaggtatcgctcttgaagggcaggcgctcattcagagaattattaattgggcagtggaacttaacggctttggtaatgtagtcccgccgcttgccgaagtggacaccgagcgtaaagccagttttgatcaggttatgaaggcaatagatcacggcatcgccgtttctcgtgacgccatgtacgaccgctacggtttaccgcgtccgcgcgatgatgcggacacttttataaaagaaacttctgcaagccttgccctttctgattcaaacaaatctgaaaatggtaaaaaaaaagccctacaaccaaaaccgatgatacggattttgtag

SEQ ID NO: 49376 - protein, 245 aa, Unknown
  Obtained from environmental sample
  misc_feature (1)..(245): Xaa is any amino acid
MRRILRTSVLRCVYWPYMFKKAGYEFWLQATEKFSVKTILAIFKGEGDDNKIRETAKLIAEQLLAITSGSAAAVGNVDSITDVGMSGDLIGFASLVDACDTQISYGLTGQTIATSKTEGGSLALGEVQADLFYEDAKGIALEGQALIQRIINWAVELNGFGNVVPPLAEVDTERKASFDQVMKAIDHGIAVSRDAMYDRYGLPRPRDDADTFIKETSASLALSDSNKSENGKKKALQPKPMIRIL

SEQ ID NO: 49377 - DNA, 783 bp, Unknown
  Obtained from environmental sample
  misc_feature (1)..(783): n is a, c, g, or t
gtgccttacgagcttttgattccggattgggaagaatatttgtcaaaaggaaaacacctgaacggtccgtcaagaaatatgtctgaaagcgcgtctttggcgcttttatcgtttaaggtgctgtcagccgccgtaatacctatacatgtcaacaatattttttggggcttcgcgcttttcgccgatatgaaaagcgaacattattttaaagatgatataattgaaatgctgcgctcggcggcttttttgtttgttaacgctttcatccgcgccgaagtggattatgacgcgcttaccggcattcacaacaggcgtttctttgatgaaaacatgaagcgcgtcataagttctttatcccgctcggaaagtttattaagtttgctgatgatcgacattgacttctttaagcgttacaacgacacatacggccatttggaaggcgataaatgtcttaaaattgtcgccgaaactctttccaagagcataacaagatcggatgattttgttgtcagatacgggggagaggaatttgccgttgtccttcccaataccgacgaacacggcgcgtgtataatcgctgagaaacttcttaacaatataaggaaatgcaatataccccatgaacaaaacgacgcggcggcctgccttacaatttccatcggagccgcaacaggcaaagtgtcgcatacgcatattccggaagattttgtaaagaaagccgacgagatgctttataaatcaaagcaaaacggccgtaatcaatatttctttgagtggctttga

SEQ ID NO: 49378 - protein, 260 aa, Unknown
  Obtained from environmental sample
  DOMAIN (89)...(254): GGDEF domain
  misc_feature (1)..(260): Xaa is any amino acid
MPYELLIPDWEEYLSKGKHLNGPSRNMSESASLALLSFKVLSAAVIPIHVNNIFWGFALFADMKSEHYFKDDIIEMLRSAAFLFVNAFIRAEVDYDALTGIHNRRFFDENMKRVISSLSRSESLLSLLMIDIDFFKRYNDTYGHLEGDKCLKIVAETLSKSITRSDDFVVRYGGEEFAVVLPNTDEHGACIIAEKLLNNIRKCNIPHEQNDAAACLTISIGAATGKVSHTHIPEDFVKKADEMLYKSKQNGRNQYFFEWL

SEQ ID NO: 49379 - DNA, 663 bp, Unknown
  Obtained from environmental sample
  misc_feature (1)..(663): n is a, c, g, or t
atgaaaaatgtgttaataaccattcaggaaatacccggcgactcattcgatgatataagaaaacgtattttgggaaacatcgggcggatccgtaaaatgggtactgactatcttgcctattcattgattgatacagtggttgacgaatatttcattacattggaacattttgaaaacgatattgaagaccttgaagatcgcgccacaaagacagataatgacacgttcatttcagaaatacaggatacaaagaaatacattttccagataaaacgggcaatgctcccgctgcgggagaaccttatgattatttcccgccaggacatgctgtcagtaaacgaagaattgaaaccgttccttcaggatctgcgggaaaatttatcaaacgcgatagtctccgtggagacctaccgtgaatggctgacaaacataatggacgtaaacctttcggttctgtcataccaattaaacaaagtgatgaaaatgctggctgtaatatcggcgatatttattccattaacttttattgcggggatatacggcatgaattttgaatttatgcctgaaataagacagccttttggctaccccattgtgcttggatgcatggtgtctatcgcgttgtcaatggtcatattatttaaaacacgaaaatggttttag

SEQ ID NO: 49380 - protein, 220 aa, Unknown
  Obtained from environmental sample
  DOMAIN (1)...(220): CorA-like Mg2+ transporter protein
  misc_feature (1)..(220): Xaa is any amino acid
MKNVLITIQEIPGDSFDDIRKRILGNIGRIRKMGTDYLAYSLIDTVVDEYFITLEHFENDIEDLEDRATKTDNDTFISEIQDTKKYIFQIKRAMLPLRENLMIISRQDMLSVNEELKPFLQDLRENLSNAIVSVETYREWLTNIMDVNLSVLSYQLNKVMKMLAVISAIFIPLTFIAGIYGMNFEFMPEIRQPFGYPIVLGCMVSIALSMVILFKTRKWF

SEQ ID NO: 49381 - DNA, 462 bp, Unknown
  Obtained from environmental sample
  misc_feature (1)..(462): n is a, c, g, or t
ttgatcagatggccgagatcttatgccgctgtaaaagaaatatacactactgcggaggggcttacgtttgttacaggcgggaaaaaattgtatattttggtagaacctgatatataccataataaacctgttgaaccggtaagcagaagcaagacggacggcgaatatattcctaaacgtttttccgaactggaaataatcatcgcaaaaaatcaaacaaaaataatggtagcaaaggaaccaatcgaaacttttggttcatttaccattattgaaccaaagggaattaatttttcaatagtattttatgaacatcccgatgttataaatacgcttggccttttccttcagactactcttaacaggcagcggaaaattcccgaagctgatgcaaaaaaagccgctaaattaataacggatataattacgaagacaatgagttctgaaggtgaatatcggtaa

SEQ ID NO: 49382 - protein, 153 aa, Unknown
  Obtained from environmental sample
  misc_feature (1)..(153): Xaa is any amino acid
MIRWPRSYAAVKEIYTTAEGLTFVTGGKKLYILVEPDIYHNKPVEPVSRSKTDGEYIPKRFSELEIIIAKNQTKIMVAKEPIETFGSFTIIEPKGINFSIVFYEHPDVINTLGLFLQTTLNRQRKIPEADAKKAAKLITDIITKTMSSEGEYR

SEQ ID NO: 49383 - DNA, 408 bp, Unknown
  Obtained from environmental sample
  misc_feature (1)..(408): n is a, c, g, or t
atggatgtaaatttcggcgaatataaattcagcgataataaaaacctgatttcgacagacaaagtatgcgaactattggataatagttattgggcaaaggaccgaaaaagggaaataaccgcaaaagcaattgaaaattctttatgtatcggaatatacctaaaggaaaaaatggttgggttcgcaaggcttgtaactgattatgctacaatgtactggctttgcgacgtaattattgatactaattatcaaaaaaacggtttggggaaaaagttaattgaaatcattacacaaatgaaagagctggacggaatgtatggaattttggctacaagagacgcacatgaattatatgaaaaatatggtttcaaaagagtaggcgaaaaatatatgagaagggacgcttga

SEQ ID NO: 49384 - protein, 135 aa, Unknown
  Obtained from environmental sample
  DOMAIN (50)...(124): Acetyltransferase (GNAT) family
  misc_feature (1)..(135): Xaa is any amino acid
MDVNFGEYKFSDNKNLISTDKVCELLDNSYWAKDRKREITAKAIENSLCIGIYLKEKMVGFARLVTDYATMYWLCDVIIDTNYQKNGLGKKLIEIITQMKELDGMYGILATRDAHELYEKYGFKRVGEKYMRRDA

SEQ ID NO: 49385 - DNA, 669 bp, Unknown
  Obtained from environmental sample
  misc_feature (1)..(669): n is a, c, g, or t
ttggacaatatacttatgaacattggtttgatgatgaatacggaaataaaaaacacaacagatgttctcttaaggtcggaagaggaaaaagattataactcagttgaaaatttaacacgagaggcattttggaatatttataaaccgggatgcgatgaacatttattaatccataacatgcgaaaggcaaaagaatttattaaagaccttgattatgtggcggtttttaataatgaaattataggaaatattgtatatgcaaaagccaaagttatagacataaacaaagaatatgacgtaataacgtttggtccggttagcgtgttaccaatgtatcagaagaaaggcatagggaaaaaattaatagaacatacaattccaaaatccaaagaaatggggtttaacgctataataatatatggaaacccaaaatattatgaaagattcggctttaaaaacagcaaagaatataaaataacggatatggaaggtaattataatgacgctttaatggcgttagaactgtatcccaaatcattggaaaacattaacggaaaattttttgaaggagaaatatataaaatagataaaaaggaactggaaatatttgaaaagaattttccgtataaagaaaaactggtattagacacacaaatattcaaggaataa

SEQ ID NO: 49386 - protein, 222 aa, Unknown
  Obtained from environmental sample
  DOMAIN (72)...(152): Acetyltransferase (GNAT) family
  misc_feature (1)..(222): Xaa is any amino acid
MDNILMNIGLMMNTEIKNTTDVLLRSEEEKDYNSVENLTREAFWNIYKPGCDEHLLIHNMRKAKEFIKDLDYVAVFNNEIIGNIVYAKAKVIDINKEYDVITFGPVSVLPMYQKKGIGKKLIEHTIPKSKEMGFNAIIIYGNPKYYERFGFKNSKEYKITDMEGNYNDALMALELYPKSLENINGKFFEGEIYKIDKKELEIFEKNFPYKEKLVLDTQIFKE

SEQ ID NO: 49387 - DNA, 1107 bp, Unknown
  Obtained from environmental sample
  misc_feature (1)..(1107): n is a, c, g, or t
atggcaggctcggtcacgggcgcatttttggcgggcaaggacgaaattgccacgccaaaaaaacgccgaaaacctgagcgaggccacattacagtgttgggtgccgctgaaaacaacctaaaaggcatcaatgcctccttccccataggcctattcacctgcatcactggcgtctcgggttctggcaagtcatccctgatcaatggcattttgtacaaagccttggcaaaccatctccaccaaggcaaacacgttgtgggaaagcacaaaaaaatagcgggtatggaagagatcgacaaagtgatagacattgatcaagctccgattggccggacgccaaggtcaaaccccgctacatacactgggctcttttcgcacctgagggacttgtacagccagttgccagagagccgcgccagggggtacgcacctggccgttacagtttcaacgtaaaggggggacggtgcgaaaagtgcgagggggacggtgtaatcagaatcgagatgcacttcctgccagacgtgtatgtaacctgcgaacagtgcaagggcaagcgatacaatagggaaacgctggaaattcactataagggcaaatctatctcggacgtgctggcaatgacagttgaggaggcatcggaactatttggccccatcccttccatagccaacaaactgcagaccttgtttgaagtcgggctgggctacatcaggctcgggcagtccgccacaacgctttcgggcggcgaggcgcagcgggtaaaactggcaaaagagctttccaagcgatctacgggcaaaaccttttacattcttgacgagccaaccaccggcctgcacttcgccgacgtgaagcaactgatggaagtgatccagcgccttgtggatcagggtaacactgtaacgatgatcgagcataacctggatgtgcttttgcaggcggattatataatagatttggggccggaaggcggcgacaggggtggggagcttattaccaccgggacgcctgaacaagttgccgaatgttcccactcatatacaggcgcttatatcaaggaacatttgattaagtacggcaggaaaagcataaaaaagaataaatga

SEQ ID NO: 49388 - protein, 368 aa, Unknown
  Obtained from environmental sample
  DOMAIN (50)...(324): ABC transporter
  misc_feature (1)..(368): Xaa is any amino acid
MAGSVTGAFLAGKDEIATPKKRRKPERGHITVLGAAENNLKGINASFPIGLFTCITGVSGSGKSSLINGILYKALANHLHQGKHVVGKHKKIAGMEEIDKVIDIDQAPIGRTPRSNPATYTGLFSHLRDLYSQLPESRARGYAPGRYSFNVKGGRCEKCEGDGVIRIEMHFLPDVYVTCEQCKGKRYNRETLEIHYKGKSISDVLAMTVEEASELFGPIPSIANKLQTLFEVGLGYIRLGQSATTLSGGEAQRVKLAKELSKRSTGKTFYILDEPTTGLHFADVKQLMEVIQRLVDQGNTVTMIEHNLDVLLQADYIIDLGPEGGDRGGELITTGTPEQVAECSHSYTGAYIKEHLIKYGRKSIKKNK

SEQ ID NO: 49389 - DNA, 393 bp, Unknown
  Obtained from environmental sample
  misc_feature (1)..(393): n is a, c, g, or t
gtgggaacattcggcaacttgttcaggcgtcccggtggtaataagctccccacccctgtcgccgccttccggccccaaatctattatataatccgcctgcaaaagcacatccaggttatgctcgatcatcgttacagtgttaccctgatccacaaggcgctggatcacttccatcagttgcttcacgtcggcgaagtgcaggccggtggttggctcgtcaagaatgtaaaaggttttgcccgtagatcgcttggaaagctcttttgccagttttacccgctgcgcctcgccgcccgaaagcgttgtggcggactgcccgagcctgatgtagcccagcccgacttcaaacaaggtctgcagtttgttggctatggaagggatggggccaaatag

SEQ ID NO: 49390 - protein, 130 aa, Unknown
  Obtained from environmental sample
  misc_feature (1)..(130): Xaa is any amino acid
MGTFGNLFRRPGGNKLPTPVAAFRPQIYYIIRLQKHIQVMLDHRYSVTLIHKALDHFHQLLHVGEVQAGGWLVKNVKGFARRSLGKLFCQFYPLRLAARKRCGGLPEPDVAQPDFKQGLQFVGYGRDGAK

SEQ ID NO: 49391 - DNA, 708 bp, Unknown
  Obtained from environmental sample
  misc_feature (1)..(708): n is a, c, g, or t
ttgagattattgataatcagcagaagaaaaacagataaaaaaatggccatacaatttttaataattattgctgtaatcctgattctcttgttgtgtataaaaatgaaaacgaaacgccaaagaatcgctgtattaattgggtttgtagttagcatattatccttcttcgctttcctagcagttattttttcagcccaaagaacaatattatggtcattattattagtattctatgtatcgctaattgcctttttgattttttggaatatacttaaaacaaaaaaagtttatttgatattgtttgttcctgcaatatgtattttgttggcaatatcaattattggctattacagttacattcataaaataccaacaataaatgaagaaagcaacctatacagatacaaatcctctacagaaaataatgtattggcaaaactggatgaagaatcgaatttaaaattaactgacaatttacctgtccttgatggggcaaccgcgctttatcctgtatatgcttcatttgcacaggcggtttatccaaaaaatgaatatgaatcttcagatgcacctgtaatatctcaggaaaatgtatataagacttctaaagctcaggtattatgtactacgactgttggggcttatgacaatcttttagaaggtaaagttgacattatattttgtgcggccccatcagattacaaatga

SEQ ID NO: 49392 - protein, 235 aa, Unknown
  Obtained from environmental sample
  misc_feature (1)..(235): Xaa is any amino acid
MRLLIISRRKTDKKMAIQFLIIIAVILILLLCIKMKTKRQRIAVLIGFVVSILSFFAFLAVIFSAQRTILWSLLLVFYVSLIAFLIFWNILKTKKVYLILFVPAICILLAISIIGYYSYIHKIPTINEESNLYRYKSSTENNVLAKLDEESNLKLTDNLPVLDGATALYPVYASFAQAVYPKNEYESSDAPVISQENVYKTSKAQVLCTTTVGAYDNLLEGKVDIIFCAAPSDYK

SEQ ID NO: 49393 - DNA, 930 bp, Unknown
  Obtained from environmental sample
  misc_feature (1)..(930): n is a, c, g, or t
atgcgaaatgcttatatggtggataaagaaaaagaagagaaaagtataattcctgtgtttggaaaagatgcggtaacggcgatgcttgcaacaaacaacggatatgccctttattgcggcgtcacgatacaatcaattattgaaaacgctaatccggcaaaaaattatgatttagttgttgtcagtcgtgacattgaagaaaaaacaaaaaaacttctggaatccatggctaaaccgaacatatcgattcgtgtcataaatattaataaatacgttgatgcgacgctttttaaattttttgcagttcatctacatttctcaatagaagcatatttccgttttttcatcccaaagctttttgagaaatatgataaagttttatactttgactgtgatttggtcgttctgcgtgatatagctgatttatatgctgtagatattggcgataattggtggggagttacctataactggagtacgcatgtgctgggttttacaaaagaaacatgggaatataaaaattatatgccatatttaaaaaatacgcttaaagttgattctccctttaattattttcagaatggggtaattatatggaatataatccaatgtaataaagacgatgttgaaagaaaactgatggacaggctgatcgaaataggccaaccgtattatgtcgatcaggacgtgatgagctccatggcgaacgggaagaatatattctggatttccaattattggaatgtaccctggcattatcaattatattttccgcaatacaagggacgttttgcatacgacaccatcattcatcagctagaaaacccttttatcattcattttgcaggcggaataaaaccatggcgtgaaccgtataggccgaatgctcattatttttggcagtatgccccgcaatacacctttttatga

SEQ ID NO: 49394 - protein, 309 aa, Unknown
  Obtained from environmental sample
  DOMAIN (25)...(292): Glycosyl transferase family 8
  misc_feature (1)..(309): Xaa is any amino acid
MRNAYMVDKEKEEKSIIPVFGKDAVTAMLATNNGYALYCGVTIQSIIENANPAKNYDLVVVSRDIEEKTKKLLESMAKPNISIRVININKYVDATLFKFFAVHLHFSIEAYFRFFIPKLFEKYDKVLYFDCDLVVLRDIADLYAVDIGDNWWGVTYNWSTHVLGFTKETWEYKNYMPYLKNTLKVDSPFNYFQNGVIIWNIIQCNKDDVERKLMDRLIEIGQPYYVDQDVMSSMANGKNIFWISNYWNVPWHYQLYFPQYKGRFAYDTIIHQLENPFIIHFAGGIKPWREPYRPNAHYFWQYAPQYTFL

SEQ ID NO: 49395 - DNA, 309 bp, Unknown
  Obtained from environmental sample
  misc_feature (1)..(309): n is a, c, g, or t
gtgccaatttacaatgtagaacgttatttgcgccagtgcgtggacagcctggtgtgtcaaacgttaaaaaacatagagataatccttgtggacgacggagccacggataattgtcccgcaatgtgcgactcttacgcggaacaggataaacgggtaaaggttatccataaggagaacggcggttatgggaaagcgtgcaacgacggctttaacgccgcaagaggcgaatatataggcatagttgaatccgatgattacacggagcttgacatgtttgagcgtttgtacggtttggcaaaagacgcataa

SEQ ID NO: 49396 - protein, 102 aa, Unknown
  Obtained from environmental sample
  misc_feature (1)..(102): Xaa is any amino acid
MPIYNVERYLRQCVDSLVCQTLKNIEIILVDDGATDNCPAMCDSYAEQDKRVKVIHKENGGYGKACNDGFNAARGEYIGIVESDDYTELDMFERLYGLAKDA

SEQ ID NO: 49397 - DNA, 513 bp, Unknown
  Obtained from environmental sample
  misc_feature (1)..(513): n is a, c, g, or t
gtgatgcttaatacagacgctttggacatgcttaaagttgatataaagaacaagcaaatatcctttgagggcaaaccaatccctgtttctgttgtttgctcaggcgctatagatgaactgctggagtaccgatacggtcagctcccataccggtcgttaaagtttgattatcagaccaaacatatagacagttttcaggacgcttccgtggttgcccatccgggggcggaaggttatacaaggataacagaatacaaaaagatgcccgcgcaagatgtgcccggactgaccaccgtggtgtatgaatacccgcttccagcggacagagcaaataacaacgaaccgtattatcctataataaactatgacaatgtttcgttatacaacaaataccgttcggatgtagatactatttccagcttgtttttatgcggaaggcttgccgattataaatactataatatggacgcagcggttctgcgggcttttgatataataaaagaaatacggtaa

SEQ ID NO: 49398 - protein, 170 aa, Unknown
  Obtained from environmental sample
  DOMAIN (2)...(152): UDP-galactopyranose mutase
  misc_feature (1)..(170): Xaa is any amino acid
MMLNTDALDMLKVDIKNKQISFEGKPIPVSVVCSGAIDELLEYRYGQLPYRSLKFDYQTKHIDSFQDASVVAHPGAEGYTRITEYKKMPAQDVPGLTTVVYEYPLPADRANNNEPYYPIINYDNVSLYNKYRSDVDTISSLFLCGRLADYKYYNMDAAVLRAFDIIKEIR

SEQ ID NO: 49399 - DNA, 918 bp, Unknown
  Obtained from environmental sample
  misc_feature (1)..(918): n is a, c, g, or t
gtgggaaatgttacgcgctatgcctatgacggcagaggattgcttgtcggagaaacaacagccctgggagaacagcggtattattatgatgacgccggcaggctaatacggctggagaccgttagccgcaacagcggcctataccgtacagattggaattacaatgactctcagcggactgtaactgtaacagccggaggaaaatactatgagatactctaccttgatgcctggggagaagtaataaggcgggcagatggggaaggaaacgaaaggcgctacgagtacgacaaggcgggaaaacttgttaaggcgatagatgggtatggcagggcagcttcatacgcatacaacgagcttgaaaaagtatccgcaatcacttacacagacggagcaaccgaacgctacgaatatgaccatatgggaaatctccgggaaatccgtgatgccattggtgtatcctgggcaggggaatacgaccaggcaggacgcctttccaaagagacagggcggcccggaatagacaaagaatacagatacgatgccataggccgcatagtcgaagttaaaagcggcggggaagtcgtagaacaataccgctacagtaaccgtgggcgcgaagcagtgtttaccgacggggcaggaaaggattttacccagcaaaagaacgcctttggagagcttacaggcgaggtaaaccggctggctgacagccagaggtatacttacgacagcgaggggcgagtaacggcgaacaccgcctattcaggcaagcaaaccaaagtcgaataccgcgatagcgaagggataacaatcaccacatacagtgacgggaagcaaagcgtcattgagcgggatatgctggggaacatagtaagggcgacaaacgactcgtgccgaattctgtcccatgcttaa

SEQ ID NO: 49400 - protein, 305 aa, Unknown
  Obtained from environmental sample
  misc_feature (1)..(305): Xaa is any amino acid
MGNVTRYAYDGRGLLVGETTALGEQRYYYDDAGRLIRLETVSRNSGLYRTDWNYNDSQRTVTVTAGGKYYEILYLDAWGEVIRRADGEGNERRYEYDKAGKLVKAIDGYGRAASYAYNELEKVSAITYTDGATERYEYDHMGNLREIRDAIGVSWAGEYDQAGRLSKETGRPGIDKEYRYDAIGRIVEVKSGGEVVEQYRYSNRGREAVFTDGAGKDFTQQKNAFGELTGEVNRLADSQRYTYDSEGRVTANTAYSGKQTKVEYRDSEGITITTYSDGKQSVIERDMLGNIVRATNDSCRILSHA

SEQ ID NO: 49401 - DNA, 657 bp, Unknown
  Obtained from environmental sample
  misc_feature (1)..(657): n is a, c, g, or t
ttggccgtaatgatccgtgtccctgcggcagcggcaagaagtacaagatgtgccatggcaggtaaaattttcacgttacggactttattaataattttaattacttttttgtttttatcttgtgatcccttcttagatgtaagaaatgataattcaggtaatttctgggcgactaattattcaacaaaaaaaaattatagggtaaaagccgagttgtttgctgaaggtgagcattgtaatgtttgggtggaaagaggcagcggcgtaagtaaagatcaggccaaaagagtcgcttatatatacgacaataaaatccataggttaatgattaacgcctttggaattgaaaatccttcttatgatggcataactttccctgatataatgaaagttgcggattatttgggcgatggggacaaaaaactctgtattcttcttatggatataaaagatgattataaagccggagtaaatgaatcttatgtcgctggttatttttggtctggtaattttattgatatgtcagagtcaaataagtgcgatatgatctatttagatacttatcctggaatgggaattagggataaacatattgaaaatgtgtttatcacgctcgcccatgaaatgcaacatatgataaccctcgtgccgatctga

SEQ ID NO: 49402 - protein, 218 aa, Unknown
  Obtained from environmental sample
  misc_feature (1)..(218): Xaa is any amino acid
MAVMIRVPAAAARSTRCAMAGKIFTLRTLLIILITFLFLSCDPFLDVRNDNSGNFWATNYSTKKNYRVKAELFAEGEHCNVWVERGSGVSKDQAKRVAYIYDNKIHRLMINAFGIENPSYDGITFPDIMKVADYLGDGDKKLCILLMDIKDDYKAGVNESYVAGYFWSGNFIDMSESNKCDMIYLDTYPGMGIRDKHIENVFITLAHEMQHMITLVPI

SEQ ID NO: 49403 - DNA, 957 bp, Unknown
  Obtained from environmental sample
  misc_feature (1)..(957): n is a, c, g, or t
atgcggcttttcggcggcgaaaatatcaagggttttatgtcaaaagtcgggatgagcgagggggagcccatctaccatccctggcttaacaaaagcatcgaaaaagcgcaaacaaaagtcgaagaaagaaactttgaaatccgcaaacaccttcttgaatacgacgacgttctaaaccagcagcgtaagtttatctatgagcaaagggacgcgattctgcaagatacaaatctgaaagaacgggtgaattccgcgaccgatgacatggtaaactcatatattgacacttaccgcgaaaccagccgaaaagatccgcagggcgcactcaaagagctaaccgaaacactcaaattaaaattcaactatattttgaaaacaggcccggaagatataaaaaacatcgacgcttttgagaagcgtattaacgccgagcttaaagaagatatagaaaacaaagaagggattattgggcatgattaccttaatttttttatccgcgatcaatatttaatgatggtggacaaaaaatggctggatcatcttgaaagcatggaaaccctgagagaggcggtatatttaaggagctacgcgcagaagaatccgcttaccgaatacaaggttgaaggtttccagatttttgaatccatgatcgacgatatccggcaggagatagcatcgcgcctccacttgatccgcattcaagttgcggaaggcgctgctcctcgaaggcctgttagcagatccatcggcacgaatcaatcggcaagccacagcagtatgggctcttttgatggggcaagacaaggctcttcttcttcgtcagggggaggctctcctatggataaggcaagccgccctgatggcgcgaccgtagtgcgaagccatcctaaagttggccgtaatgatccgtgtccctgcggcagcggcaagaagtacaagatgtgccatggcaggtaa

SEQ ID NO: 49404 - protein, 318 aa, Unknown
  Obtained from environmental sample
  DOMAIN (300)...(318): SEC-C motif
  misc_feature (1)..(318): Xaa is any amino acid
MRLFGGENIKGFMSKVGMSEGEPIYHPWLNKSIEKAQTKVEERNFEIRKHLLEYDDVLNQQRKFIYEQRDAILQDTNLKERVNSATDDMVNSYIDTYRETSRKDPQGALKELTETLKLKFNYILKTGPEDIKNIDAFEKRINAELKEDIENKEGIIGHDYLNFFIRDQYLMMVDKKWLDHLESMETLREAVYLRSYAQKNPLTEYKVEGFQIFESMIDDIRQEIASRLHLIRIQVAEGAAPRRPVSRSIGTNQSASHSSMGSFDGARQGSSSSSGGGSPMDKASRPDGATVVRSHPKVGRNDPCPCGSGKKYKMCHGR

SEQ ID NO: 49405 - DNA, 1026 bp, Unknown
  Obtained from environmental sample
  misc_feature (1)..(1026): n is a, c, g, or t
ttgaaaaagcgcgcggcttgggatttaagggggtatgacatgtttgaaatgacaagaaaacaatatgcaagtatgtacggtcccacaaccggcgatagaatccgcctcggcgacacatcgatcattatcgaagttgagcgcgacttaactgtctacggagaggaagcgaaattcggcggaggcaaatccctgcgcgacggaatgggtcagtcatgcggagtaaaggacgccgactgtcccgaccttgttattacaaacgccgtaatccttgaccacacgggaataataaaagctgacatcggtattaaagacggcaagatntgcggcataggcaaggcgggaaatcccgacattatggacggcgtaacaaaaggactgacggtcggcgcgtccacggaaattatcgcgggtgagggcatgattgttaccgcgggcggcattgatacccacatacattttatcagccccacccaaatagagaccgcgctgtattcgggagttacgacaatgatcggcggtggaaccgggcccgcggacgggacaaacgccaccacctgcacgcccgggcgctttaacattgaaaaaatgctggaagccgcggaaggttatcctgttaatctcggttttctcggcaagggcaacagttcatcgcctaacgcgcttgccgaacagattgaagcgggagcctgcgggcttaaaattcatgaggactggggatccaccgcggccgttatccgcgcctcgctctacgtcgccgacaggtacgacgttcaggtcgcgattcacacggacacgctgaacgagggcggctttgtcgaggacacgctcgccgcgataggcgaccgcgtcattcacacataccacaccgaaggcgcgggcggcggacacgcgcccgacattatcagggcggccggcctgcctaatattctgccgtcatcgacaaatcccacaatgccgtttacccgtaataccgttgacgaacatcttgatatgctgatggtctgccaccacctgacccggccataa

SEQ ID NO: 49406 - protein, 341 aa, Unknown
  Obtained from environmental sample
  DOMAIN (141)...(341): Amidohydrolase family
  misc_feature (1)..(341): Xaa is any amino acid
MKKRAAWDLRGYDMFEMTRKQYASMYGPTTGDRIRLGDTSIIIEVERDLTVYGEEAKFGGGKSLRDGMGQSCGVKDADCPDLVITNAVILDHTGIIKADIGIKDGKXCGIGKAGNPDIMDGVTKGLTVGASTEIIAGEGMIVTAGGIDTHIHFISPTQIETALYSGVTTMIGGGTGPADGTNATTCTPGRFNIEKMLEAAEGYPVNLGFLGKGNSSSPNALAEQIEAGACGLKIHEDWGSTAAVIRASLYVADRYDVQVAIHTDTLNEGGFVEDTLAAIGDRVIHTYHTEGAGGGHAPDIIRAAGLPNILPSSTNPTMPFTRNTVDEHLDMLMVCHHLTRP

SEQ ID NO: 49407 - DNA, 552 bp, Unknown
  Obtained from environmental sample
  misc_feature (1)..(552): n is a, c, g, or t
ttggaacttgcgcgcgacggtaaatccgttacggaacttatgcgcgcgggaaccaagcttttgggagccgacgacgttttagacggcgttgccgaaatgattcacgaaattcaacttgaggcgactttccccgacggcactaaacttgttaccgtacacgagccgattccctcaaacggaaaggcgcaccccggcgaatttatttttgacggcggaccaatcaccgtaaacgccggaaagaataccgtagagatcaatgtcgtcaacacgggagaccgtcccgttcaaatcggctctcattttcacttttttgaagtcaacaaagcgctggattttgaccgcgccgccgcgttcggtatgcggcttgatattccctccggcactgccgtcaggtttgaaccgggcgacagccagactgtccgacttgtaaaaatcggcggaacgcgtatgggtcatggattgaacagccttaccaacggcagtatggacgacccgaaagtgaaagccgccgccgttgaaaaagcgcgcggcttgggatttaagggggtatga

SEQ ID NO: 49408 - protein, 183 aa, Unknown
  Obtained from environmental sample
  DOMAIN (1)...(56): Urease, gamma subunit
  misc_feature (1)..(183): Xaa is any amino acid
MELARDGKSVTELMRAGTKLLGADDVLDGVAEMIHEIQLEATFPDGTKLVTVHEPIPSNGKAHPGEFIFDGGPITVNAGKNTVEINVVNTGDRPVQIGSHFHFFEVNKALDFDRAAAFGMRLDIPSGTAVRFEPGDSQTVRLVKIGGTRMGHGLNSLTNGSMDDPKVKAAAVEKARGLGFKGV

SEQ ID NO: 49409 - DNA, 765 bp, Unknown
  Obtained from environmental sample
  misc_feature (1)..(765): n is a, c, g, or t
ttgttnnnccaaggatcagatcggccgagacagccgtgtatttgggcagaggcggtgaacgtaatgcttgaactaatcgatcttgacacttactacggcgaaagcaaggtcataagcaaacttaacctttcgataaaaaaaggaagcgttacctgtttaatcggaagaaacggcgtgggcaaaaccacgactctcaaaagcattatgggtcttgtaaaaacccccgcgggaaaaatagttttcgacgggcatgatataattaaacttccggcttatgaccgcgtaagactcggcattggctatgtgccgcaggggcgggatatttttccgcaaatgactgtgcgcgaaaatcttgaattgggattacagcccctcgcggggaaacggcaaaaactcgctgttcccgaatatctttttgaactgttccccaccttgccgaaattcgcaaagcgaaaaggcggcgatttatccggcggccagcagcagcagcttgccattgcccgcgctcttgcggctgaaccaaaaattttaattttggacgaaccgaccgagggtattcagccctcaattattaaggacatcggcagggcgataaggcgaatcaactctgaaaaaggaataaccgttcttcttgtagagcagtatctggaatttgtgctggagatttcagaccatttgttcatcatggaaaagggaaacgtcgtgttaagcggattaaccgccgaacaggacgcggagcatattcaaaaaatattaacaatatag

SEQ ID NO: 49410 - protein, 254 aa, Unknown
  Obtained from environmental sample
  DOMAIN (48)...(232): ABC transporter
  misc_feature (1)..(254): Xaa is any amino acid
MXXQGSDRPRQPCIWAEAVNVMLELIDLDTYYGESKVISKLNLSIKKGSVTCLIGRNGVGKTTTLKSIMGLVKTPAGKIVFDGHDIIKLPAYDRVRLGIGYVPQGRDIFPQMTVRENLELGLQPLAGKRQKLAVPEYLFELFPTLPKFAKRKGGDLSGGQQQQLAIARALAAEPKILILDEPTEGIQPSIIKDIGRAIRRINSEKGITVLLVEQYLEFVLEISDHLFIMEKGNVVLSGLTAEQDAEHIQKILTI

SEQ ID NO: 49411 - DNA, 927 bp, Unknown
  Obtained from environmental sample
  misc_feature (1)..(927): n is a, c, g, or t
ttgaagcgcttaaagtcggtatatgaaaaagattttttaataggcaatatcaccgacggattatatatgtccggaaaacattttgatcttttaaggcaccattataacgcggtaaccttaacaagcacatatccttttgtcctcgcgccatccaaaggcgcttaccggtgggaagcggcggatcaacagatagagctaatgcgcggtaacaatatgtatattcacggccattgccttgtatggcacgagagcgctccaaaatggatgacaaccggaaccagagcggaagttgaaaaaaacgtgaaagaatatatttctacggtgcttacacattttaagggaaaaataccgtcatgggatgtggtaaatgaggcgatgaaggacggcctatccgccgcagaggttaatggagactggaaaaaatgtataaggaattatcaaaatccctggtacgacaagctaggcccggattatgttgaaatttccttccgcgccgcccgcgccgccgacccggatattacgctgtattacaatgactacggccttgaggatccaaacaaggcggaagcggtaaggaaaatgatcaaagatattaacgaccgctataaaaaagaaacaggcggcagccgaaaccttattgacggcataggttcgcaagcccatatgtttgaatttaaaaatctcaatatggacaatgtgcgtttatcttttgataaactcgtcagcctcgggcttgaaatttccataagcgaactggatttgtcgcttatcgcttatgagcgcggcagcggaaaggacacggatatgtcccaggcggatgaaacagcgcaggcaaagtattacgcggaattgtttaaactgtacaaagaatattccagatatataaagcgtgtaaccatgtggggcatggacgacggtaccagttag

SEQ ID NO: 49412 - protein, 308 aa, Unknown
  Obtained from environmental sample
  DOMAIN (3)...(308): Glycosyl hydrolase family 10
  misc_feature (1)..(308): Xaa is any amino acid
MKRLKSVYEKDFLIGNITDGLYMSGKHFDLLRHHYNAVTLTSTYPFVLAPSKGAYRWEAADQQIELMRGNNMYIHGHCLVWHESAPKWMTTGTRAEVEKNVKEYISTVLTHFKGKIPSWDVVNEAMKDGLSAAEVNGDWKKCIRNYQNPWYDKLGPDYVEISFRAARAADPDITLYYNDYGLEDPNKAEAVRKMIKDINDRYKKETGGSRNLIDGIGSQAHMFEFKNLNMDNVRLSFDKLVSLGLEISISELDLSLIAYERGSGKDTDMSQADETAQAKYYAELFKLYKEYSRYIKRVTMWGMDDGTS

SEQ ID NO: 49413 - DNA, 393 bp, Unknown
  Obtained from environmental sample
  misc_feature (1)..(393): n is a, c, g, or t
ttgccaagatcagatggccgagtccccccccgctgcgttttgacattcttgaagaaattgaaaagaaactccccgggcttccccatcgtgcttcacggttcttcctcggtgccgcatgagtatgtgcatatgatagagaagttcggcggcaagctgagcgactccgtgggaatccccgaagaacagctccgcaaggcggcgaaaagcgcggtctgcaagatcaacatcgactccgatggacgcctcgcgatgaccgccattatccgcaaggtgctggtcgaaaaacccgaagagttcgatccccgcaacatcctggggccggcccgcgacgagcttaagaaactctacgcccacaaaaacaagaacgtgcttggttccgcaggacaagcgtaa

SEQ ID NO: 49414 - protein, 130 aa, Unknown
  Obtained from environmental sample
  misc_feature (1)..(130): Xaa is any amino acid
MPRSDGRVPPRCVLTFLKKLKRNSPGFPIVLHGSSSVPHEYVHMIEKFGGKLSDSVGIPEEQLRKAAKSAVCKINIDSDGRLAMTAIIRKVLVEKPEEFDPRNILGPARDELKKLYAHKNKNVLGSAGQA

SEQ ID NO: 49415 - DNA, 1269 bp, Unknown
  Obtained from environmental sample
  misc_feature (1)..(1269): n is a, c, g, or t
atgagtgataataaaaggggcggcacagggatgttgattatgattgcataccggaatatttggcgtaacaaacgacggacatttttttgtattgcggcagtcgggatagcggtgttttttatcgtgctttattcatccatgatagacgggatgatgagaaatattaacgaggtggtgcaaatatacgattttggacacgttaaaattgtttcatcgcagtatgaagcggaaaacgagtatatgcccgtacagtaccctgtatccgatggtaaaagctggaaagaacttgccgcttcgattaaggaaatccccggcgtacgcgcggttttcccccggatttcttctcttgcgacattgcaggaaagcacaaccaaacacgccgtactgtgggggctttcaattaaagacgagatggcggctaatcattttaacctgactgaccgcaatgacggcttgttggaaggacgctggcccgggagcggaacccaggaatgcgcgataggtcgcgtctttgcgcataaatcgggattgtcaataggcgacagaattcctcttaaaacggtgtctgcgcagtattcggataaatactggagtccagtcataacaggaattttcaattttgactatataaaatatgacgagcagtttatcatcgtagatatagagcgtctccagcgtctctttgtactggaagagggaacacagtcccttgtgattttcgccaataatgaaaaagaaagcggcgcgattactgctgcggtacagaacctgcttggacaggacaatgtggtaagcgaatggcgggaccacttctgggtcgcgataatgcaaatggcaacgcctatctacacggttatatttctggtgtttctgattgttgccagtttcctgatcattaacacggtggtaatgatcattcacgagcggataaaggaaatcggcatgatgggctgcctcggtatgacccgcgccgagattgtacaggtgttctttttcgagtccctcttcctcgccgcgttaggcgcgtgtgcgggggttatagtcggtggggctattgccgctatcgggtctgtgtatcctatacgtttgggggatctgtacggaaacaccttcagcgaaatgccgctgggcaacgctattttcctcgggtttactccctttatgcttattcgggcctggcttttgggcgtggttgtcgcttcgcttttcacgctgattccgtcgcttaaaagcgccttcgtggaaccagttgaggcgttacgaagataa

SEQ ID NO: 49416 - protein, 422 aa, Unknown
  Obtained from environmental sample
  DOMAIN (234)...(416): Predicted permease
  misc_feature (1)..(422): Xaa is any amino acid
MSDNKRGGTGMLIMIAYRNIWRNKRRTFFCIAAVGIAVFFIVLYSSMIDGMMRNINEVVQIYDFGHVKIVSSQYEAENEYMPVQYPVSDGKSWKELAASIKEIPGVRAVFPRISSLATLQESTTKHAVLWGLSIKDEMAANHFNLTDRNDGLLEGRWPGSGTQECAIGRVFAHKSGLSIGDRIPLKTVSAQYSDKYWSPVITGIFNFDYIKYDEQFIIVDIERLQRLFVLEEGTQSLVIFANNEKESGAITAAVQNLLGQDNVVSEWRDHFWVAIMQMATPIYTVIFLVFLIVASFLIINTVVMIIHERIKEIGMMGCLGMTRAEIVQVFFFESLFLAALGACAGVIVGGAIAAIGSVYPIRLGDLYGNTFSEMPLGNAIFLGFTPFMLIRAWLLGVVVASLFTLIPSLKSAFVEPVEALRR

SEQ ID NO: 49417 - DNA, 786 bp, Unknown
  Obtained from environmental sample
  misc_feature (1)..(786): n is a, c, g, or t
atgcngggagcggtggctcatgtgaaccagtcattggaagtaaaagtagttggcgtgatcaattctccggctccgctccccaatggcaatacagcatatattccccttgatattttgcaggacgaggctgtaatgatgcttgaaggcgcggtaacggaacttgttatcagggagaagaacgcgcccgcttcccggcttccgggaaagagtgaaagcgccgccgtaattaccgccgcgctggaacgggggcttgccaaagagggatcaattatgccgaatgaactggttgtgcatacctgggaggactatatgcaggactatctgggttacgaagcaatagaaaataccatgccgcaggtggtagccggtctgttactgctgctatccttcctgggaatttcaaacacgatccttcttgccatactggaacgcacaaaagaaacaggcatgatgagggctatgggtatgactgaccaacaattattattggtctatatgctggaggcgggctttttaggatttatcggttcggttttggggataattttgggctgtattatcaattatccaatggtaaagtacggcatagattttagcgccatagctgatattatgggcggcagcggtgttggtttccgcaccacatcatctttccgcagtatgtggaatgtaccggtaattatcggttccggcataatagcgacaactgtctcttcatgtatggctttcttccccacacgcagagcgttaaagatgccgattaccgaaagtttgaggtttgaatag

SEQ ID NO: 49418 - protein, 261 aa, Unknown
  Obtained from environmental sample
  DOMAIN (51)...(254): Predicted permease
  misc_feature (1)..(261): Xaa is any amino acid
MXGAVAHVNQSLEVKVVGVINSPAPLPNGNTAYIPLDILQDEAVMMLEGAVTELVIREKNAPASRLPGKSESAAVITAALERGLAKEGSIMPNELVVHTWEDYMQDYLGYEAIENTMPQVVAGLLLLLSFLGISNTILLAILERTKETGMMRAMGMTDQQLLLVYMLEAGFLGFIGSVLGIILGCIINYPMVKYGIDFSAIADIMGGSGVGFRTTSSFRSMWNVPVIIGSGIIATTVSSCMAFFPTRRALKMPITESLRFE

SEQ ID NO: 49419 - DNA, 339 bp, Unknown
  Obtained from environmental sample
  misc_feature (1)..(339): n is a, c, g, or t
ttgtgggtttacggtttcaggttctatttcactcccctcgcaggggttcttttcgcctttccctcacggtacttctgcgctatcggtcgtatccagtatttagccttggatcgtggtcgacccggattccggcagggtttctcgtgccccgccgtactcaggattctgctgctctactgtcatcatttcaaatacggggctttcaccctctctggcaggctttcccaaaacctttctcctatcatgacagtaaagttatcgcagtccttcaaccccgctctctcgagcggtttaggctcctccgatttcgctcgccgctactttcggaatctcttttga

SEQ ID NO: 49420 - protein, 112 aa, Unknown
  Obtained from environmental sample
  misc_feature (1)..(112): Xaa is any amino acid
MWVYGFRFYFTPLAGVLFAFPSRYFCAIGRIQYLALDRGRPGFRQGFSCPAVLRILLLYCHHFKYGAFTLSGRLSQNLSPIMTVKLSQSFNPALSSGLGSSDFARRYFRNLF

SEQ ID NO: 49421 - DNA, 477 bp, Unknown
  Obtained from environmental sample
  misc_feature (1)..(477): n is a, c, g, or t
gtgggtttacggtttcaggttctatttcactcccctcgcaggggttcttttcgcctttccctcacggtacttctgcgctatcggtcgtatccagtatttagccttggatcgtggtcgacccggattccggcagggtttctcgtgccccgccgtactcaggattctgctgctctactgtcatcatttcaaatacggggctttcaccctctctggcaggctttcccaaaacctttctcctatcatgacagtaaagttatcgcagtccttcaaccccgctctctcgagcggtttaggctcctccgatttcgctcgccgctactttcggaatctcttttgatttcttttcccggggtacttagatggttcagttcccccagtttcgcttccgttaactatttattcatcaacggatacctgaccactaaaatgctcaattttatttgctcatcgctgtttaaagccgtcattacgatttaa

SEQ ID NO: 49422 - protein, 158 aa, Unknown
  Obtained from environmental sample
  misc_feature (1)..(158): Xaa is any amino acid
MGLRFQVLFHSPRRGSFRLSLTVLLRYRSYPVFSLGSWSTRIPAGFLVPRRTQDSAALLSSFQIRGFHPLWQAFPKPFSYHDSKVIAVLQPRSLERFRLLRFRSPLLSESLLISFPGVLRWFSSPSFASVNYLFINGYLTTKMLNFICSSLFKAVITI

SEQ ID NO: 49423 - DNA, 747 bp, Unknown
  Obtained from environmental sample
  misc_feature (1)..(747): n is a, c, g, or t
ttgtggtgtatcgacaggccgtctgatgttttggacgtggcaaaaaattatattgacgcgggagcggacatggtcgagacagatagttttggcggaagcagttttaagttggctcactttaaacttgacggcagggcggcggaaataaatgaagccgcggctaaaatttcccgccaggcggccggggataatcattgggtaatagcgtctattggccccaccgggaaaatgctcgttacggaagaagttacggaagaagaactttacgaggcgtttaagacgcaggcagtcgcttttgaaaaaggcggcgctgatgccgcatgcatcgaaaccatgagcgatatacaggaagcttgtcaggctgttaaggcggttaaggaaaatacaaaattggaaattatctgtacgtttacttttgagaaaactgtgcagggcgagtacagaacgatgatgggggttgatcctgtttcagcaatgaacgcggctatcgaagccggcgcggatattgtcggcgcaaactgcggcaatgggatcgagagaatgatcgaaatcgtaactcagatgagatcggctaacaaaaccattcccattcttgttcacgccaacgccggggcttcccaaaaatgtaaacgggcagactgtgttcccggaaactccggaagatatggcggctatcgcgccaaaacttgccgccgccggagcgaacataatcggcggatgctgcgggactacgccggagcatattaa

SEQ ID NO: 49424 - protein, 248 aa, Unknown
  Obtained from environmental sample
  DOMAIN (2)...(246): Homocysteine S-methyltransferase
  misc_feature (1)..(248): Xaa is any amino acid
MWCIDRPSDVLDVAKNYIDAGADMVETDSFGGSSFKLAHFKLDGRAAEINEAAAKISRQAAGDNHWVIASIGPTGKMLVTEEVTEEELYEAFKTQAVAFEKGGADAACIETMSDIQEACQAVKAVKENTKLEIICTFTFEKTVQGEYRTMMGVDPVSAMNAAIEAGADIVGANCGNGIERMIEIVTQMRSANKTIPILVHANAGASQKCKRADCVPGNSGRYGGYRAKTCRRRSEHNRRMLRDYAGAY

SEQ ID NO: 49425 - DNA, 1608 bp, Unknown
  Obtained from environmental sample
  misc_feature (1)..(1608): n is a, c, g, or t
atggatcagatcggccgagggtacacaaaaagcatggacggaggagagcggtggatgctcacagccgcggacgggcagcccgtttgcacctgggactcaagagggcacaagctgcataccgaatacgatgagctgagaagaccaacaaggcaatggctcaacgaaggcactcttgtcggcgaaaccatatatggcgtgtctgctgctaacaactcaatcggacagccgtggaaaatacatgaccagagcggagtaattgaaaatgtgaagtttgatttcaaaggcaatctcttggaaagcaaacggaaatttacacaagaatataagcaaacgatagactggaatgcaaatcccgcgcttgaaagcgaggaatttgccacaatcactgcctacgatgccctcaacagggcgactagcatatcaaccccgcacaacgacaatgtcccggcaagcgagattatgtccgcctacgacgagggcgggctactaaaaacagtaaaagcaaaactgcgtggctcggcgaatgaaacggatttcgtcacggggatagcatacaacccaaaagggcagagggaacgcataacctacggaaacggggcggcgacgaaatacgagtacgatgaaaacaacttcaggctgacaaggctatttaccactcgcagcaacggcacggatgtattgcaggatttgaactatacttacgaccagattgggaacattgccaaaataacggataacgcacagcagacgatatttttcaacgggcaggtagtaaaccccagccaaaccttcgaatacgatgcactgtacaggctgaccaaggcaacaggaagggagcataccggaaacggagcggacgccgaaccagaagaaaacggataccataacgctcatgcgtccatgccgaacgatgcctccgcactgcgaagctacactaggcagtgggaatacgaccaggtagggaacatcttagagctaatacacaccgcaaacaacgggaactggaaccgtcagtataattacgctgccgcgaataaccgtttgttgtcaaccaccgctggcaatagcactgtaaactatgcttacaaccagcacggctcaatgtcctccatgccgcacctgcaagcgatggaatgggattttatggaaagactctgccacatcacaaaaggaacaacagaagcgtattacagctatgacggaagcgggcagagaacaaggaaagttgtagaaaagaataatgttgttgaggaaaggctgtatctgggtggatttgaaattttcagaaagaaatctggaaatatcttggagttggaaagagaaacgctccatataatggatgatgtaaagagaatagcattggtagaaactctaaccgtgaacaacggaaccgcagccaacagcatcactcaacgataccagttgagcaacaacatagaatccgccgcattggaacttgacgaaacggcaagcataatcagctacgaggaatactacccctacggagataccagttatcaagctggacgctctgctgcagaagtgagccagaaacgataccgatacactggaaggaaaaagacgaggaaagcgggttgtattacatga

SEQ ID NO: 49426 - protein, 535 aa, Unknown
  Obtained from environmental sample
  misc_feature (1)..(535): Xaa is any amino acid
MDQIGRGYTKSMDGGERWMLTAADGQPVCTWDSRGHKLHTEYDELRRPTRQWLNEGTLVGETIYGVSAANNSIGQPWKIHDQSGVIENVKFDFKGNLLESKRKFTQEYKQTIDWNANPALESEEFATITAYDALNRATSISTPHNDNVPASEIMSAYDEGGLLKTVKAKLRGSANETDFVTGIAYNPKGQRERITYGNGAATKYEYDENNFRLTRLFTTRSNGTDVLQDLNYTYDQIGNIAKITDNAQQTIFFNGQVVNPSQTFEYDALYRLTKATGREHTGNGADAEPEENGYHNAHASMPNDASALRSYTRQWEYDQVGNILELIHTANNGNWNRQYNYAAANNRLLSTTAGNSTVNYAYNQHGSMSSMPHLQAMEWDFMERLCHITKGTTEAYYSYDGSGQRTRKVVEKNNVVEERLYLGGFEIFRKKSGNILELERETLHIMDDVKRIALVETLTVNNGTAANSITQRYQLSNNIESAALELDETASIISYEEYYPYGDTSYQAGRSAAEVSQKRYRYTGRKKTRKAGCIT

SEQ ID NO: 49427 - DNA, 870 bp, Unknown
  Obtained from environmental sample
  misc_feature (1)..(870): n is a, c, g, or t
ttgtatatgaagcctttcagcgattacaccgttgaaaccgctgaaaactatatacatattaaaaaggcaaataccgcgccttttggttctttctcattcgccggcgcttcctctgtcagcataattgagaatgacgggcttttcgatgtggatattgaacgcgcaccaacaggcgaagcgcttaacaggctgtttcaggcagccgggcgggaatacctttcctttatacgccccgatcaaatgattgaaaggataaaactgaaaggcaggaattttaatgaaactttaaagatcattctggaacaaggaggaggcgaatacaaagagattggagacatgatttatgtcttcccgctacagcaggctgaaataatcgcctcgctgaaaaatgaggggaaaacctggcaatcttttgaagtgctttatcgaaggccgacagagatattgccgatcattcagagccgctttacaggcgtacaaaccgcttcgctgcctggcagcaatactttcctggcttacgcaaatacggaaacggcggaagatatacggaactatattgcgacaattgacctgcctaagcgtagtgaagccatcaggctaaaatatataaagactgaggatttatacaaattcctgccgcctacagcccaaccggaagatcttgttgacgcgggcaacggtaacaccttcttctttttgggaagtgacgaaaggaaagagttgttccttaaggacctggaagttattgaccggccgcagccgcgcatacgctacgatttgtttatcatacaggtgcaggaaagcagcaacctaactggaacgcccaagccgaagcacggtacatccgcccccgcgacagaacaatggtaa

SEQ ID NO: 49428 - protein, 289 aa, Unknown
  Obtained from environmental sample
  misc_feature (1)..(289): Xaa is any amino acid
MYMKPFSDYTVETAENYIHIKKANTAPFGSFSFAGASSVSIIENDGLFDVDIERAPTGEALNRLFQAAGREYLSFIRPDQMIERIKLKGRNFNETLKIILEQGGGEYKEIGDMIYVFPLQQAEIIASLKNEGKTWQSFEVLYRRPTEILPIIQSRFTGVQTASLPGSNTFLAYANTETAEDIRNYIATIDLPKRSEAIRLKYIKTEDLYKFLPPTAQPEDLVDAGNGNTFFFLGSDERKELFLKDLEVIDRPQPRIRYDLFIIQVQESSNLTGTPKPKHGTSAPATEQW

SEQ ID NO: 49429 - DNA, 672 bp, Unknown
  Obtained from environmental sample
  misc_feature (1)..(672): n is a, c, g, or t
atggtaaccgggcagttgggaaatctgcttaatttgaattttgacattataaccgtgtttggctatcagttcgctgcgaagctgaaccttgccatttctgacaaccaggcaaatgtttttgccgatacaactctttttggcctttcggggcaggaaattaaatttcaaaacacgagtacctaccgataccgcgattccaacatcgatcctgaaacaggcaagccgatttattccggcgttacaagagaaattgtttccggcctggtgcttgaaataaaaggctgggtttccggcgacggaatgatcactaccactgttacggcatcggtatccaagcgtggggcggagctgccttccgccgtcggtaatccgccgcccacatccgagcgggttttaacaacccaggttcgcgcaagatcgggcgaaacggttgtattaagcggcctcaggcagaatgactccaacattatcgaacagcggcttccgctgctttccaaattgccccttctgggctggttctttaagagcaagaacaattcgaccgaagactcgcaaatgataatataccttgtgcctcatgttgattttgccaacgatgagtacaccgtgagcggtctaaagaccgcttcgatttacacccgccttgtggaaccatatctggagggaaaatga

SEQ ID NO: 49430 - protein, 223 aa, Unknown
  Obtained from environmental sample
  DOMAIN (1)...(195): Bacterial type II and III secretion system protein
  misc_feature (1)..(223): Xaa is any amino acid
MVTGQLGNLLNLNFDIITVFGYQFAAKLNLAISDNQANVFADTTLFGLSGQEIKFQNTSTYRYRDSNIDPETGKPIYSGVTREIVSGLVLEIKGWVSGDGMITTTVTASVSKRGAELPSAVGNPPPTSERVLTTQVRARSGETVVLSGLRQNDSNIIEQRLPLLSKLPLLGWFFKSKNNSTEDSQMIIYLVPHVDFANDEYTVSGLKTASIYTRLVEPYLEGK

SEQ ID NO: 49431 - DNA, 678 bp, Unknown
  Obtained from environmental sample
  misc_feature (1)..(678): n is a, c, g, or t
ttgctgggattaactgtttatcattctgtttctatttttataccagaaactggtgatatatttcaaggacttgatgttcttaacgatttgtttggtaaattaatctatgattcattaccaaccggaaatgagtggattgatcatttggatattctggatgcaataagaatatcaccaatcggaaaattaaaaaaattcatggagtattatccgttacggctggaaaattacattaatccgggtattgatatgtcctctgaaaattacattaaagccaaagaaatattggcaaaagtagggtttccacaaggaaccttgcttcctcatgttttaaatcctggttatgtcagattgaatataaacaaagcaagaattgaagatccggtactttataatgttaaaatacagaatgatcaaacaatacagataaaatattcacctgcaaaagaacaaaaggaagcattgtatactatttataatttatacaacaatgacgacaaaataaaaaataatgtcatcattaagttgatggaagaaattgaaaagcgtcaacatttaaaattagtaaaagagtggtgggataatattgaccttggctttgaaattacgtctgttggtaaagtcttagcacatacaaatgcgcaaagatgcgataaaactcttccgtcgctgaactaa

SEQ ID NO: 49432 - protein, 225 aa, Unknown
  Obtained from environmental sample
  misc_feature (1)..(225): Xaa is any amino acid
MLGLTVYHSVSIFIPETGDIFQGLDVLNDLFGKLIYDSLPTGNEWIDHLDILDAIRISPIGKLKKFMEYYPLRLENYINPGIDMSSENYIKAKEILAKVGFPQGTLLPHVLNPGYVRLNINKARIEDPVLYNVKIQNDQTIQIKYSPAKEQKEALYTIYNLYNNDDKIKNNVIIKLMEEIEKRQHLKLVKEWWDNIDLGFEITSVGKVLAHTNAQRCDKTLPSLN

SEQ ID NO: 49433 - DNA, 324 bp, Unknown
  Obtained from environmental sample
  misc_feature (1)..(324): n is a, c, g, or t
atgagaaaatacgggaacaaagaattgagcagggcacaaatggcatataaccggtatgtgataatcgttacgtcgataacggatgtggcttctgagctgatccttgacttgtaccggcagcggtggcagatagagctggcattcaaacggttaaagtcgttgtttaaataccatgagataccggtccatgttgaacagagcgcatgggcatggttttacgggaaattgttgttggcggccctttgtgaaacatgggttaacaaagggcgtttttccccctctgcaggaaagcgagagcgaacaagagtggtccctatggtgtga

SEQ ID NO: 49434 - protein, 107 aa, Unknown
  Obtained from environmental sample
  misc_feature (1)..(107): Xaa is any amino acid
MRKYGNKELSRAQMAYNRYVIIVTSITDVASELILDLYRQRWQIELAFKRLKSLFKYHEIPVHVEQSAWAWFYGKLLLAALCETWVNKGRFSPSAGKRERTRVVPMV

SEQ ID NO: 49435 - DNA, 888 bp, Unknown
  Obtained from environmental sample
  misc_feature (1)..(888): n is a, c, g, or t
ttggagcgccgaaaagccgcttgttatgtcggcgataaggttattcgcgggcagaaaatagccgacggcgcggcttccgggccgatgacagtccccgttcacgcttcgataagcggaatcgtaaaaaaaatcgagccgcgccttcaatcgaataacacgacgggtatgtgcgtaataatcgaagcggaagagaaaaatgataccgaagaatttatgccgcccctcgatccttttacctgctcaaaagaagacgctctcacacggataagggaagcgggcattgtcggtttgggaggagccggttttccgactcatgtaaaactttcgccgccgccgaacaagcacatcgacataatcatcgctaacggcgccgagtgcgagccgtaccttactacagacgaagccgccataattgcgaaatcggatatgctcgttaaagggcttgagatcgtaatgaatattacaggtatcaaacaggcgattatcggaatagaagataataaaaaagagctgatacctcaaattgaaagagagttaagaataaacgaaatcaaagccgatatttccatcgctatgtgcaaaacgctttatcctcagggcggagaaaaaatgctgataacggcgcttacgggacgcgaagttccggcgggcggcttgccgatggacgcaggctgtatcgtgcaaaatgtcggcactcttatcgccattgcggaggcgtttctgctcgggaagcccgtcatcgacagggatttgactgtcagcggaggagcgtgtaacaccccgaaaaatatccgggtcccgataggaactttcattaaagactgccgcccgaattcatggatattgattattcaaaactggataaaattattttcggcggcccgatga

SEQ ID NO: 49436 - protein, 295 aa, Unknown
  Obtained from environmental sample
  DOMAIN (67)...(294): Respiratory-chain NADH dehydrogenase 51 Kd subunit
  misc_feature (1)..(295): Xaa is any amino acid
MERRKAACYVGDKVIRGQKIADGAASGPMTVPVHASISGIVKKIEPRLQSNNTTGMCVIIEAEEKNDTEEFMPPLDPFTCSKEDALTRIREAGIVGLGGAGFPTHVKLSPPPNKHIDIIIANGAECEPYLTTDEAAIIAKSDMLVKGLEIVMNITGIKQAIIGIEDNKKELIPQIERELRINEIKADISIAMCKTLYPQGGEKMLITALTGREVPAGGLPMDAGCIVQNVGTLIAIAEAFLLGKPVIDRDLTVSGGACNTPKNIRVPIGTFIKDCRPNSWILIIQNWIKLFSAAR

SEQ ID NO: 49437 - DNA, 579 bp, Unknown
  Obtained from environmental sample
  misc_feature (1)..(579): n is a, c, g, or t
gtgggcgcagcttttaccgccgatgtcgttacgggagcgacgcccctcggaattatcaaaatgggaggcagcgtcgccgatgtaggaaacgcccttgccgccgcagggctttccgattccgccgaattctggcaaatgataaaagcgcttttcttcgggttcaagggcggaagcatgggggaaactccgatatttttaatacttgcttctttcttctttttgctcgtaacaaaaacaattgattggcgtacgcccgtttttatgattggagccggatttatttccgccctcgccttctggcaggattttaactttgccctgttcagcgttcttacaggcggccttgttttcggcgctgtttttatggcgaccgattatgttacaggccctgtaacaagcaaaggaaaaataattttcggcatcggcgcgggcgttatcgccatgctgatccgaagattcggaatttaccccgaaggcgtatgtttctcgatattgataatgaacgcgctcacgcctttcctgaacaaacttctgcccagaaaatacggttttgtacaaaagaaggaggcggcaaaatga

SEQ ID NO: 49438 - protein, 192 aa, Unknown
  Obtained from environmental sample
  DOMAIN (1)...(185): NQR2, RnfD, RnfE family
  misc_feature (1)..(192): Xaa is any amino acid
MGAAFTADVVTGATPLGIIKMGGSVADVGNALAAAGLSDSAEFWQMIKALFFGFKGGSMGETPIFLILASFFFLLVTKTIDWRTPVFMIGAGFISALAFWQDFNFALFSVLTGGLVFGAVFMATDYVTGPVTSKGKIIFGIGAGVIAMLIRRFGIYPEGVCFSILIMNALTPFLNKLLPRKYGFVQKKEAAK

SEQ ID NO: 49439 - DNA, 555 bp, Unknown
  Obtained from environmental sample
  misc_feature (1)..(555): n is a, c, g, or t
atggcggtgaactttttatatcctgaatatgaagtggcgagaaacaacgacaggtgtatcgtctgccgcgtttgtgaacgccagtgcgcgaacgaggtgcatgaatacctccccgatgtgggcagaatggtttgcgacgacgccaaatgcgtcaactgccaccgttgcgtttcgctctgccccacccgcgcgctgaaaatcgtgcgcagcggcaacgcctataaacaaaatgcgaactggaccagcaggatcattgacgagatctatctgcaggcgggaagcggcggtgtcctgttgtcgagcatggggaaccctgaagactatccggtatacctggacaagatagttctgaacgcttcacaggtcaccaatccctccatagaccccctgcgcgagccgatggagacgaaagtcttcctcggcgcgaaaccccaccgtgtcacacgcgacgggcagggccggattaccaacacgctgccgcccgcaactgtccctgtcatgcccggtgatgttctcggccatgagctacggctcgatcagctacaacgcccatga

SEQ ID NO: 49440 - protein, 184 aa, Unknown
  Obtained from environmental sample
  DOMAIN (43)...(66): 4Fe-4S binding domain
  misc_feature (1)..(184): Xaa is any amino acid
MAVNFLYPEYEVARNNDRCIVCRVCERQCANEVHEYLPDVGRMVCDDAKCVNCHRCVSLCPTRALKIVRSGNAYKQNANWTSRIIDEIYLQAGSGGVLLSSMGNPEDYPVYLDKIVLNASQVTNPSIDPLREPMETKVFLGAKPHRVTRDGQGRITNTLPPATVPVMPGDVLGHELRLDQLQRP

SEQ ID NO: 49441 - DNA, 636 bp, Unknown
  Obtained from environmental sample
  misc_feature (1)..(636): n is a, c, g, or t
atgtcagatggaaaactctccaatgatgaaattgacgcgctgctctccggggcgcttaataattccaatacttccagacctaagaaacctgtgctttcccaggatgaaatcaaccagcttctcacagcgataaatgcaggagaagctgaacctgaagagactgcttcggacagccggaaaataaagatttatgactttaaacgtcccataaaattttttaatgaacataaaataacaatttctagcatattcgaaaccttttgccgtttaacgactgacagtctttcggcccaaatgcggaatatgtgctatcttcacgtttcgtcggtagatgagcttacttacgaggaatttatacgcagcatacctacacccacaactttggcaatagtaaatatgaaccctttaatggggaacgcgctattggaaatcgatcccacaatgaccttctcaattatagacagaatttgcggcggaagcggaaacggaactgaanatcatcatgaactaaccgatatcgaacagcgtattatggaaaaaattattgtcagtatgttggaacatttacgcgcatcctgggcggctttattagacctgcgccctcaatggtacaaagcggtacaaacccgcaattag

SEQ ID NO: 49442 - protein, 211 aa, Unknown
  Obtained from environmental sample
  DOMAIN (64)...(206): Flagellar motor switch protein FliM
  misc_feature (1)..(211): Xaa is any amino acid
MSDGKLSNDEIDALLSGALNNSNTSRPKKPVLSQDEINQLLTAINAGEAEPEETASDSRKIKIYDFKRPIKFFNEHKITISSIFETFCRLTTDSLSAQMRNMCYLHVSSVDELTYEEFIRSIPTPTTLAIVNMNPLMGNALLEIDPTMTFSIIDRICGGSGNGTEXHHELTDIEQRIMEKIIVSMLEHLRASWAALLDLRPQWYKAVQTRN

SEQ ID NO: 49443 - DNA, 759 bp, Unknown
  Obtained from environmental sample
  misc_feature (1)..(759): n is a, c, g, or t
atggtacaaagcggtacaaacccgcaattagtcaagatcgttccccctaatgaaccggttatcttggtaacaatggaaacaaaaacaggcgatgaggaaggagtgataaatatttgtattccctatcttactatcgaaccaattatggaaagattatcaagccggttttggtacggcaattaccggaatatcactccgccggactcatcaaacttgaaattaagggaagatatccctgtccgccttaccgctgaagttttaagccgcgattatcctgtcatagaaatattaaaatggaaagccgatacgcttattctgccgcttagcccgctgagcccggacaattgttatcttaagctgggagacaggcgcgtatggcagtgtcaattattaccggattgtaaagggtttataaaaagaatcaagattatcaattacgctgaaaaaccgtttggaacggagggaatggatatgaaaacagaagaagttaattcacttacagtggatgctatgtcaagcgcgaagataaaaatttccgtggaacttggaaccacattaaaaacagtaaaggaagtcttcgcgatgggagagggaacaattcttgagcttgacaagcttgccggagaacctgtagacgtaaaggccaacggggttctgttcgctcatggggaagtggttgttatcgatgaaaatttcggggtaagaataagcgagatttcggctccagcggattcgtccggccggaaggaatccgcatga

SEQ ID NO: 49444 - protein, 252 aa, Unknown
  Obtained from environmental sample
  DOMAIN (167)...(243): Surface presentation of antigens (SPOA) protein
  misc_feature (1)..(252): Xaa is any amino acid
MVQSGTNPQLVKIVPPNEPVILVTMETKTGDEEGVINICIPYLTIEPIMERLSSRFWYGNYRNITPPDSSNLKLREDIPVRLTAEVLSRDYPVIEILKWKADTLILPLSPLSPDNCYLKLGDRRVWQCQLLPDCKGFIKRIKIINYAEKPFGTEGMDMKTEEVNSLTVDAMSSAKIKISVELGTTLKTVKEVFAMGEGTILELDKLAGEPVDVKANGVLFAHGEVVVIDENFGVRISEISAPADSSGRKESA

SEQ ID NO: 49445 - DNA, 345 bp, Unknown
  Obtained from environmental sample
  misc_feature (1)..(345): n is a, c, g, or t
atggcctccatattaataatagacgacgagcccggaatcaggcgcacttttacatccagccttgaagatgaaaaatacaaagtcttcagcgcggaagacgcgttagccggcattgaaatattaaaaacagaaataatagacattgttttccttgacgtcctgcttccgaaaatgggcggcattgaagctcttgaacaaataaaaaaagaatggcccgccgtggaaatagtcatgatttccggccacgcgaatattgatatggcggtgcgcgccgtaaaactgggggcgtttgaatttctggaaaaaccgtttttcgctgaacaaagttattacaatatgccgtaa

SEQ ID NO: 49446 - protein, 114 aa, Unknown
  Obtained from environmental sample
  DOMAIN (2)...(112): Response regulator receiver domain
  misc_feature (1)..(114): Xaa is any amino acid
MASILIIDDEPGIRRTFTSSLEDEKYKVFSAEDALAGIEILKTEIIDIVFLDVLLPKMGGIEALEQIKKEWPAVEIVMISGHANIDMAVRAVKLGAFEFLEKPFFAEQSYYNMP

SEQ ID NO: 49447 - DNA, 741 bp, Unknown
  Obtained from environmental sample
  misc_feature (1)..(741): n is a, c, g, or t
atggttcaggattttgaaaaatcaagggcggcgctggttaaaagcgaaaaaatttctatatggcagaacatggcgcaacagcttgcgcacgaaattaaaaacccgcttacccccattaaactttccgccgaacgcgtgctgcgccgctggagtaacgaacccgataagatcggagaaattcttgaaagctccatgatggcgattattcaagaaacggaaggactctctaccctgcttaatgaattcagaacattgtcaaagcctatggagccgtctcaaacatggacggacctgcgcgaagctgcggaagaattaataaacgcgtattcgacttcgtacccgcaggttcaattcgacataaaccatgtggaaataggaataaccgtaaaagttgaaaaacaccgcattgcccaaattcttacaaacctgataattaacgcgattgacgcgatgaacggaacaggctcaattgaaattcgcacggatcttgtaaaaaaacgggacgtgctttattgtagaataagcgtaaaagatacaggcaaaggcataggcaaacaagacagccatcttttatttacgccgtactacacgacaaaagaatccggcacaggccttgggcttcctattgttgagcgtattgttaacgatcacggcggcgcgatctggtttgattcggcggaaggcatgggaaccacattttacattgacctgcccgcggaaaaaaatgaggaagaaaaataa

SEQ ID NO: 49448 - protein, 246 aa, Unknown
  Obtained from environmental sample
  DOMAIN (20)...(91): His Kinase A (phosphoacceptor) domain
  misc_feature (1)..(246): Xaa is any amino acid
MVQDFEKSRAALVKSEKISIWQNMAQQLAHEIKNPLTPIKLSAERVLRRWSNEPDKIGEILESSMMAIIQETEGLSTLLNEFRTLSKPMEPSQTWTDLREAAEELINAYSTSYPQVQFDINHVEIGITVKVEKHRIAQILTNLIINAIDAMNGTGSIEIRTDLVKKRDVLYCRISVKDTGKGIGKQDSHLLFTPYYTTKESGTGLGLPIVERIVNDHGGAIWFDSAEGMGTTFYIDLPAEKNEEEK

SEQ ID NO: 49449 - DNA, 852 bp, Unknown
  Obtained from environmental sample
  misc_feature (1)..(852): n is a, c, g, or t
ttgtccggcagtacggatataaaagggcgcggcaattcgacatggtgtatgccgaaaaaaccgtattccctgaaacttgcggaagaaaccacattgctgggtatgccttcccataaaagatggaatttgatggcaaattactctgataaaacgctgctgcggacagaaactgcgttcaggctgggcggtatttttgacaatctcgcgtggactccgcgctcggaacaggttgatctgtttataaacgatcaataccttggggtatatcaattgaccgaggcggttaaaattgacgtaaaccgcgtcaatattgaaaaaataaaaaagtcaaaacccaatggcggttatattctggaaattgacgcgcgaaagggagaggagttcaattttacaacggacgcgggcgtagtgttctgctgttcggatccggataaagatcttgatgcggtaatcaagggagaaaacaggacgctttttgataaaatacgggaagacgttcagaaagcggaagacgttatatattcagaggattttgccgatcctgacacgggttacaggaggtacattgatgttgattcgttcattgactggtatctggtaaatgagattacaaagaacaacgacgccgctttttggttaagcgtttatatgtactatgaccccgtgaaaaaaaggtattgtttagggcctatatgggactttgatatttcgctgggaaatatcaattataacggcaatgataatccagaaggtttttggataaagaactcggcctggatttcacggttatttaaggacccggcttttgccgatcaggttaaatcaaggtggatgaaaagaaaccggaagtag

SEQ ID NO: 49450 - protein, 283 aa, Unknown
  Obtained from environmental sample
  misc_feature (1)..(283): Xaa is any amino acid
MSGSTDIKGRGNSTWCMPKKPYSLKLAEETTLLGMPSHKRWNLMANYSDKTLLRTETAFRLGGIFDNLAWTPRSEQVDLFINDQYLGVYQLTEAVKIDVNRVNIEKIKKSKPNGGYILEIDARKGEEFNFTTDAGVVFCCSDPDKDLDAVIKGENRTLFDKIREDVQKAEDVIYSEDFADPDTGYRRYIDVDSFIDWYLVNEITKNNDAAFWLSVYMYYDPVKKRYCLGPIWDFDISLGNINYNGNDNPEGFWIKNSAWISRLFKDPAFADQVKSRWMKRNRK

SEQ ID NO: 49451 - DNA, 468 bp, Unknown
  Obtained from environmental sample
  misc_feature (1)..(468): n is a, c, g, or t
ttgataacatgcattcaaatgagctgctgccagactgaatacgctaccttatcaccgcaagaaactgaagactttggcgggcggcttgcgaattatctggaaccgggttcggttataaccctgtcagggggattaggcgcaggcaaaacctgcctggtaaagggaattgcccgcgcccttggcgtaaacgaaaacataaccagccccacctacactattatcaacgaatacagcataaccgaagctggccggctcgaaggctgcccactgttccatatcgacgcgtaccgcctgaacggggacgaggattttgcttccaccggcgcgggcgactgtttttccgcgggtggaattacaatcattgaatggagcgagcgtattcctggttccataccaccgggcgcgataagcatagaaatagagatatccggccccgcaagccgggatttttcgtttacggggttttaa

SEQ ID NO: 49452 - protein, 155 aa, Unknown
  Obtained from environmental sample
  DOMAIN (22)...(150): Uncharacterised P-loop hydrolase UPF0079
  misc_feature (1)..(155): Xaa is any amino acid
MITCIQMSCCQTEYATLSPQETEDFGGRLANYLEPGSVITLSGGLGAGKTCLVKGIARALGVNENITSPTYTIINEYSITEAGRLEGCPLFHIDAYRLNGDEDFASTGAGDCFSAGGITIIEWSERIPGSIPPGAISIEIEISGPASRDFSFTGF

SEQ ID NO: 49453 - DNA, 816 bp, Unknown
  Obtained from environmental sample
  misc_feature (1)..(816): n is a, c, g, or t
gtgccaacaaatatgtcaagtttcaacgaattacacgaaaaagattacagcgtgcttgaggtagtgaagcgtaagacggcagaaggcgggcgtgttcttatatacacaagctgggtacggattgacagccaagaaaaattatctcaactgctattgggaaacggttacagagtttctattctcacatccgcagtgccacccaaccggcgcgaggaatgggtagggaaacaggttaagaatggcattcaagtcttaataacaaacccaagtttggttgaaaccggattggacttgaatgactttaccacattgtatttttacaacatcgcatacaatctgtttaccctccgccaatcttcccggagatcatggcgcataaaccaaaaagcgccgaagatagaagtctatttctcctactatgaaggcaccatgcagcacagggctatccgtttaatggcgtccaagctggccgtggcagggatcattgaaggtaactttactgatgaaggtttagccgctatgtccgattgcgccgacatgactacggctctggcgcgcgagcttacccagggcatcaggaacgaggttgaggatttaagcgcggtgtttaagaagatggcaaagtttaagcctgaacccaataaaaaagagggcatacaagaagatactttcttacagaggctccggcagttcaaagatatgctcaaatcatcaagtatgccggacagcgtattgtatcagaagtttgcttctatgcttaaaaccaaaacaagccgttctcctgactttgatctattcgtggaagaagtggcatag

SEQ ID NO: 49454 - protein, 271 aa, Unknown
  Obtained from environmental sample
  misc_feature (1)..(271): Xaa is any amino acid
MPTNMSSFNELHEKDYSVLEVVKRKTAEGGRVLIYTSWVRIDSQEKLSQLLLGNGYRVSILTSAVPPNRREEWVGKQVKNGIQVLITNPSLVETGLDLNDFTTLYFYNIAYNLFTLRQSSRRSWRINQKAPKIEVYFSYYEGTMQHRAIRLMASKLAVAGIIEGNFTDEGLAAMSDCADMTTALARELTQGIRNEVEDLSAVFKKMAKFKPEPNKKEGIQEDTFLQRLRQFKDMLKSSSMPDSVLYQKFASMLKTKTSRSPDFDLFVEEVA

SEQ ID NO: 49455 - DNA, 852 bp, Unknown
  Obtained from environmental sample
  misc_feature (1)..(852): n is a, c, g, or t
ttgataaactccccctctctgacaccaaggcaaaaaaccaccaacgcctcatncatcggaaggctgatggcaaccgttaagatgggttattaccccacggatatggaacacgtcaagtatatagcccggagcattgagttcccgaagggagtaacctctaacctgcttgacccctgctgtggctgcgggattgcgttacaaacgttagcctgtgaacgcgagtgcaatacctacggggtagagcttgacaggcatcgtgcggaagaagcgattacccggctcaaccgggtaggtttcggttcctacttccactcccgcgtcagtcaggaagcgtttcacctaatgcttctcaatccgccgtacttgtccgtgatgaccgaaagcgggaacaatgccagaagcgaaaaacggttcttgatcgattgttacagccaccttatgtacggcggcctgataatatacatcattccatactaccggctgaccgctgatatatgcagggtactgtgtgacaacttcgatgacctaacagtatggaagttcatgggaggcgagttcaagaagtacaggcagatagccgtcatggggctacggtgtaaacggcgtgacggttccaaaatggctcaagagcttgcctcatcggtcatggaaccggataaactgcgggagctttcagaattacccgaaggccgctaccggctttcggaaactgcggtaaaggtgaacacgttcaaaggagcgcaattcaacgtatacgagatggcggagcagttaaaacgctctacgagtttctcaaagctctttgagaaaaataaactggacagcgcctacaaacgcccgcttttgccgtga

SEQ ID NO: 49456 - protein, 283 aa, Unknown
  Obtained from environmental sample
  misc_feature (1)..(283): Xaa is any amino acid
MINSPSLTPRQKTTNASXIGRLMATVKMGYYPTDMEHVKYIARSIEFPKGVTSNLLDPCCGCGIALQTLACERECNTYGVELDRHRAEEAITRLNRVGFGSYFHSRVSQEAFHLMLLNPPYLSVMTESGNNARSEKRFLIDCYSHLMYGGLIIYIIPYYRLTADICRVLCDNFDDLTVWKFMGGEFKKYRQIAVMGLRCKRRDGSKMAQELASSVMEPDKLRELSELPEGRYRLSETAVKVNTFKGAQFNVYEMAEQLKRSTSFSKLFEKNKLDSAYKRPLLP

SEQ ID NO: 49457 - DNA, 1395 bp, Unknown
  Obtained from environmental sample
  misc_feature (1)..(1395): n is a, c, g, or t
ttggccgagcggaaaccgcgcacaattaaagctttctatttaaaagacggcaaaatcattgtgaagggatcgggcaaagagggcaaaggcgatgaggaagcgaaaaaaaccagcgtctaccagatgtactgggattacacggaatcgctttcaggaattaaagcccaccgcgttcttgccattaaccggggcgaacgggaggaagtgttagacgtaaccattgatgttgacggggacaccgcaacgcgaatgctccagcaaaaatacgaattacacaacgattaccataaaaccgccattgaggacggccttaagcggcttttgtcccctgcgctaatccgcgagatacggggggatcagagcgacgccgcggacgatcacggtattggcgtgttcagcgaaaatctgaagaacctgctgctccagcagccgataaagggaacgcgggtattgggtattgaccccggcatccgcaccggaaccaaatgcgcctttcttgacgatacggggaaatatctcgcgagtatagttatctataaccataaagtcgaggaagcgaaaaaagcgcttcttgaaggtatacggctttacgacatacagcttattgctgtgggaaacggaaccggcacccgcgaagttcaggaaatcgtcacctcattaatcgcggataataatcttgaggtattgtataccatagttgatgaagacggggcttcagtatactcggcaagcgacattgcccgcgaggaattccccgatctcgatcttaccatcaggggagccatttccataggccggcgtttacaggacccgctcgctgaattggtaaaaatcgatcccaaatccattggcgtcggactctaccagcacgatgtaaaccagaaaaaactctccgataccctggacgaggttgtctcatcggtggtgaataatgtgggcgtcaaccttaatacagcgagcgcctcgcttttaaaatatgtatcaggaatcaacagctctcttgccaggaaaatcgtcaaataccgcaatgaaaaaggccgtatctgtagcagggcggaacttacctcggttcccggcatggggccaaaaagttatgaacagtgcgccggtttcctgaaaatccccgaaagcgccgagcccttggacaatacctgggttcacccggaaaattacccggtcgcgcgggagatacgcaacgccataatcatgactcagagcgagacctctaccgccacagcgggcattagctccaataccataacaacgctcaaagaaaaatacagcgtaggcgaaaccaccatccgggacattgccgaggaactaaaaaaaccaaaccgcgatccccgcgaaagttacccgaagcccattatgcaaaaaggacgtggtgacatttga

SEQ ID NO: 49458 - protein, 464 aa, Unknown
  Obtained from environmental sample
  misc_feature (1)..(464): Xaa is any amino acid
MAERKPRTIKAFYLKDGKIIVKGSGKEGKGDEEAKKTSVYQMYWDYTESLSGIKAHRVLAINRGEREEVLDVTIDVDGDTATRMLQQKYELHNDYHKTAIEDGLKRLLSPALIREIRGDQSDAADDHGIGVFSENLKNLLLQQPIKGTRVLGIDPGIRTGTKCAFLDDTGKYLASIVIYNHKVEEAKKALLEGIRLYDIQLIAVGNGTGTREVQEIVTSLIADNNLEVLYTIVDEDGASVYSASDIAREEFPDLDLTIRGAISIGRRLQDPLAELVKIDPKSIGVGLYQHDVNQKKLSDTLDEVVSSVVNNVGVNLNTASASLLKYVSGINSSLARKIVKYRNEKGRICSRAELTSVPGMGPKSYEQCAGFLKIPESAEPLDNTWVHPENYPVAREIRNAIIMTQSETSTATAGISSNTITTLKEKYSVGETTIRDIAEELKKPNRDPRESYPKPIMQKGRGDI

SEQ ID NO: 49459 - DNA, 1815 bp, Unknown
  Obtained from environmental sample
  misc_feature (1)..(1815): n is a, c, g, or t
atgctgagtcttcatagcaaaatccgcgatgtctacgctcatccccttgggcgcgacattgttgacaaactgctccttgagatgggaaagccgacatggctcgtcaacaatccccttgtcagcggcatgacactcggtattgtaaaaaaacttttacccaagagcataggctccggcttcttaacaaccgtactcgatcttctgaacaccgaggtcgatacgcccgacaataatcccgttacgtcacatccggcgtggtggaaagaagctgtgttctatcagatttacccgcgcagtttcgggaacaacggcatgtcaggtgtccttcgcgggattttatcaaaactcgactaccttcgaaccctcggcattgacgctgtgtggctcagtcccgtgtacgattccccgaatgacgacaacggttatgacatccgcgactattacaaaatcctgcaggagtacggaaccatggaagacatggacgcgctcatcgccggtttgcacgagcgcggcatgaaacttgtcatggatcttgttgtcaatcacacttcggacgaacacccttggtttcaatcggcattaaatgacgagaactcgccgtaccgcgatttttattttttccgcaaatcaaaagacaagccgcctaacaactggatctcttttttcagcggctccgcgtggaactattatcccaagcaggatgtgtgggcgctccacctgttctcaaaaaagcaaatggacttaaactgggaatgtcccgcgcttcgcgaggagatttacaagatggtgcgctggtggctggaaaaaggcgtggacggtttccggctcgacgtaatcaattacatttccaaaactcccggcctccccgacggcgatccttttatcggcgcgctgatgcagtacgcaggtatcgaacgatatttttacgggccaaaacttaacgagtacctgaaggaacttcgcgccaaagcgtttgatccgtacaaagcgttctccgtcggtgaaacgcccggcataggcatacggggcggacgcctgataacggacgattaccgccgcgaactcaacctgattttttcttttgatcatctggaaacacccggctacacccgcttcgacggccgccgttacagcctgtcctacctaaaacatttttacatgactcacttgaacgccgacctcgggcacggctggagcacgctgttcttcaacaaccacgacaatccgcgcatggtatccaagattgatcccgaggggctgtacaccgtaccgctcgcaaaacttctcgcgttattgcaattgactctgcgcggcactccctttctgttccagggcgacgaagccggcgcctgcaacgttaagtttaaatctattgaagaaatcaccgatgtagaaagcctgggcctttatgccgaactgataaaaaccatgcctgccgacaaagccttcaaaaaaattctaggggggacccgcgatcacgcgcgcgcgcctatcaactgggaagagcatgaacgccagcgcggcgcggcggactctgtgtggtatttctacagcgatcttatcgtcatgcgccgctcatcgcaggcgttgatttacggcgatttggaattcctgcgtccgcgtgacaagaacttattatgttacattcgccgttcaaagagtgaatgtttttatattgaggcgaaccttactccgaagaagcgcaaaagcaaggcaaagcgcggcgctgttccgctgtttgggaattacggcaagacagcggacaaggtactgcggccttacgaagcaagggtttattctgtgccgctgaaataa

SEQ ID NO: 49460 - protein, 604 aa, Unknown
  Obtained from environmental sample
  DOMAIN (94)...(495): Alpha amylase, catalytic domain
  misc_feature (1)..(604): Xaa is any amino acid
MLSLHSKIRDVYAHPLGRDIVDKLLLEMGKPTWLVNNPLVSGMTLGIVKKLLPKSIGSGFLTTVLDLLNTEVDTPDNNPVTSHPAWWKEAVFYQIYPRSFGNNGMSGVLRGILSKLDYLRTLGIDAVWLSPVYDSPNDDNGYDIRDYYKILQEYGTMEDMDALIAGLHERGMKLVMDLVVNHTSDEHPWFQSALNDENSPYRDFYFFRKSKDKPPNNWISFFSGSAWNYYPKQDVWALHLFSKKQMDLNWECPALREEIYKMVRWWLEKGVDGFRLDVINYISKTPGLPDGDPFIGALMQYAGIERYFYGPKLNEYLKELRAKAFDPYKAFSVGETPGIGIRGGRLITDDYRRELNLIFSFDHLETPGYTRFDGRRYSLSYLKHFYMTHLNADLGHGWSTLFFNNHDNPRMVSKIDPEGLYTVPLAKLLALLQLTLRGTPFLFQGDEAGACNVKFKSIEEITDVESLGLYAELIKTMPADKAFKKILGGTRDHARAPINWEEHERQRGAADSVWYFYSDLIVMRRSSQALIYGDLEFLRPRDKNLLCYIRRSKSECFYIEANLTPKKRKSKAKRGAVPLFGNYGKTADKVLRPYEARVYSVPLK

SEQ ID NO: 49461 - DNA, 390 bp, Unknown
  Obtained from environmental sample
  misc_feature (1)..(390): n is a, c, g, or t
atgactaaagaccattttactcttgatactaatgcagttattttccttacaacaaaggggaacgtgattccttccgagcttgaaaaagaactggatgaagcggatttattcatcagcgtcattacggaaattgaattattttccaagccgggattaccacccgttgaagaaagaaatctacgcgcttttttgtctgataggatttttataattgacatcactaacgaaataaaaaaggaaacaatttcctttcgccgtacagtaaaacataaactacctgattgtattgttgcggcaacagccatagttcttaacaacacattgctgacggcggatgagaaactacttcatctaaaatggcaaggtttcaatgtaagaaatattatgtga

SEQ ID NO: 49462 - protein, 129 aa, Unknown
  Obtained from environmental sample
  DOMAIN (6)...(128): PIN domain
  misc_feature (1)..(129): Xaa is any amino acid
MTKDHFTLDTNAVIFLTTKGNVIPSELEKELDEADLFISVITEIELFSKPGLPPVEERNLRAFLSDRIFIIDITNEIKKETISFRRTVKHKLPDCIVAATAIVLNNTLLTADEKLLHLKWQGFNVRNIM

SEQ ID NO: 49463 - DNA, 966 bp, Unknown
  Obtained from environmental sample
  misc_feature (1)..(966): n is a, c, g, or t
atggcgctaagcgttacccgcgccttgaacgaccgtgggattttggtcgccgaggcgggaaccggaacgggaaaatcgctggcctatttggtccccgccgccctccacgcgttaaagaataattgccgcgtgatagtctccacgcatacccgcaacctgcaagaccagctcataaccaaagacctccccggcgtcgcggcgctctgcggaggaaaattgcgctactctaagcttaaggggcgcggcaactatctctgccgcaatcgtttttataagatgctgaagggcgaaatcggaaacttctcgcaacgcgagcgcaacgccgctctgccgcttatcgtctggtcgcagtacacggagagcggcgacgtggaggagcaaaccttcttcagccccaagtggttcttcaaggtgtggaacctgatctccgccgacagcatggaatgttccggacgcaggtgcccctactttgccacgtgcttcctgcagaaggcgcgccagctcgcccagtcttcgcatatcgtcgtgataaatcacgccctcttctattccgacgtgtgctccgaagcctcgtttttgggcgccgccggatccatcatcttcgacgaggcgcaccacttggagtcgagcgggcaccagcacctgcgcaccgagctggacacgaaccgcgtgacggcgtttatagacaggctgcagaacgtgctgcatatagcgccgaaacttcaggcgttcgttaacgcggacgagtttgagaaagagatgaaacggcacctgaaacatataagaaagtgctctcangatatgatgtccgaggttgacattgggcgtcgtttgccgttccgggaaccgcggcggagtaccaaatcactgtcaacgaggattcgttcggccggatgctcacgccggccgtcttcgacattgcgctgggcggtttgcaagacaccttccacgaattcaggcagataa

SEQ ID NO: 49464 - protein, 321 aa, Unknown
  Obtained from environmental sample
  misc_feature (1)..(321): Xaa is any amino acid
MALSVTRALNDRGILVAEAGTGTGKSLAYLVPAALHALKNNCRVIVSTHTRNLQDQLITKDLPGVAALCGGKLRYSKLKGRGNYLCRNRFYKMLKGEIGNFSQRERNAALPLIVWSQYTESGDVEEQTFFSPKWFFKVWNLISADSMECSGRRCPYFATCFLQKARQLAQSSHIVVINHALFYSDVCSEASFLGAAGSIIFDEAHHLESSGHQHLRTELDTNRVTAFIDRLQNVLHIAPKLQAFVNADEFEKEMKRHLKHIRKCSXDMMSEVDIGRRLPFREPRRSTKSLSTRIRSAGCSRRPSSTLRWAVCKTPSTNSGR

SEQ ID NO: 49465 - DNA, 825 bp, Unknown
  Obtained from environmental sample
  misc_feature (1)..(825): n is a, c, g, or t
ttgcgctatctggaaattaatgaacttaataaacttgacgcttttaacaacatattcagccaatgcccgatggccgggtttaacacttacggagaagaactctttacccaccacaaccaaacattgactgccgttttttttgggacgctgccggaaaagggaacggtagacccctacaaagccaaacggcttttccattatacggacagcaaacttaaatctttggtttttgacattgtaagccgcagtgaattattgaacataacaatttcctacctcaagggaagcatggacacggaatccgcagacttgcaaaactacgaagccatcagaaaaagtcttggggcaatgatcgagcaatcgaatgtttccaaagaagatattgaacgcctgcttgtcgtttaccagaacaatgtggaagagacaggagaatatgtctttaacatcgtagatgaaatcagaaatcaaaaccgcagtctgattgaattaaaagatgaggcggaaatggcaaaccgtaccaaaagcaatttccttgcaagcatgagccacgagattcgcacccccatgaacgcaattacaggcatggcggaactgctgttacgatgcgatcttcccgatgaagcaagaggttacgcccaggacatcagacaggcgggcaataatcttatttccatcattaacgatattctggatttttccaaaatcgaggccggcaagctagaaataatacccgttaaatacctgctttcatcattgatcaatgactcggtaaatattatccgtatgcggatcggggaaaaaccgctccgcttttattcaacatag

SEQ ID NO: 49466 - protein, 274 aa, Unknown
  Obtained from environmental sample
  DOMAIN (173)...(238): His Kinase A (phosphoacceptor) domain
  misc_feature (1)..(274): Xaa is any amino acid
MRYLEINELNKLDAFNNIFSQCPMAGFNTYGEELFTHHNQTLTAVFFGTLPEKGTVDPYKAKRLFHYTDSKLKSLVFDIVSRSELLNITISYLKGSMDTESADLQNYEAIRKSLGAMIEQSNVSKEDIERLLVVYQNNVEETGEYVFNIVDEIRNQNRSLIELKDEAEMANRTKSNFLASMSHEIRTPMNAITGMAELLLRCDLPDEARGYAQDIRQAGNNLISIINDILDFSKIEAGKLEIIPVKYLLSSLINDSVNIIRMRIGEKPLRFYST

SEQ ID NO: 49467 - DNA, 669 bp, Unknown
  Obtained from environmental sample
  misc_feature (1)..(669): n is a, c, g, or t
atggaaaataacgaaaattatgacattataaaaaattcattatcaggccctataaaagaaatactcacagatatagctgatatgggtttagatcaacttattgagacaataaagaaagaacaaaatttactaaaagatattcctgttataaaatggcttcttatagggaatgatgttaggactattattcaaagtgcttttttcattaagaaatatgccaattttataggaccaataaatgaagcaatgaaagatgattttgaaaatgatgcaaaattattaaatatattttcaaataaaaaaatatacacaaaaataattgatcaaacaattatttcattggacaggtatcaaacaatacaaaaggcaaggatactaagtttattatttgttgaaacatttaaaaataataatttttctttagaggaatataacacattaattttcagcattgaatttattcatccctctataggtgttaaatgtctaaaatcgttttatgattataaaaatgaaatgagtaatgaagaagacaaggaaaagaaagatgctatttggatgaaaaatagctcattagattattcaccattggcaaacacaggtttattaatattaccagacggaggtatgtatgctggtaattacggcggagcgtttattaaaaattag

SEQ ID NO: 49468 - protein, 222 aa, Unknown
  Obtained from environmental sample
  misc_feature (1)..(222): Xaa is any amino acid
MENNENYDIIKNSLSGPIKEILTDIADMGLDQLIETIKKEQNLLKDIPVIKWLLIGNDVRTIIQSAFFIKKYANFIGPINEAMKDDFENDAKLLNIFSNKKIYTKIIDQTIISLDRYQTIQKARILSLLFVETFKNNNFSLEEYNTLIFSIEFIHPSIGVKCLKSFYDYKNEMSNEEDKEKKDAIWMKNSSLDYSPLANTGLLILPDGGMYAGNYGGAFIKN

SEQ ID NO: 49469 - DNA, 318 bp, Unknown
  Obtained from environmental sample
  misc_feature (1)..(318): n is a, c, g, or t
atgggagaacaaaaaatgagcgtttacgaaagcatttatgcaggcttaaccgaaagcatagactatcagcagggcaaaatccccgcccgaaaaaccaaactgaccataaaacccgtagccgttttcacaccgaagacattcaaacggatacgtcaaaaaacaggtttaagccaggtagtttttgctggctcattaggcgtctcccccaaaacagtagaagcatgggaaaatggccgtatcaagccggaaggagcctcacgccgtctgcttgaaatagtccgggacgaccctgggtttttgagacggtttcaggcttga

SEQ ID NO: 49470 - protein, 105 aa, Unknown
  Obtained from environmental sample
  misc_feature (1)..(105): Xaa is any amino acid
MGEQKMSVYESIYAGLTESIDYQQGKIPARKTKLTIKPVAVFTPKTFKRIRQKTGLSQVVFAGSLGVSPKTVEAWENGRIKPEGASRRLLEIVRDDPGFLRRFQA

SEQ ID NO: 49471 - DNA, 309 bp, Unknown
  Obtained from environmental sample
  misc_feature (1)..(309): n is a, c, g, or t
ttggtgatgctctatctgcaatcaaattatgctcaaaatatccagttaaaggatttagcttctaccgcaaattgtcatcacacacatgtcatccgttgcttcaacaaagaatatcacactacccctggaaaagctcttgcaaacataaggattgaagaagcaaagcgtttgctgacaagtacagatctaccatgtgagagaatcgctgaacttgtaggctttacttcttcttcatactttagcaaggtttttaaggagcaaacgcagatgtccccccaaggttatcggaaacaaataatacatgcctaa

SEQ ID NO: 49472 - protein, 102 aa, Unknown
  Obtained from environmental sample
  DOMAIN (1)...(47): Bacterial regulatory helix-turn-helix proteins, AraC family
  misc_feature (1)..(102): Xaa is any amino acid
MVMLYLQSNYAQNIQLKDLASTANCHHTHVIRCFNKEYHTTPGKALANIRIEEAKRLLTSTDLPCERIAELVGFTSSSYFSKVFKEQTQMSPQGYRKQIIHA

SEQ ID NO: 49473 - DNA, 612 bp, Unknown
  Obtained from environmental sample
  misc_feature (1)..(612): n is a, c, g, or t
atgaatataaatgaaggcgcattttaccccgctgcggtaatttttgatatggacggtcttatgttggataccgaaaggctgtcaattcctctttgggcggaagccggcagtatatttggatatattattactgaagaaattgttcttcgcatggttgggataagcagtcaaaaaacccgcggacttttactcgatgaattcggttctgattttccttatgacagcgtttgtgaaaagttcagatttcttgtaaaaaaggaaatagagaaaaacggagttccgaaaaagtacgggcttatcgaattgcttgatcgccttgcctcggcaaaaattccgctcgcggttgcgacttctacgcgcagggctacggctctcgaaatgctgggtaaagcggacatactggacaggttcggcgcagttatctgcggcgatgatgttgctaacggcaaaccggcgccggatatttttcttcttgcggcggaaaaactcggaatttctccctctgcctgcgccggttttgaagattctcctgccgggcttaaaggactacattccgcaggaatacgttcaatttttatcaaggatgttattgaaccgccgcaggatttctga

SEQ ID NO: 49474 - protein, 203 aa, Unknown
  Obtained from environmental sample
  DOMAIN (10)...(196): haloacid dehalogenase-like hydrolase
  misc_feature (1)..(203): Xaa is any amino acid
MNINEGAFYPAAVIFDMDGLMLDTERLSIPLWAEAGSIFGYIITEEIVLRMVGISSQKTRGLLLDEFGSDFPYDSVCEKFRFLVKKEIEKNGVPKKYGLIELLDRLASAKIPLAVATSTRRATALEMLGKADILDRFGAVICGDDVANGKPAPDIFLLAAEKLGISPSACAGFEDSPAGLKGLHSAGIRSIFIKDVIEPPQDF

SEQ ID NO: 49475 - DNA, 780 bp, Unknown
  Obtained from environmental sample
  misc_feature (1)..(780): n is a, c, g, or t
gtgtgcggttacagcatagaaaaatgtattcatgaatttggttcttcgtatgccgatgcagaagggcttattcccggccttttggtattaaaactttttctggaacgcacaggagctgccaatgtcgccgttccgtatgttacgattagggacggctatcttgtcgatttggcatcaggcgttgatgcctctctgcaggatgactttttttctcaaattatcgcttccgccgtaaatcttggacggaaatttcattttgatgaagcgcatagccgctatgtcgcaagatgctgcatgacgttatttgacgctctggcaaaggaacacggtatgaaccgacggcaccgcataatgctggaaattgccgccatacttcatgatataggaacttatataaaaacatcgggacatcaaaagcacggacagtacatcgtcgccaattcggaaatattcggactgcacaatgatgagcttaacattatagcaaacgtgattaattaccacagaggcgatcctccgtcccagtcggatattgaatacgttaaacttcagcgcgaagaacgcgttcttgtgctgaaaatggcttctattttaagagttgcggacgctcttgatcgcggccattcgcagcaaataaaaaatattaccgtagaacgccgaagggaaacgatggttcttcatgtagacagaacatacgatctttctcttgaattaatgggtatagaagaaaagggaggaatgtttcaggatgttttcgggtacaaggttattattggttag

SEQ ID NO: 49476 - protein, 259 aa, Unknown
  Obtained from environmental sample
  DOMAIN (87)...(207): HD domain
  misc_feature (1)..(259): Xaa is any amino acid
MCGYSIEKCIHEFGSSYADAEGLIPGLLVLKLFLERTGAANVAVPYVTIRDGYLVDLASGVDASLQDDFFSQIIASAVNLGRKFHFDEAHSRYVARCCMTLFDALAKEHGMNRRHRIMLEIAAILHDIGTYIKTSGHQKHGQYIVANSEIFGLHNDELNIIANVINYHRGDPPSQSDIEYVKLQREERVLVLKMASILRVADALDRGHSQQIKNITVERRRETMVLHVDRTYDLSLELMGIEEKGGMFQDVFGYKVIIG

SEQ ID NO: 49477 - DNA, 933 bp, Unknown
  Obtained from environmental sample
  misc_feature (1)..(933): n is a, c, g, or t
atgaaggccgtggaaatggggcgggaagaaaagatagattttctgctggcagtcggcggcgggtctgtggccgatgggaccaagctcatcgctgccgcaattccgttcgagggagacccttgggacattgtcaggggcaaggcaaaaccggccagcgcagtgcctttcggctgcgtgttgaccctcccggccacggggtcggagatgaactgcggtgccgtcataactcgcagagaaacaaaggaaaagttgtcgttccgtcacccatccgtgtatccaaaattttcggtgcttgacccagaatttacgtactctctgccgccaaagcaagttgcaaacggcatcgtggacacattcgtccatgttgcggagcagtatttgacgcttcccgccaacgcagcgatccaagacaggttttccgaggggatttttcgggttctgctggaagagggccccaagaccttggccaaccccaccgactacaattctagggcgaaccttatgtgggcggcaacgatgggactaaacggactcattgggtgcggcgtgccgcaggattgggccacgcactggattggccacgagctgacggcattttttggcttggatcatgcgcagacccttgccgtggtgctgcccaacctgctttggtctctgcgcgaccccaaaaggcagaagctgctccaatacgctaggcgagtgtggggcatccacgatggcaacgacgatgaggcgatagaacgcgctattgtcagcactagggcattttttgaacacctgggcctgcccacgcacctagcggaattgggcatcacaacggactgctcggaagaaatgatagtgcgattccaagcaagggggatgttacccatgggcgaatcgaaatccctcgatgaaattaaaatcaaggaaatcctgcgggcggcgctttga

SEQ ID NO: 49478 - protein, 310 aa, Unknown
  Obtained from environmental sample
  DOMAIN (1)...(300): Iron-containing alcohol dehydrogenase
  misc_feature (1)..(310): Xaa is any amino acid
MKAVEMGREEKIDFLLAVGGGSVADGTKLIAAAIPFEGDPWDIVRGKAKPASAVPFGCVLTLPATGSEMNCGAVITRRETKEKLSFRHPSVYPKFSVLDPEFTYSLPPKQVANGIVDTFVHVAEQYLTLPANAAIQDRFSEGIFRVLLEEGPKTLANPTDYNSRANLMWAATMGLNGLIGCGVPQDWATHWIGHELTAFFGLDHAQTLAVVLPNLLWSLRDPKRQKLLQYARRVWGIHDGNDDEAIERAIVSTRAFFEHLGLPTHLAELGITTDCSEEMIVRFQARGMLPMGESKSLDEIKIKEILRAAL

SEQ ID NO: 49479 - DNA, 1341 bp, Unknown
  Obtained from environmental sample
  misc_feature (1)..(1341): n is a, c, g, or t
atgaagtttaaaataccgggaatttcttcaaaaggtctcctgtatatgcaactgctgtttacctctttcgcgtttttattaatggtcgtattaagcattatcttcacaagcagaatagtgcgggcgaacctgctgcgtaatgttgaaagcgtgcttaactccgtggaatcccaaatcaactccgatcttttggaatcacacatcatactggatgaatacgcgcaatccatacaatatttaattttacatggggcaagcgcctcggatttacgcgcttataacgcttatatatcaaatcatttgcttttaaagaaaatagacactttaagtgcgagcggcccttacggctatatcgaagcgcttacgggtgggccgttttttcttatcggtattgactgggaacagcctgaaaattttttacccgaggaccgtccctggtacaaagccgccctggaagccgacggcgaaatagcggaaacggagccgtatacggacgcgataaccggtgaaaccgtaataacgaacgcccactgtatttttgacgaggacggaaaccgtttaggcgtcgccgccattaatataagagcgggacatatcggggaaagagtcgcccataccgcccttgccaaaggcggtttcggagtattgatcactcaggatttaacggtaatcgggcacatgaatccggattttgtcggattaaaaatgaatgacccggcaatccccctttcatttttaactgacgaattggtaaaaacgggaaaagtaacaggcgccgagtgggttaactggaggggcgaaacggtcgtcggttttttcaagacgctttccaacggatggcgtttaggccttttggcgccccagaatatttattataaacccgtatatgatatggcgctgaccctcagcatacttggcattgcccttgcggcggtgctgataatattactgattcgcgttgacgcggcaaaaaacaaatcagataccgagaacaggcataagagcgtgttccttgccaacatgagccacgagatacgcacgcctatgaacgcgataatcggcatgaccacgataggaaaatccgcctctgatattgaacacaaagattactcctttacgaaaatagaagaagccgcgcaccacttgctcggagtaataaacgatattctggatatatctaaaatagaagcaaataagcttgaactttctccggttgaatttaatctggaggaaatattccggcaggtggtgaatgtgattaatttccgcatagatgaaaaacatcagaaattcacggcacagatagacccttcaattccccggactctcggccgaatctga

SEQ ID NO: 49480 - protein, 446 aa, Unknown
  Obtained from environmental sample
  DOMAIN (160)...(239): Cache domain
  misc_feature (1)..(446): Xaa is any amino acid
MKFKIPGISSKGLLYMQLLFTSFAFLLMVVLSIIFTSRIVRANLLRNVESVLNSVESQINSDLLESHIILDEYAQSIQYLILHGASASDLRAYNAYISNHLLLKKIDTLSASGPYGYIEALTGGPFFLIGIDWEQPENFLPEDRPWYKAALEADGEIAETEPYTDAITGETVITNAHCIFDEDGNRLGVAAINIRAGHIGERVAHTALAKGGFGVLITQDLTVIGHMNPDFVGLKMNDPAIPLSFLTDELVKTGKVTGAEWVNWRGETVVGFFKTLSNGWRLGLLAPQNIYYKPVYDMALTLSILGIALAAVLIILLIRVDAAKNKSDTENRHKSVFLANMSHEIRTPMNAIIGMTTIGKSASDIEHKDYSFTKIEEAAHHLLGVINDILDISKIEANKLELSPVEFNLEEIFRQVVNVINFRIDEKHQKFTAQIDPSIPRTLGRI

SEQ ID NO: 49481 - DNA, 348 bp, Unknown
  Obtained from environmental sample
  misc_feature (1)..(348): n is a, c, g, or t
ttgatggccgggcccggtttgacctacatgatggagatagactgcgccgaaaacggcgtggaagccgtccgcctgtttacagaagcccccgacaaatacgaattgattttcatggacatacaaatgcccgaaatggacggctacgaagcgacacggcatattcggtcactggataaccctaaggctaaaaccgttccaataatcgcgatgaccgctaacgtatttaaggaggacattgaaaaatgtctcgccgccggtatgaacggacatatcggcaaaccgatggatttcgaggaagtaataaaaattcttcgctcatatttggggttgaaaaaagatgaagtttaa

SEQ ID NO: 49482 - protein, 115 aa, Unknown
  Obtained from environmental sample
  DOMAIN (6)...(105): Response regulator receiver domain
  misc_feature (1)..(115): Xaa is any amino acid
MMAGPGLTYMMEIDCAENGVEAVRLFTEAPDKYELIFMDIQMPEMDGYEATRHIRSLDNPKAKTVPIIAMTANVFKEDIEKCLAAGMNGHIGKPMDFEEVIKILRSYLGLKKDEV

SEQ ID NO: 49483 - DNA, 354 bp, Unknown
  Obtained from environmental sample
  misc_feature (1)..(354): n is a, c, g, or t
atgcaggagggaattatctcccttatgcagatggcaaaaacttccggcgctgtcgcgaaacacacgaacgccggccagctttacatttccgtaatcacagacccgacgacgggcggcgttaccgcgtccttcgccatgcttggagacataatcctcgcggagccgggcgtcacgctggggtttgcgggcaagcgcgtaattcaggacaccataggcgcggtattgcccgaccgtttccaaacttccgagtttgttcacgaacacggatttgtggacgccgtttatcaccgccgcgatttgccggacatgatcgcgaaaattatcgccctgcacggctataaaggaggacaatga

SEQ ID NO: 49484 - protein, 117 aa, Unknown
  Obtained from environmental sample
  misc_feature (1)..(117): Xaa is any amino acid
MQEGIISLMQMAKTSGAVAKHTNAGQLYISVITDPTTGGVTASFAMLGDIILAEPGVTLGFAGKRVIQDTIGAVLPDRFQTSEFVHEHGFVDAVYHRRDLPDMIAKIIALHGYKGGQ

SEQ ID NO: 49485 - DNA, 807 bp, Unknown
  Obtained from environmental sample
  misc_feature (1)..(807): n is a, c, g, or t
atgatggctttgaacatgcagcaaaaactcgaccttttaaaaaacctcgggcggcccaccatacgcgattacatacctcttgttttcaaggatttcattgaactgcacggcgaccgctatttcagcgacgatccggcgcttttgggcggcatttgtttgttaaacggagttcccgtaacggttgtatctcaggtgcgcgcgaaggatattgccgaattgcaaagaattaacttttccatgcctcatcccgaaggataccgcaaagcgctgcgcctcgcgaaacaggctgaaaaattccgccgccccgttatctgctttattgacactccgggcgcttactgcggcgtcggcgcggaagagaggggccagggggaggcgattgcgcgtaaccttcacgagttcatgatgttaaagactccggtaatttccgtcgtgttgggagaaggcggctccggcggagcgcttgctctcggcgtatgcgacgagcttgccatgcttgaaaacgctctctactcggttatatcgcccaaaggcttcgcttccattttatggaaagacggctccagggaaagggaagccgccgagcttatgaagattaccgcggaagacctaaaacgtttcggcgtctgcgatcacatcatcgccgagccggacggcggagcggcgaaagacataagccttaccgcgcggaacatagcctcgtggctgggagataccgtaaacaaattaacaaaagaggattacaacaccctccccgaaaaacgctaccaaaagttccgtaagataggcgtgtttaccggaggataa

SEQ ID NO: 49486 - protein, 268 aa, Unknown
  Obtained from environmental sample
  DOMAIN (2)...(97): Acetyl co-enzyme A carboxylase carboxyltransferase alpha subunit
  misc_feature (1)..(268): Xaa is any amino acid
MMALNMQQKLDLLKNLGRPTIRDYIPLVFKDFIELHGDRYFSDDPALLGGICLLNGVPVTVVSQVRAKDIAELQRINFSMPHPEGYRKALRLAKQAEKFRRPVICFIDTPGAYCGVGAEERGQGEAIARNLHEFMMLKTPVISVVLGEGGSGGALALGVCDELAMLENALYSVISPKGFASILWKDGSREREAAELMKITAEDLKRFGVCDHIIAEPDGGAAKDISLTARNIASWLGDTVNKLTKEDYNTLPEKRYQKFRKIGVFTGG

SEQ ID NO: 49487 - DNA, 1347 bp, Unknown
  Obtained from environmental sample
  misc_feature (1)..(1347): n is a, c, g, or t
ttggcaatcatgaacaataacgatcctattttatggaagttcctcatactcgttgtactcattttcgcgagcgctttttttacgctggcagagatagccctaatttcgcttaataaaaacaagctggaaaaacaatccctctctggcaaccgtaaggcaaaacgtattatgtccttaaccggcaacccgtcaaaattccttgccacaaaccaggtaggaactaccttgaccaactttatggccagcgctttcgcagcagatactttttcaggcagatttaccagctggcttgtttctcatggcgtaaaaattccttataacgttctttcgtccgtttctctggtatcaattaccctaattctttcttatttttccatcgtgctaagcgagctgctcccaaaacgcatagcgttgaaaaaggccgatgtccttgcatttccgctctccggatcggttttatttttctcccgtattttcgctccggttgtgtggcttcttaccaaatcaaccaacggcattttaaggctcataggtatcgatcccaaaacagacgcccactccgttactgaggaagaaatcagattgatgatagatgtcggcagcgccaggggaaccataagggccggagaaaaagaaattctccataacgtttttgaatttgacgataaaaccgccggtgaggtaatgacccaccgtcgggatacagttctgctaaaattagaagacagcgacgaagagtgggaaaaagcgatcatcgaaagccggcacaatttctttcccgtgtgcggtaaaaaccaggatgatattgcgggggttttggtgttcagggattatctctgcctaagcgatcacagccgcgaaacggtcatggccaaggctgtcaggcccgcacagtttgtccctatcacggtaagaacccacacgctttttgcaaggatgaaaaaaagccggaaccatttcgcggtggtcgtggatgagcacggcggtcttatgggaatcgttaccatgaaggaccttttggaagaactggtaggcaaccttgacgatgacagcacagccctgccggaacaacccctgattgtaaaaaaaggccccggagaatggatattaaacggtacggtctccctggacaaagccgcccacgagttggacgttacccttccggtggaacgctacgatactttcgcgggctttgttttcagccttcttggagaaatacccgaagacggcagccaggcggtacttgaaacacatggccttaaaatagagcttcaggaaattcgcgagcacaggctggaaaaagtcctggtaaccaaggttgagactgttgagactaaggagaaataa

SEQ ID NO: 49488 - protein, 448 aa, Unknown
  Obtained from environmental sample
  DOMAIN (361)...(441): Transporter associated domain
  misc_feature (1)..(448): Xaa is any amino acid
MAIMNNNDPILWKFLILVVLIFASAFFTLAEIALISLNKNKLEKQSLSGNRKAKRIMSLTGNPSKFLATNQVGTTLTNFMASAFAADTFSGRFTSWLVSHGVKIPYNVLSSVSLVSITLILSYFSIVLSELLPKRIALKKADVLAFPLSGSVLFFSRIFAPVVWLLTKSTNGILRLIGIDPKTDAHSVTEEEIRLMIDVGSARGTIRAGEKEILHNVFEFDDKTAGEVMTHRRDTVLLKLEDSDEEWEKAIIESRHNFFPVCGKNQDDIAGVLVFRDYLCLSDHSRETVMAKAVRPAQFVPITVRTHTLFARMKKSRNHFAVVVDEHGGLMGIVTMKDLLEELVGNLDDDSTALPEQPLIVKKGPGEWILNGTVSLDKAAHELDVTLPVERYDTFAGFVFSLLGEIPEDGSQAVLETHGLKIELQEIREHRLEKVLVTKVETVETKEK

SEQ ID NO: 49489 - DNA, 720 bp, Unknown
  Obtained from environmental sample
  misc_feature (1)..(720): n is a, c, g, or t
gtgcttgcggctgttagcgtaagccccggaaaaaagggagtgataaagccctttatttccgcgcgggatcataagcggcggtttgaaggcgggcaggggccgaataccgggggcatgggcgccattgcgccagtgcccgattttacggcggttgcgcgtaacgattttgaaaaggcaattctcgcccctaccttaaagggtatggaagaagaaaaaatggactaccgtggctttatcttttttggccttatggtgcaggaagagcgctgttaccttttggaatacaacgctcgcctgggagacccggaaacgcaggcggtgcttcccctaatggattcggatctcgccggactctgcgcggcgattctggacggaacgcttcaggacttcccgctcaaatggaaaaagggcgctgtctgcgcgcctgtggccgttgccgagggctatccgggcccttaccgaaaaggagatccgatagcgacaaaccccgaagaactcgaaaaaaccggcgcaaagctgtttgtagccggcgcaagccgaggggcaggcggcccccttggttccgggctgcggacagcaggcggccgggtgctttgcgtatctgccctgggaagcgacgcggacgacgcttttgcaaaggcctaccaggcgctccgttatgtcagttttgaaggcatgggttaccgcgctgacataggccgggaacattggcaatcatga

SEQ ID NO: 49490 - protein, 239 aa, Unknown
  Obtained from environmental sample
  DOMAIN (3)...(104): Phosphoribosylglycinamide synthetase, ATP-grasp (A) domain
  misc_feature (1)..(239): Xaa is any amino acid
MLAAVSVSPGKKGVIKPFISARDHKRRFEGGQGPNTGGMGAIAPVPDFTAVARNDFEKAILAPTLKGMEEEKMDYRGFIFFGLMVQEERCYLLEYNARLGDPETQAVLPLMDSDLAGLCAAILDGTLQDFPLKWKKGAVCAPVAVAEGYPGPYRKGDPIATNPEELEKTGAKLFVAGASRGAGGPLGSGLRTAGGRVLCVSALGSDADDAFAKAYQALRYVSFEGMGYRADIGREHWQS

SEQ ID NO: 49491 - DNA, 1014 bp, Unknown
  Obtained from environmental sample
  misc_feature (1)..(1014): n is a, c, g, or t
ttggaaccgcggatgttggggcaggattactattccggcgggcacctgacccacggttaccgctacaacctttcggggaaactgtttgatatgcacagctactcggtgtccagggaaaccggtcttcttgattatgatcaaattgaaaaacaggcgctggaagtgcggcctttgattctgctggcgggttattcagcctacccccgcaagatcaattttaagcggatgcgggaaattgccgataaagccggcgcggtcttcatggtagatatggcgcactttgccggccttgtagcgggcaagatttttaccggggaatacgatcccgtcccctgggcgcacgttgtcacttctacgacgcataaaaccctgcgcggcccccgcgccggcctggttctctcgacattcgaattcgccgaagcgctggatcatggctgcccgctgactatgggcggacccttgccccatgttatcgccgcaaaggcggtcgctttccgcgaggcatcctcatcggaattcaagcgttacgcgcaacgtattgttgacaactgccgcgaccttgccgccgcctgtatgaacaacggccttgaagtgttaaccggcggcaccgacaaccacctcttgctgatcaacgtgaaccatatcgggttaaccggcagacaggcggaaagctccctgcatgagtgtcgcgtaacgcttaaccggaacagcctgccctttgatcccaacggcccctggtataccgccggcctgcggctgggaaccgccgcggtcactacccttgggatgggaaaaacggaaatggaggagatcgcctcaatcatggcgacggtgctcaagggcactactccggccccaagcgagaaagatccttccgtaaagagcaaggccaaatatatagtggattccacggtaaaaatggcggcgatagaccgcgttaaaaacctgctggatcgcttccccgtgtatccggaactggatctgcccatgcttaaagaggcgtttgtcaggtaa

SEQ ID NO: 49492 - protein, 337 aa, Unknown
  Obtained from environmental sample
  DOMAIN (1)...(275): Serine hydroxymethyltransferase
  misc_feature (1)..(337): Xaa is any amino acid
MEPRMLGQDYYSGGHLTHGYRYNLSGKLFDMHSYSVSRETGLLDYDQIEKQALEVRPLILLAGYSAYPRKINFKRMREIADKAGAVFMVDMAHFAGLVAGKIFTGEYDPVPWAHVVTSTTHKTLRGPRAGLVLSTFEFAEALDHGCPLTMGGPLPHVIAAKAVAFREASSSEFKRYAQRIVDNCRDLAAACMNNGLEVLTGGTDNHLLLINVNHIGLTGRQAESSLHECRVTLNRNSLPFDPNGPWYTAGLRLGTAAVTTLGMGKTEMEEIASIMATVLKGTTPAPSEKDPSVKSKAKYIVDSTVKMAAIDRVKNLLDRFPVYPELDLPMLKEAFVR

SEQ ID NO: 49493 - DNA, 417 bp, Unknown
  Obtained from environmental sample
  misc_feature (1)..(417): n is a, c, g, or t
atgaactatattaccggctttcactccattgaagaacgaatcaaagcgggcaaaaacacgggcctcgcctgcggccctctcctggtcgcgaaagcgggcccgcgggcaagggaaattgtaacccttgcggttgacagcaaggtacgcgtagacagggtcggggtttttgagcttgaccgcctcgcgcccgacaacaggggcatagcccttcaggttgaggatgtttttcaggataacgccattctcagtcttgatgattttttaaacgggctggaggatcgcgccgacgctctggcgcttatccttgacgaaataaccgacccccacaattacggggcgatactgcgctgctgcgatcaattcgccgtggatttgggtgtaagcagaaactgccgcagcgcaaaacacgcgcggtaa

SEQ ID NO: 49494 - protein, 138 aa, Unknown
  Obtained from environmental sample
  DOMAIN (3)...(78): RNA 2'-O ribose methyltransferase substrate binding
  misc_feature (1)..(138): Xaa is any amino acid
MNYITGFHSIEERIKAGKNTGLACGPLLVAKAGPRAREIVTLAVDSKVRVDRVGVFELDRLAPDNRGIALQVEDVFQDNAILSLDDFLNGLEDRADALALILDEITDPHNYGAILRCCDQFAVDLGVSRNCRSAKHAR

SEQ ID NO: 49495 - DNA, 393 bp, Unknown
  Obtained from environmental sample
  misc_feature (1)..(393): n is a, c, g, or t
atgagatcagtttattcagagcaaacaaagaaagaggggttaaaactaataatcgccgcggaaaaaggcgatattgaagccgtagaatcattgcttaagaaggatgtttatatccacgctcaggacagggaaggcaagtgcgccattgtggctgccgcttataaaaaccacatcgaaattgtcgatttgctgataaaagccggcgcggatgtcaatatgaaagacgacactatacaaagcgcctatttgattccaagcctcgaaggatatacagagctgctgaagataactctcaaagcaggaggagacgtccacagtacggacagcgacaatggaaccgggctgatacgggcgtccgaccgaggacatgttgaaattgtaaaagagctttaa

SEQ ID NO: 49496 - protein, 130 aa, Unknown
  Obtained from environmental sample
  DOMAIN (44)...(76): Ankyrin repeat
  misc_feature (1)..(130): Xaa is any amino acid
MRSVYSEQTKKEGLKLIIAAEKGDIEAVESLLKKDVYIHAQDREGKCAIVAAAYKNHIEIVDLLIKAGADVNMKDDTIQSAYLIPSLEGYTELLKITLKAGGDVHSTDSDNGTGLIRASDRGHVEIVKEL

SEQ ID NO: 49497 - DNA, 1185 bp, Unknown
  Obtained from environmental sample
  misc_feature (1)..(1185): n is a, c, g, or t
atggacagaagcgttctggaaggcgatccgcacagtgtgatagaaggactgattatcggcggttacgcgattggcgcgacagagggttatatttacgcgcgcgccgaatatcccatcgccattcgcagattaaaaattgcaattaagcaggcgcaggagcgcggctttttgggcaataacattttagggacaggtttaaaatttaatttgcatattaaagaaggagcgggcgcgtttgtctgcggcgaagaaaccgctctgattgaatctatcgaaggacatcgcggtatgccgaggatacgtcctccattccccgccgcccgcggactttttggaaaaccgtccaacatcaacaatgttgaaacattggcaaacatcggctggataatcagaaaaggagccgacgcttttgcagtctttggaacggagcaaagcaaaggtacaaaagtgtttgcgttagcgggaaaaattaaaaggggcggattggtagaaataccgattgggatgaccattaaagaagtagtcatggacataggcggcggaacaaaatcgggaaggccttttaaggcggttcaaatgggcggtccttcgggcggctgtattccccgcagcaagatggacacaatcattgattatgctccgttagctgaaacgggagctatcatgggatccggcggtatgattgtcatggacgaggacgactgcatggtcgacgtgaccaagttctacttggagttcacggtcgacgagtcgtgcggcaagtgctccccgtgccgtgtgggagggcgtcagctctacaaccacttggagaagattacgaacggcgagggtactgaggaggacatccgcaagatgcgcctcatcggcaaggccatgcagaaagcgtcgctttgcgctctcggccagaccgcgccgaaccccgtcgtctccacgctccagtatttcgagaacgagtacatggcccacataaaggagcgcaggtgtccggccggcaagtgcaaaaagatgctgcgtttctccatcttggccgacaagtgcataggttgcggtctgtgcgcgaagaagtgtccggcgggttgtatcaagggcgagaagaagcaaccgcacgtaatagattccgccgcgtgtataaagtgcggcgcgtgcgaggaggcgtgtaaattcaaggcagtcgtcaagaactaa

SEQ ID NO: 49498 - protein, 394 aa, Unknown
  Obtained from environmental sample
  DOMAIN (369)...(392): 4Fe-4S binding domain
  misc_feature (1)..(394): Xaa is any amino acid
MDRSVLEGDPHSVIEGLIIGGYAIGATEGYIYARAEYPIAIRRLKIAIKQAQERGFLGNNILGTGLKFNLHIKEGAGAFVCGEETALIESIEGHRGMPRIRPPFPAARGLFGKPSNINNVETLANIGWIIRKGADAFAVFGTEQSKGTKVFALAGKIKRGGLVEIPIGMTIKEVVMDIGGGTKSGRPFKAVQMGGPSGGCIPRSKMDTIIDYAPLAETGAIMGSGGMIVMDEDDCMVDVTKFYLEFTVDESCGKCSPCRVGGRQLYNHLEKITNGEGTEEDIRKMRLIGKAMQKASLCALGQTAPNPVVSTLQYFENEYMAHIKERRCPAGKCKKMLRFSILADKCIGCGLCAKKCPAGCIKGEKKQPHVIDSAACIKCGACEEACKFKAVVKN

SEQ ID NO: 49499 - DNA, 1623 bp, Unknown
  Obtained from environmental sample
  misc_feature (1)..(1623): n is a, c, g, or t
ttgacatcgcctgaccgtcccagcgcctcttcttatagagaagtttatgtgcggataaccgcacaagatggcacggtacagatttatcgttatgtacagtatgtttcctcaaccgccccttccggtaacaacgcggcgcgcggcgagcttaataccctgaccattggcggagtgaatgttgtcaccaatgccaaggacgcagggagcaacaaaagaggcacctacgctggttggtggaacaaaacagcggctcctgaaattgagccgggtgaagtaacattaacagcggcgcaggcggcaaccggctccgtatccgcaacattctattacaataacgaacaggcgggcagcactgtttcctatgctaaaatttccgcatccgactggccgttgaaggagagcgccgttacctttacggatctcgccactactaccggaactaatatcgccgcttcaggaaccattagcggcattacgaatggggattatattattctccgccggaatcctccgacatcggctacttacagcgggtactatgggcattacattatcaaggtaaatgttgaaataccaaccaatacgataacatttgacaaaaatggcgggactacggaagcaagtccggcaaccaaagccgttgtacctccggcaaccactgtgggaactctgccgacagcgccaacacggacaggctatggctttggtggctggaattcggcggctaacggttcagaaacagagtttaccgcgacaacaaccgtaacggaaagtaaaacagtttacgcgcagtggacagcatataccttgtcgattacctatgctaacggcggcggcaccggctccgctccaacaagcccgacatcagcggctttacggaccaatgttaccatgcctcaaaatactttcacccgcaccggttactctttcgcgggctgggcggtatcgggagacggtgccacaacgggtacccacgcggcaggggcgaacgttgcggtttcggctttgtcaacggccattaacaccggcaatgcaggcataatactgaccgcgacatggacggcgaatatttatacagttacatttaacaagaataactccgacgcaggaagcaccaatgcaagtcccgctaccaagacagtaaccgcgccggcgactacgatagacgcgctgccgacaccgccaacgcgaaccgggtatactttcaacggttggaaaactgaatcgggaacggtctttgttcagacaacgcccgtgtcaggcgacatcaacgtatacgcgcaatggacggcaaatactttaacgattacctatgcccccggcggcggctccggctcaaatccgaccagcccgacatcggcggcttacggaaccaatgttaccatgcctcaaaatactttcacccgcaccggctactctttcgcgggctgggcggtatcgggagacggtgccacaacgggtacccatgcggcaggagcgagcgttgcggtaacggctttgtcaacgaccattaacaccggcaatgcaagcataatactaaaccgcgaccatggancggcagaataccttatacagttacatataacgaagaatacttccgaagtcaggcagcccgaaggctag

SEQ ID NO: 49500 - protein, 540 aa, Unknown
  Obtained from environmental sample
  misc_feature (1)..(540): Xaa is any amino acid
MTSPDRPSASSYREVYVRITAQDGTVQIYRYVQYVSSTAPSGNNAARGELNTLTIGGVNVVTNAKDAGSNKRGTYAGWWNKTAAPEIEPGEVTLTAAQAATGSVSATFYYNNEQAGSTVSYAKISASDWPLKESAVTFTDLATTTGTNIAASGTISGITNGDYIILRRNPPTSATYSGYYGHYIIKVNVEIPTNTITFDKNGGTTEASPATKAVVPPATTVGTLPTAPTRTGYGFGGWNSAANGSETEFTATTTVTESKTVYAQWTAYTLSITYANGGGTGSAPTSPTSAALRTNVTMPQNTFTRTGYSFAGWAVSGDGATTGTHAAGANVAVSALSTAINTGNAGIILTATWTANIYTVTFNKNNSDAGSTNASPATKTVTAPATTIDALPTPPTRTGYTFNGWKTESGTVFVQTTPVSGDINVYAQWTANTLTITYAPGGGSGSNPTSPTSAAYGTNVTMPQNTFTRTGYSFAGWAVSGDGATTGTHAAGASVAVTALSTTINTGNASIILNRDHGXAEYLIQLHITKNTSEVRQPEG

SEQ ID NO: 49501 - DNA, 1254 bp, Unknown
  Obtained from environmental sample
  misc_feature (1)..(1254): n is a, c, g, or t
atggggctggttccaacggaaaaaatgctggatatggggatgctgtatttctttgttttcggcgttgccggcgccggcgggtcttttctttcggggcttctgctggatatattatcagctctggggctgccgccgttttattcattcaaaatactctatattgtgctgatagtgttagccgcaatagccgtttttaagatgcaaaaattgacgcctttaggcgccctttcctttacgggtgcggttaaggtaatgttttcctaccgtgacctgcaggccatttctctgcttgatcgtctggataaaactgccgattctaatcaggagcaggagttattgggggcgctgtacaataacccgtcgcaattatcgacaaaggggttgcttgaaaaggcgcggtctccccggcttgcaacacggcaggaatcaatacgcgccctggacaaactcgaatccctgagtgaggacgccgaagccgcgttggttaatgacattgtcaataatccttttaccaccgcttatatttccgcacgtattttgggaaaccacggctgcgtttccgctatacccattctgcgtgagctggcgtattcacatgactatatgctagcgggcgaggcgatgatcgcccttgccagactgcgtgatcttgcgttccgcccccatattgaaaatatcattctttatacgcaaaatccccggctgaaaattatgggcgtagaggctttgggcatatacgccctgcccgattcgcttaatacctttgttaacattattaaaaacacggctccgccgccctatctgcttaacgaagttatattggaaatgtccgcgattcttggcacgcagaatcaattttaccgtattctggcgcgttttgccgccgaaccatcgcttgcctcggcgcttgccctggacgaggcggaagcggccgccgcgtactacaaatcaaatattggctggcgaaaaagcggcaaaagaaaaacggaattgccccttctggacaggcaggcgggcagtattcatgaggccgtatccggccttgagcacaatggcgatggcaaaccactgtcaagctggatacaggctctccccgatttcgccttttccaatgagccggcctttaaaatcgcgcagacgcttttttcagaaattcttgcggatgacaatatggccgcccaaaagtgcctgcgacttctgatagtccactgggcggcgtatcaaatccgggtctggacgcagaggctgaaatag

SEQ ID NO: 49502 - protein, 417 aa, Unknown
  Obtained from environmental sample
  misc_feature (1)..(417): Xaa is any amino acid
MGLVPTEKMLDMGMLYFFVFGVAGAGGSFLSGLLLDILSALGLPPFYSFKILYIVLIVLAAIAVFKMQKLTPLGALSFTGAVKVMFSYRDLQAISLLDRLDKTADSNQEQELLGALYNNPSQLSTKGLLEKARSPRLATRQESIRALDKLESLSEDAEAALVNDIVNNPFTTAYISARILGNHGCVSAIPILRELAYSHDYMLAGEAMIALARLRDLAFRPHIENIILYTQNPRLKIMGVEALGIYALPDSLNTFVNIIKNTAPPPYLLNEVILEMSAILGTQNQFYRILARFAAEPSLASALALDEAEAAAAYYKSNIGWRKSGKRKTELPLLDRQAGSIHEAVSGLEHNGDGKPLSSWIQALPDFAFSNEPAFKIAQTLFSEILADDNMAAQKCLRLLIVHWAAYQIRVWTQRLK

SEQ ID NO: 49503 - DNA, 1074 bp, Unknown
  Obtained from environmental sample
  misc_feature (1)..(1074): n is a, c, g, or t
ttgtatgtgtcgtttttttttctgccgcttggaaaaatgctttccaaaaagttcagtatcgttggtatcttcagttttacatggacttttcgggcgattggaatgattacggtggtttttgcgcctatcgcggcgcatcttggccatcatgacaccgcgctgggtttgaccatgttaggcgtgggtattttccatgtggtacgcggtgttggaatgatagccaataatcccgttctgagtaatctttcaacggggcccgaccgcagcagttatatgacgcagatacagatcatcaacagcgcggtggggatgttttcaggttttgccattgcgattattctgggcaaggagccggggttatacctctattcaatcattatggccgccggcattgtctgcggggttaccagcggcatgctgataggaaaagtgcccgagccgccaaccgaaaaaagcgccgtaaaaaccagccttgtcggtcttatccgcgaagcccttcatgaacctaaaacaaaactttttttaataatactgcttcttgtcgttctggtatcaggcgtgtcgaggactttccttgtcgtttatgcccgcgaggtgtttatacaggaagacggtatggtgctgctgtattctgtttttgggggtttgggacaattattggcaaatatgctgataaaattccttgttgacagaattggcgcaaagccgatttttattatctgcgtcctgtttggttttgtaatgatgatccccattgttttttttccgctttcgtctgttaacagcctgaccatggtgatcctttttctttcctttttattttttatgttgaatttcgggttttcttggttcagagggaatcgcgcagacttatttcatggggctggttccaacggaaaaaatgctggatatggggatgctgtatttctttgttttcggcgttgccggcgccggcgggtcttttctttcggggcttctgctggatatattatcagctctggggctgccgccgttttattcattcaaaatactctatattgtgctgatagtgttagccgcaatagccgtttttaa

SEQ ID NO: 49504 - protein, 357 aa, Unknown
  Obtained from environmental sample
  misc_feature (1)..(357): Xaa is any amino acid
MYVSFFFLPLGKMLSKKFSIVGIFSFTWTFRAIGMITVVFAPIAAHLGHHDTALGLTMLGVGIFHVVRGVGMIANNPVLSNLSTGPDRSSYMTQIQIINSAVGMFSGFAIAIILGKEPGLYLYSIIMAAGIVCGVTSGMLIGKVPEPPTEKSAVKTSLVGLIREALHEPKTKLFLIILLLVVLVSGVSRTFLVVYAREVFIQEDGMVLLYSVFGGLGQLLANMLIKFLVDRIGAKPIFIICVLFGFVMMIPIVFFPLSSVNSLTMVILFLSFLFFMLNFGFSWFRGNRADLFHGAGSNGKNAGYGDAVFLCFRRCRRRRVFSFGASAGYIISSGAAAVLFIQNTLYCADSVSRNSRF

SEQ ID NO: 49505 - DNA, 624 bp, Unknown
  Obtained from environmental sample
  misc_feature (1)..(624): n is a, c, g, or t
atgatgaaaaaccttccatcatggacatcggctgcgcttacggcccattttggcgggcggcggcagagtgcggttttatcctgccggtgtgaaccggcttccgacgcggcgcattatgtgaatgaaacgctgggtttcccctgttatcagggtttcttccctgccgccaatgccgatgaaatccgccgccttgcgaatgacggctcaggcggttttgacgctgtaacgatgtggtacgttatcgaacactttgaaaaagtggggaaaatgttattggaagttcacgggcttttgaaagagggtggggcgctggctttttctactccttcattttccgggatttcaggcagtaaatccccggcctcatttttaaaaaacagcccgccggatcactatactgtctggagccctaatatctgcgcgtggattttaaggcgctacggcttccggctccgcaaaatcgtggttacgggccaccatccggaacgctttcccttgattggccgttttgccgacaatgcgaagaaaggttcgatttatggttttttataccgtttcctgttttttataagccgccttttccgccttggggatacatttgaggtatacgcggtaaagggctga

SEQ ID NO: 49506 - protein, 207 aa, Unknown
  Obtained from environmental sample
  misc_feature (1)..(207): Xaa is any amino acid
MMKNLPSWTSAALTAHFGGRRQSAVLSCRCEPASDAAHYVNETLGFPCYQGFFPAANADEIRRLANDGSGGFDAVTMWYVIEHFEKVGKMLLEVHGLLKEGGALAFSTPSFSGISGSKSPASFLKNSPPDHYTVWSPNICAWILRRYGFRLRKIVVTGHHPERFPLIGRFADNAKKGSIYGFLYRFLFFISRLFRLGDTFEVYAVKG

SEQ ID NO: 49507 - DNA, 1395 bp, Unknown
  Obtained from environmental sample
  misc_feature (1)..(1395): n is a, c, g, or t
gtgcgaaggtttatggaggggcaattgaaaaacgcttctgttcttatagttccagcctgcgagaggggctgcggcggcggccatttaatccgttcgcttctgattcttaaggcgctgcaggctaatggtcgcgacgcttttctctgggtgcctgattcccttaaagacgattttctgcagaggtttcatgatttttttggctttctggacagcccctgcctgctttcccgcgaagaagagctaaaaggccgaacctgggattttattgtcttcgacaggtttagaacatcaaaaaaagagtacatattcttctcgagttttgcgcctgttataggaattgacgaaggaggccctttcaggagccgttttgattttctgatcaatcttttaccgtctttgaaagaggatgcggtcaatcttttttccccagctcttctttcattgccgcggaatagacggccaaactatgctatagaaaccactcccaattctctgttacgcatattgataagctttggcgcggaggattcagccggtctgggcattgccgctgcgcgaagcctcagcggttttttggcaaaagcgccgacagaaaggccgcttgaagttacgcttgtcgccccaattccgccccacaactccagaggcgaagcggaagagctgccgggaattaccgtcatgagaaggattccccatctcggcgagcgcctggctgaatacgatctttttattacgcacttcggacttggcgctttcgaggcggtttacgcccggctccctgtaattcttgtctcgccttctctgtaccaccaaaagctcagccgcaaagccgggtttctatcacttgggataggaatcggggcggcgggccgtcttggtaaattggtcagcgattttggccatagaaccgaaggtaacgccggtaagccggacttacttaaaagtctggaactaaaaagcagggaaatcgcggatcgctacggtttgtgggaagatcaaaaagaaaccatcgtttcttttttatgccgtgtttccccccgctcgccgtttgcctgcccgatctgcaaaaggccgcgctctgtccccgttttggcgcgtttcccggaagaaagctaccgccaatgcccacgctgcggtattatttaccttgcgcgtctaagtgagcctcagattgagtacgaaaaagactattttttcagcgattacaaaaagcagtacggcaaaacttatcttgaagattttcccagccttgtggaaacaggcaagcgccgcctggagcatataaaaggccttctgcatttgcatgatgaaaaaccttccatcatggacatcggctgcgcttacggcccattttggcgggcggcggcagagtgcggttttatcctgccggtgtga

SEQ ID NO: 49508 - protein, 464 aa, Unknown
  Obtained from environmental sample
  misc_feature (1)..(464): Xaa is any amino acid
MRRFMEGQLKNASVLIVPACERGCGGGHLIRSLLILKALQANGRDAFLWVPDSLKDDFLQRFHDFFGFLDSPCLLSREEELKGRTWDFIVFDRFRTSKKEYIFFSSFAPVIGIDEGGPFRSRFDFLINLLPSLKEDAVNLFSPALLSLPRNRRPNYAIETTPNSLLRILISFGAEDSAGLGIAAARSLSGFLAKAPTERPLEVTLVAPIPPHNSRGEAEELPGITVMRRIPHLGERLAEYDLFITHFGLGAFEAVYARLPVILVSPSLYHQKLSRKAGFLSLGIGIGAAGRLGKLVSDFGHRTEGNAGKPDLLKSLELKSREIADRYGLWEDQKETIVSFLCRVSPRSPFACPICKRPRSVPVLARFPEESYRQCPRCGIIYLARLSEPQIEYEKDYFFSDYKKQYGKTYLEDFPSLVETGKRRLEHIKGLLHLHDEKPSIMDIGCAYGPFWRAAAECGFILPV

SEQ ID NO: 49509 - DNA, 1119 bp, Unknown
  Obtained from environmental sample
  misc_feature (1)..(1119): n is a, c, g, or t
atggcaagaacttttaatgcttttggtcggcttccttgtatttatctcggcgcggctagaggctttgagcctttattgcttgttccaataggcttcggcattgtgtttgccaatattccttttgccggaatgggggaacagggagtatggaacgattcgttaaaattatgggatcaccagggatttcttaatgttatttacaatgccggaataggcaacgaatttttcccattgataatttttatcggcatcggagcaatgacggatttcggtcctcttatcgcaaaccccaaaaccgcgttgttgggagcggcggcgcagttcggcgttttcggcacattattccttatcagtctttccaactttcttcccaccgtcgctttcaatcttaaagaagcctgcggcgtggcgataatcggcggagcggacggtcccactacaatttacatcgcggcaaagctcgccccccaccttttagcgacggtagcggttgctgcgtattcctacatggcgcttgtgccgatgatccagccgcccattatgaaactgcttacaacccaaaaagagcggcttatcagaatgaagcagctacgcccggtttccaaagtagaaaaaattgcattcccgataattgtattctcgcttgcgattcttttaattccagcggccgcccctcttatcggctgtcttatgttcggtaactttatccgtgaaatcggcgtagtagaaaggctttccaagactgcccaaaacgagcttatgaatatcgtttcgatgttcctgtctttgggagtcggaagccagatgacacccgaaaagttccttaattccaaatcattgatcatcgtagtaatgggtcttcttgccttcgcgatagcgaccgccacaggcgttcttgttgctaagtttatgaacctgtttcttaaagaaaagatcaatccgcttatcggctctgcgggtgtttccgcggttccaatggccgcccgtgtttcaaacaaggttggtcttgagtacgatcccggcaacttcctgttaatgcacgcgatgggtccgaacgtagccggtgtaatcggaacggcaatcgccgccggcgttatgatagctgtttacggaagataa

SEQ ID NO: 49510 - protein, 372 aa, Unknown
  Obtained from environmental sample
  DOMAIN (7)...(371): Na+-transporting methylmalonyl-CoA/oxaloacetate decarboxylase, beta subunit
  misc_feature (1)..(372): Xaa is any amino acid
MARTFNAFGRLPCIYLGAARGFEPLLLVPIGFGIVFANIPFAGMGEQGVWNDSLKLWDHQGFLNVIYNAGIGNEFFPLIIFIGIGAMTDFGPLIANPKTALLGAAAQFGVFGTLFLISLSNFLPTVAFNLKEACGVAIIGGADGPTTIYIAAKLAPHLLATVAVAAYSYMALVPMIQPPIMKLLTTQKERLIRMKQLRPVSKVEKIAFPIIVFSLAILLIPAAAPLIGCLMFGNFIREIGVVERLSKTAQNELMNIVSMFLSLGVGSQMTPEKFLNSKSLIIVVMGLLAFAIATATGVLVAKFMNLFLKEKINPLIGSAGVSAVPMAARVSNKVGLEYDPGNFLLMHAMGPNVAGVIGTAIAAGVMIAVYGR

SEQ ID NO: 49511 - DNA, 579 bp, Unknown
  Obtained from environmental sample
  misc_feature (1)..(579): n is a, c, g, or t
atggcccgtaagaaccttatggcaggaataaagcgccccaaaagctttacatttgagcatggtgagctaagtcagaactatggtatgtttatagcctctccgtttgagccgggttttggtacgacggtcggcaatactttacgcagagttctcctttcatcgattcaagggtatgcgattaccgcggtaaaaattgaatcaatcgacgctaacgacaatacacataacgtatccagtgaatttgaaacaattcccaacattgtggaagacacgcttgaggttataaacaacctgaagcaaattcgccttagactgcctcaggacgcggagcaggacgttctgctttacgaatggacgggcaggcacgaaataaagagcgatgacttcgcccgcccgggacaggtagacgtgctttccacgggtcagcatataatgactttgatggataacgctaatatcagattcgagattcaaattgatctcgggcgcggatatgttccatcggaagtaaacgagcgttacatcgaagtaataaatacgattccggtagacgcaattttttctcccgtaaaaaagtga

SEQ ID NO: 49512 - protein, 192 aa, Unknown
  Obtained from environmental sample
  DOMAIN (25)...(107): RNA polymerase Rpb3/Rpb11 dimerisation domain
  misc_feature (1)..(192): Xaa is any amino acid
MARKNLMAGIKRPKSFTFEHGELSQNYGMFIASPFEPGFGTTVGNTLRRVLLSSIQGYAITAVKIESIDANDNTHNVSSEFETIPNIVEDTLEVINNLKQIRLRLPQDAEQDVLLYEWTGRHEIKSDDFARPGQVDVLSTGQHIMTLMDNANIRFEIQIDLGRGYVPSEVNERYIEVINTIPVDAIFSPVKK

SEQ ID NO: 49513 - DNA, 480 bp, Unknown
  Obtained from environmental sample
  misc_feature (1)..(480): n is a, c, g, or t
gtgaaattcaacgttgaaactacaagggttggacagcgcaacgattacgacaaattaattctggaagtatggacggacggaacaatcaagccggaagacgcgcttgccgaagccgcaaagatagccaaagatcatttttccgtatttattaattttgatgaaagcaacatcggtcttgacgatgatcttgacgatgaaaacgatcacattagaaaagttcttaatactcctgttgaggaattagagctttcggttcgttcttcaaattgtttgaagaacgcgaatataaagacaataggggagcttacgcgcaaaacagaggacgacattgccagaactcgtaatttcggcaagaaatcgttacaggaaatcaaggaaaaacttaaagagtggaacttgagtcttggaataaccgatttaaatgttctgaaaaacgctcgtatggaacccaaggtaaaggatacggaagatgaagcataa

SEQ ID NO: 49514 - protein, 159 aa, Unknown
  Obtained from environmental sample
  DOMAIN (63)...(130): Bacterial RNA polymerase, alpha chain C terminal domain
  misc_feature (1)..(159): Xaa is any amino acid
MKFNVETTRVGQRNDYDKLILEVWTDGTIKPEDALAEAAKIAKDHFSVFINFDESNIGLDDDLDDENDHIRKVLNTPVEELELSVRSSNCLKNANIKTIGELTRKTEDDIARTRNFGKKSLQEIKEKLKEWNLSLGITDLNVLKNARMEPKVKDTEDEA

SEQ ID NO: 49515 - DNA, 426 bp, Unknown
  Obtained from environmental sample
  misc_feature (1)..(426): n is a, c, g, or t
atgaagcataaaagaggatttaaccccctgaacagaatggcgtctcatcgtaaagcgctgcatcgcaatatggtgacgtctctttttaggcaggagaggattagaacgacaaaggcgaaggcgcttgaagtacgcagaactgcggagaaaatgattacccgcgcgaaggaagatacggtacataaccgccgtattgtttcaggtcgtttgtataacgagggcattgtcgtaaaactttttacggttatcgctcccagaatgaaagaccgcaacggcggatacacccgtattattaaattgggcgagcgcaagggagacgccgcggaattggtcgttcttgagctggttgactataaaattgacgcagcggaagcaaaaaagaaagccaaaaagaaagaagaaaagaagagcgagaaggggaaataa

SEQ ID NO: 49516 - protein, 141 aa, Unknown
  Obtained from environmental sample
  DOMAIN (20)...(116): Ribosomal protein L17
  misc_feature (1)..(141): Xaa is any amino acid
MKHKRGFNPLNRMASHRKALHRNMVTSLFRQERIRTTKAKALEVRRTAEKMITRAKEDTVHNRRIVSGRLYNEGIVVKLFTVIAPRMKDRNGGYTRIIKLGERKGDAAELVVLELVDYKIDAAEAKKKAKKKEEKKSEKGK

SEQ ID NO: 49517 - DNA, 807 bp, Unknown
  Obtained from environmental sample
  misc_feature (1)..(807): n is a, c, g, or t
atggacattatctattcattgatcattgccgacaggcaatggggaagcaacgggcgttacgattacctggaaattgcccgcataatgctggctgatttctggcaatattgcgtacaccctgcctataaaaccctgcttctgggcgactgggccagcaaaggcggtgataagggagatccaaccctagcggcattacaaatgaacgctacccgcccgtccgactttatcatcagccatcttaaagcctataaagcggttgacagcgcacacaactggcaggaagtcattgacgctacttacggcgttattaaggatgtctatgctgacgttaaagcgaaacatggcacaagcagggggctgttgcctgatttcgttatcagaaatgatgccaatactgcctgggtagttccggaagggcatgtgcttgaagcagataccgacggatcatactcgtacaattcgtgccgcattccctggcgtcttggtacagactatctgttgtatggcggtaacactaccttgccaggttttgatacgtttaccgagacaattcaaccgctcgacaagctagcgacagaaatttatggaagcgccgatctggacattttcggcccccttaccattacgggagatggcatttggaataccgagaattgggatgagttttgggatgatccccaatcatttaccgccccgttcctgataaccgcagccgctaccggcaacaaagccctggtcaacgaaatgtggaaatgggaaggcctggaaatttctggtgcgatacctggggtgattacatcaaaatga

SEQ ID NO: 49518 - protein, 268 aa, Unknown
  Obtained from environmental sample
  misc_feature (1)..(268): Xaa is any amino acid
MDIIYSLIIADRQWGSNGRYDYLEIARIMLADFWQYCVHPAYKTLLLGDWASKGGDKGDPTLAALQMNATRPSDFIISHLKAYKAVDSAHNWQEVIDATYGVIKDVYADVKAKHGTSRGLLPDFVIRNDANTAWVVPEGHVLEADTDGSYSYNSCRIPWRLGTDYLLYGGNTTLPGFDTFTETIQPLDKLATEIYGSADLDIFGPLTITGDGIWNTENWDEFWDDPQSFTAPFLITAAATGNKALVNEMWKWEGLEISGAIPGVITSK

SEQ ID NO: 49519 - DNA, 765 bp, Unknown
  Obtained from environmental sample
  misc_feature (1)..(765): n is a, c, g, or t
atgagcctgttgaaaatccgggacatgagccttttggccacggccccttccggcaggcatcccattgagaccgtgattgaggaatacagcgacgagcggctggtcagagccataagaggcgaggtcgagaggggagggcaggttttctttctccataaccggatcgaaaccctgcgtgacataaggataaaaattgagcgcctggtgccggagattttggcggagaccgcgcacgggcagatggacgcgcaggatcttgaggacgtgatgcaccgctttgtgcacggcggctttcacgttcttgtgtccacgacgataatcgaaaacggcatagacatccccaatgttaataccattatcatagaccgcgccgatatgtacggcgtgtcccagttgtaccagctccggggcagggtaggccgcagcgaccgcgtcgcctacgcctacctcctgtacccccagggcggggagattaccgaactcgccatgaaacgcctccaggtgatctccgattttaccgaactgggttccggtttcaagatcgccatgaaggacatggagatacggggcgcgggaaaccttctggggcgcgaacagtcaggcgacatttattccgtgggctttgatctgtacctcaaactcctggacgaggcggtaaggcgccttgagaattcgagttatgaaggggaaaccgaaaccctgctggaactggaatactcgggtttcattccggacagctatatgattcccagcaggaaaaaatga

SEQ ID NO: 49520 - protein, 254 aa, Unknown
  Obtained from environmental sample
  DOMAIN (66)...(143): Helicase conserved C-terminal domain
  misc_feature (1)..(254): Xaa is any amino acid
MSLLKIRDMSLLATAPSGRHPIETVIEEYSDERLVRAIRGEVERGGQVFFLHNRIETLRDIRIKIERLVPEILAETAHGQMDAQDLEDVMHRFVHGGFHVLVSTTIIENGIDIPNVNTIIIDRADMYGVSQLYQLRGRVGRSDRVAYAYLLYPQGGEITELAMKRLQVISDFTELGSGFKIAMKDMEIRGAGNLLGREQSGDIYSVGFDLYLKLLDEAVRRLENSSYEGETETLLELEYSGFIPDSYMIPSRKK

SEQ ID NO: 49521 - DNA, 603 bp, Unknown
  Obtained from environmental sample
  misc_feature (1)..(603): n is a, c, g, or t
gtgcccgtggaacagttaaaccttgtacagcgttacatcggcaatgagggcaatgcccccaggctggatacaattggatcaaaaagctgggaaaaccgtaagggcagggtaaaaaaatcagttgaagacatagcccaaagactccttgaattgtactcaaagcgcaaacagtcaacgggctatgcctacccgaaagacaccgaatggcagaccatgttcgaggcggcctttccctttgaggagaccgaggatcagctccgctgtgtagaggagatcaagcgggatatggaaagctccagccccatggacaggcttgtctgcggcgacgtgggctacggcaagaccgaggtcgcggtacgcgcctgcttcaaggcggtcatgggcggcaagcaggccgcgtttctcgccccgaccacgatcctcgcggaacagcattatgaaaacttcaaggaacgcttttcgatttttcccgtgcgtatcgccatgctttcccgttttgttgaccacaaaaatacccgtacaattcttgggcagctaaaaaacggcgagatccatctgttgataggaacacacaggattatccagcgcgacgtggcgttttaa

SEQ ID NO: 49522 - protein, 200 aa, Unknown
  Obtained from environmental sample
  DOMAIN (2)...(53): CarD-like/TRCF domain
  misc_feature (1)..(200): Xaa is any amino acid
MPVEQLNLVQRYIGNEGNAPRLDTIGSKSWENRKGRVKKSVEDIAQRLLELYSKRKQSTGYAYPKDTEWQTMFEAAFPFEETEDQLRCVEEIKRDMESSSPMDRLVCGDVGYGKTEVAVRACFKAVMGGKQAAFLAPTTILAEQHYENFKERFSIFPVRIAMLSRFVDHKNTRTILGQLKNGEIHLLIGTHRIIQRDVAF

SEQ ID NO: 49523 - DNA, 300 bp, Unknown
  Obtained from environmental sample
  misc_feature (1)..(300): n is a, c, g, or t
atgacagattggccgagtttttggtatggtattattttaatccatgaattcaccaggattcagcgctgggccgcggcgggaattatcggcggcggaattggcaacatcattgaccgtattttccgcactgacggggttgtagattttatcagcgtaaatatttacggccttttgggaatgcagcgctggccgacttttaatattgccgattcgtcagttgtagtatgctgtatattgctgcttgttaccatgttttttactcccgctaaaaaggaaattcacaatgaacaagaaagttaa

SEQ ID NO: 49524 - protein, 99 aa, Unknown
  Obtained from environmental sample
  misc_feature (1)..(99): Xaa is any amino acid
MTDWPSFWYGIILIHEFTRIQRWAAAGIIGGGIGNIIDRIFRTDGVVDFISVNIYGLLGMQRWPTFNIADSSVVVCCILLLVTMFFTPAKKEIHNEQES

SEQ ID NO: 49525 - DNA, 1131 bp, Unknown
  Obtained from environmental sample
  misc_feature (1)..(1131): n is a, c, g, or t
atgaaatacgttctcccgttgaacgccgttatcggcatgataaacatcgcgaccgaagaaaacgacatggacgcgataaagctttacctgggaaaggccgacaacgcggcaaagcacgtgctgggcgtcatcaacgatattcttgacatgaccaanatagaggcggacaagcttgatctttccaacggcgaatttgactttggaaaaatgatggccaacattgtggacgtgaccggaatccgcgcccaggaaaaacaccagcaaattatcgttaacatgaaccccaatattccgtcattcgtaatcagcgacgaattgcggctgtcgcaggttattaccaatcttatgaccaacgctataaaattcacgccggaaaacggcaaggtggctttgagcgcggaaaagctggaggaaaaagacggcgagattaccataaaaatcgaagtcgcggactcaggcatcgggatctcgccggagcagcagcaaaaacttttccaggcttacaatcaggccgactcaagcatctccggcaaattcggcggcacggggctggggctggtcattaccaaacggattatagagctgatgcagggaacgatatggattgagtcggaacttggcaaaggcgcgaaatttatttttacaataaaagtgaaacaggggacccccgcctcccaggccgccgggggaacagcgcccccggggggagcgcccgcctcaataaaggcctccgatttgcatttgcagggttataccatactggccgcggaagacatggatttcaacagggaggttctcgccaagtatctggaaaagacgcggcgtaacgatagattttccgaaaacggcaaaattgccgtttccatgtatacggaaaatcccgataaatacaatttgattctcatggacattaacatgccggaattgaacggagacgaagcgacccgcgaaatacgaatctctgagacaaattcaggcagaaaggacaggcaaattccaataattgccatgactgcggatgtttttaaggaagacattgaaaaatgcctggcggccggcatgaccgatcatgtcgcgaaaccaattgttccgatgaaaatatacgcgacgcttaaaaaacacctggtttaa

SEQ ID NO: 49526 - protein, 376 aa, Unknown
  Obtained from environmental sample
  DOMAIN (251)...(372): Response regulator receiver domain
  misc_feature (1)..(376): Xaa is any amino acid
MKYVLPLNAVIGMINIATEENDMDAIKLYLGKADNAAKHVLGVINDILDMTXIEADKLDLSNGEFDFGKMMANIVDVTGIRAQEKHQQIIVNMNPNIPSFVISDELRLSQVITNLMTNAIKFTPENGKVALSAEKLEEKDGEITIKIEVADSGIGISPEQQQKLFQAYNQADSSISGKFGGTGLGLVITKRIIELMQGTIWIESELGKGAKFIFTIKVKQGTPASQAAGGTAPPGGAPASIKASDLHLQGYTILAAEDMDFNREVLAKYLEKTRRNDRFSENGKIAVSMYTENPDKYNLILMDINMPELNGDEATREIRISETNSGRKDRQIPIIAMTADVFKEDIEKCLAAGMTDHVAKPIVPMKIYATLKKHLV

SEQ ID NO: 49527 - DNA, 648 bp, Unknown
  Obtained from environmental sample
  misc_feature (1)..(648): n is a, c, g, or t
atgggaaatgaacgaaaaaaaattatagcagtagacgataacgtcgaaaacctgacagcaatcaaaaacactctgaaagatatatacgatgtatatccctgcccctccgcggcgaagatgttcaacttgctggaacatattgcgcctgatttaattctgctggatgtggaaatgccggaaatgaacgggtatcaagctatagaaaagctgaaaaacagcgataaacaccgggaaacgcccgttatcttcctgacctccatgagcgacgcgaaaagcgagatggagggcctgcagcttggcgccgttgattatatccgcaagccttttgtcgccctgttgctgctccagcggataaaatcacatatcgccattatggaacaggaacgggaaattaaaaatctgcttgaattaaaaacaaaagaagtcagccgccgcgaacaggcggaacaggaagcgcagaacgcgtcccgcgccaagggagaattcctgtcgcacatgagccatgaaatacgttctcccgttgaacgccgttatcggcatgataaacatcgcgaccgaagaaaacgacatggacgcgataaagctttacctgggaaaggccgacaacgcggcaaagcacgtgctgggcgtcatcaacgatattcttga

SEQ ID NO: 49528 - protein, 215 aa, Unknown
  Obtained from environmental sample
  DOMAIN (6)...(119): Response regulator receiver domain
  misc_feature (1)..(215): Xaa is any amino acid
MGNERKKIIAVDDNVENLTAIKNTLKDIYDVYPCPSAAKMFNLLEHIAPDLILLDVEMPEMNGYQAIEKLKNSDKHRETPVIFLTSMSDAKSEMEGLQLGAVDYIRKPFVALLLLQRIKSHIAIMEQEREIKNLLELKTKEVSRREQAEQEAQNASRAKGEFLSHMSHEIRSPVERRYRHDKHRDRRKRHGRDKALPGKGRQRGKARAGRHQRYS

SEQ ID NO: 49529 - DNA, 306 bp, Unknown
  Obtained from environmental sample
  misc_feature (1)..(306): n is a, c, g, or t
atgttcgcgatctcggatgaagtggaagtccgtaaactggcggaaagaatacgggagaatatggaacacgcccggacaaactatgagggggacgagataaaggttacatgcagcataggcatcgcgaaactgcttaaaacagataccctggaaaccgtcatacggagagccaatgaagccctcagcgtcgcgaaaaattcaggccgtaaccaggtaaaatttcatgattccaggatgtacgaatttgccgggggtaattataaggaggaattgggtaaatgggaaatgaacgaaaaaaaattatag

SEQ ID NO: 49530 - protein, 101 aa, Unknown
  Obtained from environmental sample
  misc_feature (1)..(101): Xaa is any amino acid
MFAISDEVEVRKLAERIRENMEHARTNYEGDEIKVTCSIGIAKLLKTDTLETVIRRANEALSVAKNSGRNQVKFHDSRMYEFAGGNYKEELGKWEMNEKKL

SEQ ID NO: 49531 - DNA, 567 bp, Unknown
  Obtained from environmental sample
  misc_feature (1)..(567): n is a, c, g, or t
atggggcagataggcaagtgggccggcaaggtgttcaagaactaccggctggaggatttgggcgaggtgtacggcgccatcgacccgtactgcttgcgctacggcctcgatttcggctactttcctgatccgtgcgctttcgtcgaggcggggctggacggcggcaatatctacgtctttcgcgagcgcgtcgtcgacgaggcggacaacgaccagctcgcggagataatccggcctgtcgcgggggagcgcgtcgtctggtgcgactccgcctcgcccgaccggatcgcgacgctgcgcaaattaggcgtcaacgcgcggagcgtcggcaagaagcgcgtggaatattcggtgctgtggctgaacaagcaccccatcatcattgacgacgcctgccggcagtcgtacggcgagatcgacaattacgcgcgcaaagccgaccgcaacggcgacccgcttccggtgtttcaggacggcggcgaccactgcatagacgcgctgcgctacgcgctgtgcacggatatgaattcaagcggcgagattaagggattgcatttggacatataa

SEQ ID NO: 49532 - protein, 188 aa, Unknown
  Obtained from environmental sample
  misc_feature (1)..(188): Xaa is any amino acid
MGQIGKWAGKVFKNYRLEDLGEVYGAIDPYCLRYGLDFGYFPDPCAFVEAGLDGGNIYVFRERVVDEADNDQLAEIIRPVAGERVVWCDSASPDRIATLRKLGVNARSVGKKRVEYSVLWLNKHPIIIDDACRQSYGEIDNYARKADRNGDPLPVFQDGGDHCIDALRYALCTDMNSSGEIKGLHLDI

SEQ ID NO: 49533 - DNA, 627 bp, Unknown
  Obtained from environmental sample
  misc_feature (1)..(627): n is a, c, g, or t
atgaactacgaaaaaaattttgtcatacacggcgatttatgctggagcgaaggcctcacaacgcttaaaaccatgccggacggctttctcgtctgcgttgacggcaagtcggccggagcctttccccggcttccacagcagtttgaaaagctcccccttattgaccactcggacagtctcgttatacccggccttgtcgacctccacacgcacgcgccccagttcgcgttccgcggactgggaatggatctcgaacttcttgactggctgtcatcccacgcctttccggaagaagcgaaatatgtagatcttgcctacgcccgcaaagcgtacagcctcatggtcgggcatttgaaaagcggcccgaatacgagaatcgttttctttgccacgatccatgttcccgcgacaatcgttttgatggatctgctcgaagagtcagggatagtaagcatggtgggcaaggtaaacatggacaggaacagccccgatacactaagggaagaaaacgctgccgtttcgcttaacgcgacaagggaatggctgaaaaaatgcgccgctgccaattaccgcggcacaaaccaatcctcactccgcgctttatcccatcgtgcagtgatgatctga

SEQ ID NO: 49534 - protein, 208 aa, Unknown
  Obtained from environmental sample
  misc_feature (1)..(208): Xaa is any amino acid
MNYEKNFVIHGDLCWSEGLTTLKTMPDGFLVCVDGKSAGAFPRLPQQFEKLPLIDHSDSLVIPGLVDLHTHAPQFAFRGLGMDLELLDWLSSHAFPEEAKYVDLAYARKAYSLMVGHLKSGPNTRIVFFATIHVPATIVLMDLLEESGIVSMVGKVNMDRNSPDTLREENAAVSLNATREWLKKCAAANYRGTNQSSLRALSHRAVMI

SEQ ID NO: 49535 - DNA, 792 bp, Unknown
  Obtained from environmental sample
  misc_feature (1)..(792): n is a, c, g, or t
atggctgaaaaaatgcgccgctgccaattaccgcggcacaaaccaatcctcactccgcgctttatcccatcgtgcagtgatgatctgatgcgggatctttgcgcgctgcggaaggaattcaatttgcccgtacagtcccacctgtctgaaaacctaagtgaaattgaatgggtcaggaagctttgcccctcaagcgcaggctacggcgcggcatacgatgatttcgggctttttggttctgaaggaacggaagcaggccctccgacggtaatggcgcactgcgtctggtcggatgaaaatgaaatcaaattgatggccaagcggggagtttttgccgcccactgcccccagtcaaactccaacctttcatcgggtatagccccgatgcggtgtatcctcgaagcgggagtccccgcgggcctgggcagcgacatcgcgggcggttcgagcagttccattttcagggcgatgacggacgcgatacaggtttcaaaactccgtaatcccctcctagacattaacgaaaaagcccttacaatggaagaggcgtttttcctcggaacaaaaggcggcggggaatttttcgggaaaagcggcatgggttactgcggttccttcgagcaaggctttgattttgacgccctggtgataaacgaccaagcgccggaggcgcacgcgcctgaggcgccattcagtatgtcagtccgtgacagactggaacgggcgatatacatctgcgacagcggaaatataaaggcaaagtacgcgagggggaaacaatgcgggctttag

SEQ ID NO: 49536 - protein, 263 aa, Unknown
  Obtained from environmental sample
  DOMAIN (1)...(218): Amidohydrolase family
  misc_feature (1)..(263): Xaa is any amino acid
MAEKMRRCQLPRHKPILTPRFIPSCSDDLMRDLCALRKEFNLPVQSHLSENLSEIEWVRKLCPSSAGYGAAYDDFGLFGSEGTEAGPPTVMAHCVWSDENEIKLMAKRGVFAAHCPQSNSNLSSGIAPMRCILEAGVPAGLGSDIAGGSSSSIFRAMTDAIQVSKLRNPLLDINEKALTMEEAFFLGTKGGGEFFGKSGMGYCGSFEQGFDFDALVINDQAPEAHAPEAPFSMSVRDRLERAIYICDSGNIKAKYARGKQCGL

SEQ ID NO: 49537 - DNA, 720 bp, Unknown
  Obtained from environmental sample
  misc_feature (1)..(720): n is a, c, g, or t
gtgtgnnnnnccgtttatcggcgagatgatccttccgatgagtacaccatcccctacggggccggtgttcagactatagtctgcgatcccgcgattgaggtgcccataagaagctatttagacctgtggaacccgcgtcttaagcataagataggcataatcggcaattaccgggttataaacggaatggccctcaaggtgttgagggagagttacaataccaatgacctggcaagaataggttacgccggtgaactcctgaaaacgcttgcacccaacatccgcctgattcgcgacgacaagctggatgaagaactggtttcaggggaaatttccgtggcggtcatgtatacctcccaggtgacaatggcaaaaatggcaaaaccggagcttaaagtggttttcccctccgaagggattggctttggcattatggcggcgtttatcccgtccaaagcgcctaacgccgcggccgcccacgctttcattaactatatccttgacccgcagcgcggcgcgcagtgctttatgacactgggttactacagcactttttccgcctccgatccttttattgacgagcagtaccgtgatttcctgacgcttccggatgatttcagggattttgattcaatggagatgattcaaaacataagccccgaagccgacgaactgcacaaccgaatttggacggagtttaaggcggcagcaggtcagtaa

SEQ ID NO: 49538 - protein, 239 aa, Unknown
  Obtained from environmental sample
  misc_feature (1)..(239): Xaa is any amino acid
MXXXVYRRDDPSDEYTIPYGAGVQTIVCDPAIEVPIRSYLDLWNPRLKHKIGIIGNYRVINGMALKVLRESYNTNDLARIGYAGELLKTLAPNIRLIRDDKLDEELVSGEISVAVMYTSQVTMAKMAKPELKVVFPSEGIGFGIMAAFIPSKAPNAAAAHAFINYILDPQRGAQCFMTLGYYSTFSASDPFIDEQYRDFLTLPDDFRDFDSMEMIQNISPEADELHNRIWTEFKAAAGQ

SEQ ID NO: 49539 - DNA, 2103 bp, Unknown
  Obtained from environmental sample
  misc_feature (1)..(2103): n is a, c, g, or t
atggcaaataaattgcgattgtttgttcctattgcgcttctgatggcgtttgcggccggcttttgtattgcttgtaaacctaaggataaccatgccatatctgtttcggtagattactatacccagcaggcaagcgcgtcaaatgccgcgaatgaaacgatacaactggcaaatgcggcggctgttcaagccgcttttacgctggattacaggccccaaacggcggaaggcggggatgaggcggagtttttaaacgcgtcggacctttccggcggagccgcggagggatcgggccggggaaccattcttggcggaggactgcggaaactgtccgaatacaaaaccgtctattttgatcccgagaaagaaagaagcagaatcgaggcaatccgcgcggcccaggaaaaaggcggtgaagggcagctaagggcgaaaaacgccggccccctcaccgtgatagactggggcccgaggggaaactattcgtccgccatacagcagccctcggtttatgtaatattttcccatcccatgaccgccctcgcaagtctgggcgaacaaagctcaaattcgccgctggtcagcatcagcccgcccatcaaaggttccttccgctggtatgggacaagttttttgagttttgagggagacgaaccctgccagagccagcaggtctataccataaccgtggcggctaacgcggcttcaatctatggcgatccgattacaggccaacgggtttttaatttttataccgaaactttgagcataaaaaacatatcccccggcgaagaattcagaaaacaaaccaggttccaatttaacaacaacagcgtgcctcccgaagcggccaaacagattggcatggaattcaattaccccgtgcaggcggctgtcatcaatcagtacctcgaaatatcaaacgggaaaaatccctacagatttaccctcgcacaggaaaacgaatacaaaattaccgccagcctgagcgacccggtggattttgaaacgacagtgaccatcaccctgaagagaggtgcaagatcccagggaggcagccggggaaccgaaacggatcaggtattcacttttaaaactcccggcgctttcaaggttgacagacaccgtcagcttgccggttatggcaaataccgtaacctggttgaaattgattttagctatgccctgaatgaaagcaccgcactcacggcggtcactaccgaccccgctatgcccattggcaaagataatgttgaagtatggggaagtacattgcggctttacaatctgccggttagctacggcgcgaaattcaaggtcttggtcagcggaagtctggaagacgtgtacggcagaacattgggcaaagcctggtcgggcgacgttgcagttcccgatgagccgccgccccagggcgaggcgcggtttctggattacggtcacgccatgctggaagcccaatttccgccgcgcttcctctttgaatataaaaacatcgccgaaaattcctcgtacctgctgatgaaaaaagacaatccctggaatgaagttttttacacgtctaaccgcataagtctgactccgggtaaagtgaataatacttattttgaagaaattgatttatcgccgtatctcaatgaacagcgcaggggctttgtctctttccgggcaaatctgcagcttttgacctgggagagacagcgggatgacacataccgtacagataccagagaaataaaaaatgaactgaacatacaggttaccgatctggggctgacggtgcgttacggttttaataaagccacagtactggttaccagcctttctaccggaaagccggtggaaaatgccacagttaagctgcttcctcccgcgctggtaaaaaacggtgaagatgtttccgctatcgcgcattttggcgaggctcaaaccgataaaaacggtcttgcggtactgcgtattggcgaatggnggacgactctgcgggacaatacggtaaatactcaaacttggaggggctatgatacgcccttcgtgcttgcccgaaaagacggagaccgggccatattcactcctaatacgcataaccattggggcgtttga

SEQ ID NO: 49540 - protein, 700 aa, Unknown
  Obtained from environmental sample
  SIGNAL (1)...(24)
  misc_feature (1)..(700): Xaa is any amino acid
MANKLRLFVPIALLMAFAAGFCIACKPKDNHAISVSVDYYTQQASASNAANETIQLANAAAVQAAFTLDYRPQTAEGGDEAEFLNASDLSGGAAEGSGRGTILGGGLRKLSEYKTVYFDPEKERSRIEAIRAAQEKGGEGQLRAKNAGPLTVIDWGPRGNYSSAIQQPSVYVIFSHPMTALASLGEQSSNSPLVSISPPIKGSFRWYGTSFLSFEGDEPCQSQQVYTITVAANAASIYGDPITGQRVFNFYTETLSIKNISPGEEFRKQTRFQFNNNSVPPEAAKQIGMEFNYPVQAAVINQYLEISNGKNPYRFTLAQENEYKITASLSDPVDFETTVTITLKRGARSQGGSRGTETDQVFTFKTPGAFKVDRHRQLAGYGKYRNLVEIDFSYALNESTALTAVTTDPAMPIGKDNVEVWGSTLRLYNLPVSYGAKFKVLVSGSLEDVYGRTLGKAWSGDVAVPDEPPPQGEARFLDYGHAMLEAQFPPRFLFEYKNIAENSSYLLMKKDNPWNEVFYTSNRISLTPGKVNNTYFEEIDLSPYLNEQRRGFVSFRANLQLLTWERQRDDTYRTDTREIKNELNIQVTDLGLTVRYGFNKATVLVTSLSTGKPVENATVKLLPPALVKNGEDVSAIAHFGEAQTDKNGLAVLRIGEWXTTLRDNTVNTQTWRGYDTPFVLARKDGDRAIFTPNTHNHWGV

SEQ ID NO: 49541 - DNA, 555 bp, Unknown
  Obtained from environmental sample
  misc_feature (1)..(555): n is a, c, g, or t
atgaacagcgcggtagaaattatcgtcaacgcaaaactgcaaaagcccggcgtatgcaacgcggtggaaacaatacttgtacacaaagacgcgttatctgcgcttatgccgaaaatggcggcaagcattgcgggaaaatgcgaactgcgctgcgacagcgcgtcaaaagccgctatcggcgcaataccttccgcccttgtcattaaagacgctgttgaggaagactgggcaactgagttccttgattatattctcgcggtaaagaccgtttcttcctgcgatgaggcaatcgcacatatcaacaagtacgggactaaacattcggacgctattcttaccaacgatttaagggcggctgatgagttccgttcaagagtggacgcggcgtgcgtatatgtcaacgcgtcaacgcgatttacggacggagggcaattcggctttggcgcggaactgggaataagcactcagaaatttcacgctagaggacctatgggtcttgaagcccttacgacaataaagtaccttatcaacggcagcggacaaatacggagttaa

SEQ ID NO: 49542 - protein, 184 aa, Unknown
  Obtained from environmental sample
  misc_feature (1)..(184): Xaa is any amino acid
MNSAVEIIVNAKLQKPGVCNAVETILVHKDALSALMPKMAASIAGKCELRCDSASKAAIGAIPSALVIKDAVEEDWATEFLDYILAVKTVSSCDEAIAHINKYGTKHSDAILTNDLRAADEFRSRVDAACVYVNASTRFTDGGQFGFGAELGISTQKFHARGPMGLEALTTIKYLINGSGQIRS

SEQ ID NO: 49543 - DNA, 738 bp, Unknown
  Obtained from environmental sample
  misc_feature (1)..(738): n is a, c, g, or t
gtgcttatgattacaaaggggatgatggacacgcccgaaggtgagcttatcccctaccccctattgctgcgttccagggctggcggcaaaaacatttccattaacgcagtgggcggtccatgtaccgcctacgagcttgcagaccgcgaccacacagaagtctgtttttgcggtgatgacatcgcgcttctgcgtaagctaaagtcctggctggaagccaaatattaccacatcagcctttctaccgacataatgggcgtggagtgcgccgttgcactgaagaatgcttacgccctggccgtaacgctgacagtggggctttcggaaaagcttgaaggagttgggggcaagctccactacaattcacaggcagcgctcttcgcccaaagcatcaaggaaatgcgccacattcttttcctttttggatgtctggatgaaaacatagtccttggcgccggcgacctttacgtaacgatcttcggcggcagaaccaggcttattggaaccctcctgggcaaaggtcttccttttgaaaaagccatggaagagctcaaggggataaccttggaatccattgtaatcgcgaagcggactgccgccgccctcagaaagaaaatagctgccaacatggcaaaggccggtgattttccactgctcctccacattgacgatattatctcaagcggctcagcggtgaatattccctgggaccagtttgaatcggagacttgtttatga

SEQ ID NO: 49544 - protein, 245 aa, Unknown
  Obtained from environmental sample
  DOMAIN (82)...(236): NAD-dependent glycerol-3-phosphate dehydrogenase C-terminus
  misc_feature (1)..(245): Xaa is any amino acid
MLMITKGMMDTPEGELIPYPLLLRSRAGGKNISINAVGGPCTAYELADRDHTEVCFCGDDIALLRKLKSWLEAKYYHISLSTDIMGVECAVALKNAYALAVTLTVGLSEKLEGVGGKLHYNSQAALFAQSIKEMRHILFLFGCLDENIVLGAGDLYVTIFGGRTRLIGTLLGKGLPFEKAMEELKGITLESIVIAKRTAAALRKKIAANMAKAGDFPLLLHIDDIISSGSAVNIPWDQFESETCL

SEQ ID NO: 49545 - DNA, 1386 bp, Unknown
  Obtained from environmental sample
  misc_feature (1)..(1386): n is a, c, g, or t
ttggcttgtgtaattatagggtgtgcgtctaaaccatatacactcgtgaatggaaatttaaccattgatgacggaactacttctattagaaaaaaggcgttttataaaaagcaattgatcagcgttaccattccaaacagtgtaacttttatcggtgaaggtgcgttttggaacaaccaactgaccagcgttactattggaaacagcgttacttctatcggtaaagatgcgttttggtacaaccaactgaccagcgttaccattcccaatagtgttactactatcggtcaaggtgcgtttgggagaaaccaactgaccagcgttactatcggaaacagcgttacttctattggtaatagtgcgtttgcgataaacaaattgaccagcgttatcattcccaacagcgttacttctatcggtgattggacgtttggtgacaaccaactgaccaacgttaccattggaaacaacgttacttctatcggtaatggcgcgtttattaaaaatcaactgaccagcattaccattcccaacagcgttatttctatcggtaaaaatgcatttgcgaacaatcaactgctcagcgttaccattggaaacagcgttacttctatcggtcttggcgcattttggagcaaccgtctatccagtattaccattggaaacaacgttacttctatcgatgaaggcgcgttttataaaaaccaactgaccagcgttaccattggaaacagcgttacttctatcggtaaaagtgcatttgcgatcaatcaactgaccgatgttactattcctaacagcgttacttctatcggtgaagttgcgtttaaggagaaccaactagttagcgttaccattggaaatagcgttacttctatcggtaatagtgcgtttcgaggcaatcaactgacaaacgttactattccaaacagcgttatttctatcggtgaaggtgcgttttgggagaaccaactgacccgcattactattggaaacagcgttacttctattggtaatggtgcgtttaataaaaaccaactgaccagtgttaccattcccaacagcgttacttctatcggaaatggtgcgttttgggagaaccaactgacaagtgttactattcctaacagtgttaaaactattggggaaaaggcatttgcggataatccgcttaccagtgtaactattccagacaatgttagaacttttaataacaatgtattttcaggagcaaaaaaccttacacgcattagcattggagctaatgtaaatattacggggattgaacgattaggatttaattttgaaacatactatcttggtaacaagcggcaggcagggacatacacttttactaatgatagctggaactttcaacctagatag

SEQ ID NO: 49546 - protein, 461 aa, Unknown
  Obtained from environmental sample
  misc_feature (1)..(461): Xaa is any amino acid
MACVIIGCASKPYTLVNGNLTIDDGTTSIRKKAFYKKQLISVTIPNSVTFIGEGAFWNNQLTSVTIGNSVTSIGKDAFWYNQLTSVTIPNSVTTIGQGAFGRNQLTSVTIGNSVTSIGNSAFAINKLTSVIIPNSVTSIGDWTFGDNQLTNVTIGNNVTSIGNGAFIKNQLTSITIPNSVISIGKNAFANNQLLSVTIGNSVTSIGLGAFWSNRLSSITIGNNVTSIDEGAFYKNQLTSVTIGNSVTSIGKSAFAINQLTDVTIPNSVTSIGEVAFKENQLVSVTIGNSVTSIGNSAFRGNQLTNVTIPNSVISIGEGAFWENQLTRITIGNSVTSIGNGAFNKNQLTSVTIPNSVTSIGNGAFWENQLTSVTIPNSVKTIGEKAFADNPLTSVTIPDNVRTFNNNVFSGAKNLTRISIGANVNITGIERLGFNFETYYLGNKRQAGTYTFTNDSWNFQPR

SEQ ID NO: 49547 - DNA, 432 bp, Unknown
  Obtained from environmental sample
  misc_feature (1)..(432): n is a, c, g, or t
ttggtaaaaggagatgaaacacccgaatattgggcaaaatatgcctcaaatggtaatgaagaatgttttatcgcactttgcaattatatgaaaccaaaactttttcgcaccgcgaaaggtattcttggcaatgaatctcttgctcttgatgctgttagtgaggctgtttttcgcgcctttaaaggtattaaacggcttcgagaacctaaatatgcggaaacatggtttatccgcatagtattgaatgtcgcaaaagacttctataggaggcaaaaacatgaaatagctatggaaacagtacctgaagggatatatcatgacaatcatagcgaattggaattctcccagatgattggatcattacaaccggaacttcgtgaaatcatcagccttaaatattattccgattatacgctgaatgagattcagtaa

SEQ ID NO: 49548 - protein, 143 aa, Unknown
  Obtained from environmental sample
  DOMAIN (26)...(94): Sigma-70 region 2
  misc_feature (1)..(143): Xaa is any amino acid
MVKGDETPEYWAKYASNGNEECFIALCNYMKPKLFRTAKGILGNESLALDAVSEAVFRAFKGIKRLREPKYAETWFIRIVLNVAKDFYRRQKHEIAMETVPEGIYHDNHSELEFSQMIGSLQPELREIISLKYYSDYTLNEIQ

SEQ ID NO: 49549 - DNA, 684 bp, Unknown
  Obtained from environmental sample
  misc_feature (1)..(684): n is a, c, g, or t
ttgaagcgtcttgttaatatcccgaaatattgttatcatttacccatgaacgagcggttaaattccctgttaaaacgatacgaagaactaaacctcctgatccaggaccctcagcttgtaaaggatcaaaaccgctaccgcgaaaccatgaaggaacattcgcgcctcagcgaaatcgccgaaattcaagctaatattgaagggctggaaaaacagataatcgaggcaaaaacgcttgttcaggaagaaaaagatcaggaaatgaaggaacttgcgcgggaagagctgaaagaacttgaaacaaagcttaccgacaacaaggacaagctaaaattcctgcttatccctaaagaccccctggacgaaaaaaacataataatggaaatacgcgccggaacaggcggcgaagaggcggcgctgttcgcttccgacctttacagaatgtactcgcgttttgccgaatcaaagggctggaaatttgaaataatgaactcaaatgacaccgagctgggcggaattaaggaaattgtgttttccataaccggaaacaacgtatacgaaaacatgcgctatgagtcgggagtccatagagtgcagagggttcccgcaacggaagcttcgggaagaattcacacttcggcggtaacggtggccgttttgcccgaagcggataaaccgaaatag

SEQ ID NO: 49550 - protein, 227 aa, Unknown
  Obtained from environmental sample
  DOMAIN (78)...(192): PCRF domain
  misc_feature (1)..(227): Xaa is any amino acid
MKRLVNIPKYCYHLPMNERLNSLLKRYEELNLLIQDPQLVKDQNRYRETMKEHSRLSEIAEIQANIEGLEKQIIEAKTLVQEEKDQEMKELAREELKELETKLTDNKDKLKFLLIPKDPLDEKNIIMEIRAGTGGEEAALFASDLYRMYSRFAESKGWKFEIMNSNDTELGGIKEIVFSITGNNVYENMRYESGVHRVQRVPATEASGRIHTSAVTVAVLPEADKPK

SEQ ID NO: 49551 - DNA, 1611 bp, Unknown
  Obtained from environmental sample
  misc_feature (1)..(1611): n is a, c, g, or t
atgatggccggnttctggaccttccatgaattgcataaaaaagaagagcctatgccgaagaagaaaaccgccgaagaatatatggacgattacgccaaatatttccccaaaggtttctttgatgacgctgaatcacagttaatgataaccatcagtgaaatttccaaactgcttaaaatggacgaacagaacaacgaagatacagctattgttgttcaaccgatggtatacggaaattacggtaaagattcttgttcgggttatttcttcacgcgcaatgttgtaaccggcgaaaagaaacttcagggaagttactttaccgggaaatttaacgaaacaggcgaaacgggacacgagatcaataaaattgacgcgtctcatcttaaacagcttgaaaagatagcgggagtccttgaggataaattcaaggaaattcgccaggtgcgctttaccgtagaaaacgaaaaactctggcttatagagcagagactcgtagaccaaaaatccacacaagctgatcttaaacttttgcttgatcttcaaaagcgaaaaatagtcgatgcggcttatgtagtaaaagcgattgatcctttaaggcttaatgaaattctacaccctgtaattaatcctgccagcgttaagggatttaaatcatggaagggcggtatcgctggcgctccgggcgcggcgataggacgcgtctatttcagcacggacgctctgttggaagcgaaaaaagcggcgacacagcagggaaataaagacagttttattctctgtcttgaatcttcttttgcggaagacgtaaaggcgattgaagtaagcgccggagtactaaccgccgagggcgggtattccgctcacgcatccgtagtagcgcgccagtacgggaaagtgtcgcttgtatctcctgagcttaaaattaaaggaacaaaagcgactctcggcgattttagtttctccgagggaaattacataaccatcgacgttcctttctacggcgagtcaaaagtgtatcttggaacggcggaacttatagagcctgatcctaaggggtcgggtcttctggactttatcgatctttccaagggcttcttaaaaaatttccatatcagatgtaacgcggatactccaagggacgctaaacttgctttagatttcggcgcggacggcgtaggtttgtgccgcacggagcatatgttctttaaagcggatcgcatcaatgttttccgtgatatgctgatgtccgacgacaaaaaagaacgccagaaggttttgaataaactgcaaataatgcaaagggaagatttttacggcattatgaaagtgatggcaggcaaggaagtaacgattcgtcttttggattcgccgcttcatgaatttatgccgcataaccccgatgaaattcaggggtatatcgaccatgttgcaaaggctacgggcaagaaaccgtcaaaggctgatattgccgcgcgcattgactctctgcatgaatttaaccccatgcttggacatcgcggctgccgtatcgccgtctcttacccggagatttacacaatgcaggtaaaggctatttttgaagccacatataactgcgctccgaaagaatga

SEQ ID NO: 49552 - protein, 536 aa, Unknown
  Obtained from environmental sample
  DOMAIN (1)...(193): Pyruvate phosphate dikinase, PEP/pyruvate binding domain
  misc_feature (1)..(536): Xaa is any amino acid
MMAGFWTFHELHKKEEPMPKKKTAEEYMDDYAKYFPKGFFDDAESQLMITISEISKLLKMDEQNNEDTAIVVQPMVYGNYGKDSCSGYFFTRNVVTGEKKLQGSYFTGKFNETGETGHEINKIDASHLKQLEKIAGVLEDKFKEIRQVRFTVENEKLWLIEQRLVDQKSTQADLKLLLDLQKRKIVDAAYVVKAIDPLRLNEILHPVINPASVKGFKSWKGGIAGAPGAAIGRVYFSTDALLEAKKAATQQGNKDSFILCLESSFAEDVKAIEVSAGVLTAEGGYSAHASVVARQYGKVSLVSPELKIKGTKATLGDFSFSEGNYITIDVPFYGESKVYLGTAELIEPDPKGSGLLDFIDLSKGFLKNFHIRCNADTPRDAKLALDFGADGVGLCRTEHMFFKADRINVFRDMLMSDDKKERQKVLNKLQIMQREDFYGIMKVMAGKEVTIRLLDSPLHEFMPHNPDEIQGYIDHVAKATGKKPSKADIAARIDSLHEFNPMLGHRGCRIAVSYPEIYTMQVKAIFEATYNCAPKE

SEQ ID NO: 49553 - DNA, 396 bp, Unknown
  Obtained from environmental sample
  misc_feature (1)..(396): n is a, c, g, or t
atgggaactgaagatgaaatatatcaaaaagtggatcgtgcccttttgctgatgcttgcgaggagttttgcaaacgaatatccttattcactttccctaggaatgcgaaagcgagtagcagttgcccgtgcttgggcaatgaacgcaaacatcctcctcttagacgaaccaacagctggactagacaaaaacagccgcaacaatcttttatcccttataaacaacctgagggaactttacaaaaccaccatattgatggttatcaacgatttgcatgtagcccgagacttaaacagtaaaatatcttttttgatggacaaaaaattgagcgagcctatgttttacaatgagataaggaataacgaggattcgcgcataagggctatggtgatgtga

SEQ ID NO: 49554 - protein, 131 aa, Unknown
  Obtained from environmental sample
  DOMAIN (2)...(107): ABC transporter
  misc_feature (1)..(131): Xaa is any amino acid
MGTEDEIYQKVDRALLLMLARSFANEYPYSLSLGMRKRVAVARAWAMNANILLLDEPTAGLDKNSRNNLLSLINNLRELYKTTILMVINDLHVARDLNSKISFLMDKKLSEPMFYNEIRNNEDSRIRAMVM

SEQ ID NO: 49555 - DNA, 1410 bp, Unknown
  Obtained from environmental sample
  misc_feature (1)..(1410): n is a, c, g, or t
atggcaaaaaaagtacaagatgctctaagagatttggtttcgctttgcaaaaggcgcggtattatcttcccaggttcggaaatttacgatggcttggctaatacatgggactatggcccttatggggttgagttaaaaaagaatatcaaagatttgtggtggaaaaaatttgtttccagccgcgaagatattgttgggcttgattcttccattctcttgaacccgcgtgtttgggtggcaagcggtcatgttggcagctttagcgacccccttgttgattgcaaggtgtgcaaagaacgcgcccgtgcagaccacttgttggaagataaactcggctccggtgcggctgccggcaaaaattttgcagaaattgccgagatgatgaaagcaaatgcaattcaatgcccaaaatgcggcagcaaagactggacagagccacgctcattcaatttgatgttcaaaacggaaataggcgttgtggaaggaaccggaaatcaggtgtatttgcgccccgaaacggctcagggcattttcataaacttcaaaaacataaccgataactgccggcaaaaaatcccttttggcgttgggcaaataggaaaatcctttagaaacgagataacaccgggcaatttcattttccgcacaagggaatttgagcaaatggaaatggaatttttctgcaaaccaggttccgaacaggaatggtatgcctattggaaaactttttgcatggaatggctcacggaaataggcattcgcaaagaaaaattgagaatgagggaacattcaaaagaggaactttcccattattccaacggcaccagcgacatagaatacgaattcccctttggctggggcgaattgtggggcatagccagcagaacaaattacgatttaacccagcacatcaatgaatctaaagttgatttgcgctatcacgataaaatcacaaacgagaaatacatcccattcgtagttgaacccgcccttggcgtggacagattgcttttaaccctgctctgcgatgcctacgatgttgaaaaaaccgaaacaggcgaagaccgcacggtgtttcattttcacccaagcattgctcctgttaaagccgctattttgccgctttcaaaagatgagcaactaatggctgttgcagaggagctatacaaaaaactcctcaaaaaatttcctgtggaatacgatgaaacccaaagcattggcaaacgctaccgccgccaagacgaaataggaactccatattgcataaccatagattttggcacaataggcaaagacggggaagataaaaaaggtttggtcaccattcgcgagcgtgattctatgaagcaggatattgtgaaaatagaagaggtggaagggtggttgatgaacaaactcacatcaccatag

SEQ ID NO: 49556 - protein, 469 aa, Unknown
  Obtained from environmental sample
  DOMAIN (369)...(465): Anticodon binding domain
  misc_feature (1)..(469): Xaa is any amino acid
MAKKVQDALRDLVSLCKRRGIIFPGSEIYDGLANTWDYGPYGVELKKNIKDLWWKKFVSSREDIVGLDSSILLNPRVWVASGHVGSFSDPLVDCKVCKERARADHLLEDKLGSGAAAGKNFAEIAEMMKANAIQCPKCGSKDWTEPRSFNLMFKTEIGVVEGTGNQVYLRPETAQGIFINFKNITDNCRQKIPFGVGQIGKSFRNEITPGNFIFRTREFEQMEMEFFCKPGSEQEWYAYWKTFCMEWLTEIGIRKEKLRMREHSKEELSHYSNGTSDIEYEFPFGWGELWGIASRTNYDLTQHINESKVDLRYHDKITNEKYIPFVVEPALGVDRLLLTLLCDAYDVEKTETGEDRTVFHFHPSIAPVKAAILPLSKDEQLMAVAEELYKKLLKKFPVEYDETQSIGKRYRRQDEIGTPYCITIDFGTIGKDGEDKKGLVTIRERDSMKQDIVKIEEVEGWLMNKLTSP

SEQ ID NO: 49557 - DNA, 723 bp, Unknown
  Obtained from environmental sample
  misc_feature (1)..(723): n is a, c, g, or t
ttgcgagagcatcggcaatacttcgcggagggcgcggatctggtgcagggcgtaacgacgtactcatacacgcagggcatgaaccgcctcttctggggcctgcaatcggttgacttcctgtcgcacgggataatagccgccgccgccatagcggcgaacctgcccataaactcaaacgccaacaacatggccttccggcgggaggcgttcgagagggccggcgggtacggagggaacgaaaacgtcgtcccgggcgacgacgaccagctgctgcagcgcgtctggaagtacggccgcaagattgccttcatgacggatcagggcggcgcggtggagacggcgcctacgcctaacttatcaatgctcttcgaacaacgcagacggtggggggcggtcaccgtacactacggggcgcggcagatcgcgcttctatcggcggtgttcgcgttctacttgactatcgcggcgatggcagttatgtcgatgtgggcgccggttaggtatctgccggttttcttatcgctgatgcttgtgaagcttacgggtgaattggcgctgatgattccgggaacgcgcatctttaataaaaaacatctgcgaaaatatattgttttggggtcgatagtacatttgccgatggtgttgatgtcggtgttattcggagtgtttggaggatttaagtggaaaggggttaagacggggagaaaagttaaaagattttaa

SEQ ID NO: 49558 - protein, 240 aa, Unknown
  Obtained from environmental sample
  misc_feature (1)..(240): Xaa is any amino acid
MREHRQYFAEGADLVQGVTTYSYTQGMNRLFWGLQSVDFLSHGIIAAAAIAANLPINSNANNMAFRREAFERAGGYGGNENVVPGDDDQLLQRVWKYGRKIAFMTDQGGAVETAPTPNLSMLFEQRRRWGAVTVHYGARQIALLSAVFAFYLTIAAMAVMSMWAPVRYLPVFLSLMLVKLTGELALMIPGTRIFNKKHLRKYIVLGSIVHLPMVLMSVLFGVFGGFKWKGVKTGRKVKRF

SEQ ID NO: 49559 - DNA, 1083 bp, Unknown
  Obtained from environmental sample
  misc_feature (1)..(1083): n is a, c, g, or t
gtgtctgaattgagccagttggagaagaaagcgcaggagatcacgggggtgtcgattaagctcgcctcccccgagaccatcagaaattggtcgtacggcgaggtcaccaagccggagaccataaactaccgctcgttcaaacccgagaaggacggcctcttctgcgagaagatattcggcccggtccgcaactgggagtgtaactgcggtaagtataagcgcatccgctaccgcggcgtcgtttgcgaccgttgcggcgtggaggttatgcactcaaaggtgcggcgcgagcgtatggggcacatagagctcgccgtgcccgtagtccacatttggtttttgaagagcactccctcccatataagttatttgctcgggcttccaaacgccgcccttgagaagatcatctactacgcctcctacgtggtgaccgattccggcgactacgacaaaaaggagctgcccgtaggcaagattttgagcgacgacgagtacgaggcgcatttggagcgtgggaagcatttcgtggcgaagatgggcggtcaggccgtcttggatctcttggccgcggtagacatagaaaagttggtgttggatctgcgcgttctgctgaagaaggagacctcggagcagcgccgtttggagcacctgaagcgtttgcgtgtagccgaggcgttcaatcggtcaaagaacgatcctcagaatatggtgctgcgtgtattgccggtgctgccgccggatctgcggccgctagtgccgcttgagggcgggcgcttcgcgacgtcggatttgaacgatctctaccgccgcgttataaataggaacaaccgcctgaagaagttaattgagatcaaggcgccggaggtcatcctccgcaacgagatgagaatgttacaggaagcggtagacacgctgttcgacaacggccgccgtccgttctccgtaaagggcgagggcaagcggcctctgaaatcgctgagcgacttgttgaagggcaagcaggggcgtttccgcccaaaccctgctgggcaagcgcgtcgactactccggccgcagcgtcatcgttgtcggggcccgaactga

SEQ ID NO: 49560 - protein, 360 aa, Unknown
  Obtained from environmental sample
  DOMAIN (11)...(341): RNA polymerase Rpb1, domain 1
  misc_feature (1)..(360): Xaa is any amino acid
MSELSQLEKKAQEITGVSIKLASPETIRNWSYGEVTKPETINYRSFKPEKDGLFCEKIFGPVRNWECNCGKYKRIRYRGVVCDRCGVEVMHSKVRRERMGHIELAVPVVHIWFLKSTPSHISYLLGLPNAALEKIIYYASYVVTDSGDYDKKELPVGKILSDDEYEAHLERGKHFVAKMGGQAVLDLLAAVDIEKLVLDLRVLLKKETSEQRRLEHLKRLRVAEAFNRSKNDPQNMVLRVLPVLPPDLRPLVPLEGGRFATSDLNDLYRRVINRNNRLKKLIEIKAPEVILRNEMRMLQEAVDTLFDNGRRPFSVKGEGKRPLKSLSDLLKGKQGRFRPNPAGQARRLLRPQRHRCRGPN

SEQ ID NO: 49561 - DNA, 339 bp, Unknown
  Obtained from environmental sample
  misc_feature (1)..(339): n is a, c, g, or t
ttgcgtattaagaaagaggaagaagaagaatttnccactgttatttgttatttgaaaagcttctccacttcctcacgtgtcaaaccagtgtacttcatgattttatcaacagtctcactatcttctatcatgtttcgagcgatggctaatcggccttccgcgcggcctttctccatgccttgctggatgccttcggcgcggccttccgcacggccttcggcacggccttcggcgcggccttccgcgcggccttcggcgcggccttcggcacggcctgctttcatgcctttcttcatgccccttctcatgcctctttccatgcctacatcgcggatataa

SEQ ID NO: 49562 - protein, 112 aa, Unknown
  Obtained from environmental sample
  DOMAIN (51)...(86): PT repeat
  misc_feature (1)..(112): Xaa is any amino acid
MRIKKEEEEEFXTVICYLKSFSTSSRVKPVYFMILSTVSLSSIMFRAMANRPSARPFSMPCWMPSARPSARPSARPSARPSARPSARPSARPAFMPFFMPLLMPLSMPTSRI

SEQ ID NO: 49563 - DNA, 450 bp, Unknown
  Obtained from environmental sample
  misc_feature (1)..(450): n is a, c, g, or t
atgggtaaaaggaaggagcttgcagaggaggcaataaagatggatgcggcgatacaggcggcgaacgagaggatggtgtacgtaaccggtgacaaggacgcgatttgggcatatgagagatatcaaatggcgttgtccgattacaccagtcagatgaattatatccgcgatgtaggcatggaaagaggcatgagaaggggcatgaagaaaggcatgaaagcaggccgtgccgaaggccgcgccgaaggccgcgcggaaggccgcgccgaaggccgtgccgaaggccgtgcggaaggccgcgccgaaggcatccagcaaggcatggagaaaggccgcgcggaaggccgattagccatcgctcgaaacatgatagaagatagtgagactgttgataaaatcatgaagtacactggtttgacacgtgaggaagtggagaagcttttcaaataa

SEQ ID NO: 49564 - protein, 149 aa, Unknown
  Obtained from environmental sample
  misc_feature (1)..(149): Xaa is any amino acid
MGKRKELAEEAIKMDAAIQAANERMVYVTGDKDAIWAYERYQMALSDYTSQMNYIRDVGMERGMRRGMKKGMKAGRAEGRAEGRAEGRAEGRAEGRAEGRAEGIQQGMEKGRAEGRLAIARNMIEDSETVDKIMKYTGLTREEVEKLFK

SEQ ID NO: 49565 - DNA, 1698 bp, Unknown
  Obtained from environmental sample
  misc_feature (1)..(1698): n is a, c, g, or t
atggaggaagtttttagtaagatttataattccggttatttattgctcggcatcatcaacgatatattggatctgtccaaaattgaagcgggtaagctggaattattaccggtcaattacgatgttccaagcctgatcaacgacaccgtgtatttgaatatcatgcgctttgacagtaagccgtttgcgtttgaacttgaagtagatgagaacattccgttaacgctgtttggcgatgaactgcgtatcaaacagatccttaacaatctgctttccaatgcgtttaaatatacgaacgaaggcagggttttgctgtcaatcgccgttgaaaatgctccgcagaacgaaacaggcaaaataatgctcgtccttcgcgtgagtgataccgggcagggcatgacccgcgaacaggtaaatatgctgtttgatgaatatacccgctttaatacggaaacaaatcgcacggttgagggagcgggacttggcatgaatattacaaggcatcttatcaatctaatgaacggtacgatttttatagaaagcgaaccgggcaaaggttcggtatttacagtacggctgccgcaggaaattgttgatgcgggagtattgggcaaatcaatagtggaaaatctcaagcagttccgtctcggcaaaatatcgcagatgaaaaaagcgccgcanattgtacgtgaatatatgccttacggtaaagttttagtcgttgacgacgtggaaacgaatttatacgttgccaaagggcttatgtccccttacggactgtcaatagatacagccgccagcggatttgaagcgattgaaaaaattaaaaacggcgaggtctacgacataatatttatggatcattttatgccgaaaatggacgggatagaagcggaaaaaaatatacgcgatttgggatatacgcggccgattgtcgcgctgactgctaacgcgcttgcgggacaaaccgaagtttttcttgcaagcggatttgacgggtttatttccaaacctatagatatacaccagttgaatgccgtgttaaacaaactgatacgcgacaagtatccggcggaaacgattgaagccgcgtggcggaagaaaaatgaaatggaaaaaagttccgttccgcagtcgtcttttaataaggaacttgcgagaattttcacgcgggacgcggaaaagacttcagtcatactcggagcaatagcggaacgaaatcattacggggacgatgatatacattcgtatatgataaacgttcatgccatgaaaagcgcgctggcgaatatcggtgaacctgaactttccgcttttgccgctaaactggaagaagcagcccggcatcatgatattcctttaatatcaaaagaaacatccgcgtttttatacgagcttaggctggtgattgaaaaaaacagattaattaaaaacagcgctgacaatgaaaatgccggtaatatctcggatgatgacatggtttatctgcgcgaagaactagccgtaataaaagacgcctgcgcgggatatgacaaaaaaaccgccaaagacgcgctgtcgaatctgcggcaaaaaaactggacgaagtctgtcacggaaatgctggagaaaatggcggaacatttactgcatagtgaatttacggaagcggcaaaagaggcggaggaatatataaaccgcgaaagcgctgactcttaa

SEQ ID NO: 49566 - protein, 565 aa, Unknown
  Obtained from environmental sample
  DOMAIN (384)...(472): Hpt domain
  misc_feature (1)..(565): Xaa is any amino acid
MEEVFSKIYNSGYLLLGIINDILDLSKIEAGKLELLPVNYDVPSLINDTVYLNIMRFDSKPFAFELEVDENIPLTLFGDELRIKQILNNLLSNAFKYTNEGRVLLSIAVENAPQNETGKIMLVLRVSDTGQGMTREQVNMLFDEYTRFNTETNRTVEGAGLGMNITRHLINLMNGTIFIESEPGKGSVFTVRLPQEIVDAGVLGKSIVENLKQFRLGKISQMKKAPXIVREYMPYGKVLVVDDVETNLYVAKGLMSPYGLSIDTAASGFEAIEKIKNGEVYDIIFMDHFMPKMDGIEAEKNIRDLGYTRPIVALTANALAGQTEVFLASGFDGFISKPIDIHQLNAVLNKLIRDKYPAETIEAAWRKKNEMEKSSVPQSSFNKELARIFTRDAEKTSVILGAIAERNHYGDDDIHSYMINVHAMKSALANIGEPELSAFAAKLEEAARHHDIPLISKETSAFLYELRLVIEKNRLIKNSADNENAGNISDDDMVYLREELAVIKDACAGYDKKTAKDALSNLRQKNWTKSVTEMLEKMAEHLLHSEFTEAAKEAEEYINRESADS

SEQ ID NO: 49567 - DNA, 393 bp, Unknown
  Obtained from environmental sample
  misc_feature (1)..(393): n is a, c, g, or t
ttggggggcaaaaatacgggcagcgacgagacaaagagggcgtttgcgcagagggccctttcttttgtacagggttttaattacgaacggaatttaacagagagtgattttattaatctggtaaccgctgttgtaaaaggcatcggagactgcgacagccgttcaatgctttgggctataatacttgcgcaggctgacattcactcggcaatcatggtctcgccatattacaatcacgctatgggccttgctgaaatcggcgggattggagcgcgttttgaagctgacggaattggatggcttgtggctgaaaccaccgataaagttgacatcggcttgattgggcaggatgtaagcgatccccggtattggataggcgttatctttaattaa

SEQ ID NO: 49568 - protein, 130 aa, Unknown
  Obtained from environmental sample
  misc_feature (1)..(130): Xaa is any amino acid
MGGKNTGSDETKRAFAQRALSFVQGFNYERNLTESDFINLVTAVVKGIGDCDSRSMLWAIILAQADIHSAIMVSPYYNHAMGLAEIGGIGARFEADGIGWLVAETTDKVDIGLIGQDVSDPRYWIGVIFN

SEQ ID NO: 49569 - DNA, 1809 bp, Unknown
  Obtained from environmental sample
  misc_feature (1)..(1809): n is a, c, g, or t
atgaacaatgaacaaaccgaacaggaaatcttaaaccaactcaatgcgctaatcgaacttgatcccaacagggacaaaaattattataatcggggactgctctacaaagataaaaaactttgggaaaaagccgaagccgatttcgctaaagcgttctccctctggaaagacccgctttacctaagcgaatggcgacaagccgcaatggaaagacaggcgctgcaaacccttgaagagcgaattgctccatacgaggaaattatcaagaataaaactgaaatcatcccgtccgcggaaataatagcggcgatagctttatttgaagaatatgaattgctggaagccctgtttgaaaaaaagatgtttacagctaacatgcttaatgaaaccgtcagcccctctttctcgtactatcagcctacgccgctgtatttaatcacgggtaaaaaagcgctcgaaaaaatgaaagaccctgttaaaatgatacggactctcgcgtccttcggcgcagaccccaacgttccggcgggagacggttctaccatgctttggaaccagtgcaatcccggctttccaatagaaataatgaaaacgtttttggaaatcggagccgatcccaatcaaacaagcgaagacggcgaattcgcatggacgccccttgcgtactgcttaataccaggtaacccggaggacgaaaatggcaacccaatcgcagaccaatatcttcctttggaaagcgagacgctggaaaaagcgaaactgttactcgatcacaacgccgacccgaacctcgcaaacccttcagtgctggacagtccgccgttaatgttcgccgtcagatacgcctctcgtcaaaatgatgagactgcgcagtttcgggcatcggacatggaactcatcaaactgctgcttgaaaaaggcgcaaacccgaactttaccgacagcaaaggcgatacgccgatgatagtagccctcgaaaaaggaatgtgggaaacggcggagttattgttgaaatacggcgcaatcatgcccaatgtaaaaataaatgaaaaagaaaatcagcaaatagacgatgaagacaatatcaaatacatctataaagaaggcgcaacagcgtcggaaacttacgacaaaataaaaaccgatgacgccgttgcgaaagacgcgctggaatattaccgcgcccttgccgaaaaaggcaacaggtcagcccaatttgaacttgccgcaatgctgttcctcgacagccgttttgaagacaaggatcaagccaaagaatggttgaaacgcgccgccaaactcggtcacaagcaggcgaagaacgctctgcaaaacatcaaagactatgagaatatgccgaagggacgccatcgccccgaagtcgctccgccggtcggttacacgattgaccccggcttcgatcaaaagtttgaagatgatttccgggaaattttcacctcacgcttgaaagaagacgaagacttcggcagtgaactctggtcggcgctggcaaacgtcagttggatacacgaagacgacggcgaagaaaccgaatgcagacgcagtttccgaagcgcaggctctatgatagcgtccatgctcggcataggcgactacatcgactggtactgttcaggaccctacgaaacggtcagcgaatacatagccgaaaaaatggcatccaaaggctggcgttataaacttgacggagacggcagcgacataaacactggaagactgtcattcacagacggcagtatctacgaaggcgagattgaaggcgggaaacccccacgcaanggaaaatga

SEQ ID NO: 49570 - protein, 602 aa, Unknown
  Obtained from environmental sample
  DOMAIN (402)...(436): Sel1 repeat
  misc_feature (1)..(602): Xaa is any amino acid
MNNEQTEQEILNQLNALIELDPNRDKNYYNRGLLYKDKKLWEKAEADFAKAFSLWKDPLYLSEWRQAAMERQALQTLEERIAPYEEIIKNKTEIIPSAEIIAAIALFEEYELLEALFEKKMFTANMLNETVSPSFSYYQPTPLYLITGKKALEKMKDPVKMIRTLASFGADPNVPAGDGSTMLWNQCNPGFPIEIMKTFLEIGADPNQTSEDGEFAWTPLAYCLIPGNPEDENGNPIADQYLPLESETLEKAKLLLDHNADPNLANPSVLDSPPLMFAVRYASRQNDETAQFRASDMELIKLLLEKGANPNFTDSKGDTPMIVALEKGMWETAELLLKYGAIMPNVKINEKENQQIDDEDNIKYIYKEGATASETYDKIKTDDAVAKDALEYYRALAEKGNRSAQFELAAMLFLDSRFEDKDQAKEWLKRAAKLGHKQAKNALQNIKDYENMPKGRHRPEVAPPVGYTIDPGFDQKFEDDFREIFTSRLKEDEDFGSELWSALANVSWIHEDDGEETECRRSFRSAGSMIASMLGIGDYIDWYCSGPYETVSEYIAEKMASKGWRYKLDGDGSDINTGRLSFTDGSIYEGEIEGGKPPRXGK

SEQ ID NO: 49571 - DNA, 1398 bp, Unknown
  Obtained from environmental sample
  misc_feature (1)..(1398): n is a, c, g, or t
ttgaaccttctgggccagagcgcggcagcccagcttattgcggacattgagggcggcgctcttgccccgacaatgcttttttcaggccccccggcttcggggaaaggaaccgcagcgctggaattggcgcgggttatttcctgcgaagcgcaggataattcaattggacatgaagaagccgtcaaggcttcacatcgggccttgtggaaatgtccctgtgcggcctgttctcgccaccggcttttgattcatccggatcttctgtgccttggctacaagcccttttccgctgaaattgccgcctcggcttcttcttttttaagggaagccagaagctcctcgtcgcgcatgctttttattcgttctgttcggaagcttttggcgcggttcaatcctgtgctttgggaagatgaaccaaaggcaggcaaaatttctcctttggtaaattcgctggaagaggatcttgatgatctggcctttttgttcacccaaagtactgttgacccaaatccagtaaagaaactggcagaggaaattattaagggctctttcaagctggaatccgaagggatgagcgaaatcattcccatcgggcagataaggcgctccgcattttggggccgtcttgccccggtttccggggggaagacgcttgtcattgaaaacgcccatcgtatgcaggatgaggcgaggaattcgcttttgaagctccttgaggaaccacccgtccgcctgactgtggtactgactgccccaaggcagggcagcctgattccgacaattgtctcaaggctcaggcattatgctttcaattccagggacgccgaagttgagcgggaagttatcagaagggtttttaaggacgaagacagcaaaggtggaatcggcccttacctggattcttttctacctgtttcatccgccgcgcttgaagctctggcggcttttttcgccgcttccgccgcttgcagggccgcctttctttcaaaaaggcagggccgcccgataagcggcgatgttgttcttcttggcaaaaccagcgcccccaaagcggaggcggcaggcctgggagggccccgggaagatacggccgccgttattaacctgataattgaaaaagcggaaaaattcgaactgcgttcccttttctcgcgttttctttcctgccttctggaacaggtttccatgagccggagggcggctgaatcgctgtcgtcggcaaagccgtcggcaaagccgtcggccttgccgtcggccttgccgtcggtatcgtttagccaggcatggaaggaatgttccaattgggcggaaacggcggcgggcatttataacttgaggccggcccaggttttggaaaagctctttattgatataagtctcaggatggcccaattatga

SEQ ID NO: 49572 - protein, 465 aa, Unknown
  Obtained from environmental sample
  misc_feature (1)..(465): Xaa is any amino acid
MNLLGQSAAAQLIADIEGGALAPTMLFSGPPASGKGTAALELARVISCEAQDNSIGHEEAVKASHRALWKCPCAACSRHRLLIHPDLLCLGYKPFSAEIAASASSFLREARSSSSRMLFIRSVRKLLARFNPVLWEDEPKAGKISPLVNSLEEDLDDLAFLFTQSTVDPNPVKKLAEEIIKGSFKLESEGMSEIIPIGQIRRSAFWGRLAPVSGGKTLVIENAHRMQDEARNSLLKLLEEPPVRLTVVLTAPRQGSLIPTIVSRLRHYAFNSRDAEVEREVIRRVFKDEDSKGGIGPYLDSFLPVSSAALEALAAFFAASAACRAAFLSKRQGRPISGDVVLLGKTSAPKAEAAGLGGPREDTAAVINLIIEKAEKFELRSLFSRFLSCLLEQVSMSRRAAESLSSAKPSAKPSALPSALPSVSFSQAWKECSNWAETAAGIYNLRPAQVLEKLFIDISLRMAQL

SEQ ID NO: 49573 - DNA, 363 bp, Unknown
  Obtained from environmental sample
  misc_feature (1)..(363): n is a, c, g, or t
atgggtattcttatttatgaggtggaaatgccaaaacaaatggtaagtattagagaaattctggctctcaatttgaaagaataccgccgtaaaaaaagttttacacaggaaaaactagccgaaaaagcaggaatttcagcgaattacctttctatggtggaaatatgccgacagtttcccactcctgaagttttggatcgtcttgcccataccctcaatattcaaacttttcagctttttgacccttcgactacgccagaaggggctttattgcatttggaacaaactattgttgaaaatatagagaaagttgttagaacaactattaaacaagcattttcggaagaaaggtcgccaaaatag

SEQ ID NO: 49574 - protein, 120 aa, Unknown
  Obtained from environmental sample
  DOMAIN (25)...(79): Helix-turn-helix
  misc_feature (1)..(120): Xaa is any amino acid
MGILIYEVEMPKQMVSIREILALNLKEYRRKKSFTQEKLAEKAGISANYLSMVEICRQFPTPEVLDRLAHTLNIQTFQLFDPSTTPEGALLHLEQTIVENIEKVVRTTIKQAFSEERSPK

SEQ ID NO: 49575 - DNA, 390 bp, Unknown
  Obtained from environmental sample
  misc_feature (1)..(390): n is a, c, g, or t
ttgtgccgcgccgagttggatagggcgggggaagcgattgtggtttcgttgcgttttgagggggagtttgaggttgagtgcgcccgttgcctgacggcggttgccgtacccgtcggcggcgagttgcgccttgtattgaaagagacgcagggaaagcacggacccgcgtttgacgacgaggacgcggacttttttttcaacgccgttaataatctggtgtacttttgttcggccctctacgacgagataatgattgcgttgcccatgatgccgctgtgttcggagaattgcgccggcgcgtgggtcgcttcggcgtccgagacggaggacgccggtgagcgtgaggtagatccgcgatgggcggggttgttgaaactcaaacccggttga

SEQ ID NO: 49576 - protein, 129 aa, Unknown
  Obtained from environmental sample
  DOMAIN (1)...(125): Uncharacterized ACR, COG1399
  misc_feature (1)..(129): Xaa is any amino acid
MCRAELDRAGEAIVVSLRFEGEFEVECARCLTAVAVPVGGELRLVLKETQGKHGPAFDDEDADFFFNAVNNLVYFCSALYDEIMIALPMMPLCSENCAGAWVASASETEDAGEREVDPRWAGLLKLKPG

SEQ ID NO: 49577 - DNA, 930 bp, Unknown
  Obtained from environmental sample
  misc_feature (1)..(930): n is a, c, g, or t
atggtacgcttagccgtagatgttgacagcggtgatttcggcccggaggctatggtgcgcggcgtaatcgcggcgcgccttgcggcatccgagccttttgccgtttgcctatgcgggaacgaggagcggattcggcgggtgcttgatgatgtcggggaggacgccggtaggtgtgagtttaccatagagcactgtccggatgagataacggagggtgataggcgcgccacggtttggaaaacgaagaagggggcctccatcgttcgttgcgtagcgttgcagaaggagggatgcgcggacgcctcggtaagcgccggggacacgggggttttgatcgggtcggcgctgtttattttggggtgtgcggacggtgtggcgcgtccggcgctcgccgcgttcattccgacacctaagaagccggttctaataatggacgttggggcgaatatcaactgccgggcggagttgctggccggatttgctaggttgggttgcgaatacgtgcgcagcgttcgcggcggcggggcgccgaaggccgcgttgttgaacataggttctgagccgcacaaaggtccgcccgaagtaagggccgcggcggaacttctgagcgattacgaaaactacataggattcatagagggcaacagggtgttttcaggggaggcggacgtagtggtctgcgacggctttgtgggcaacgtcctgcttaaagcctgcgagagtttctacgccctgacgtcggagttcttggccgacagtcgggatacctacgagaggctgtcgcaaaagataagcgcgctgaattcggaaaactacggggcggtgccattcctgggcataaaaggcacagtgctgaaagcccacgggggatcgtccgtaacatcaataaaaaacgcggtattaacggctgttaaggccgtaagtagttga

SEQ ID NO: 49578 - protein, 309 aa, Unknown
  Obtained from environmental sample
  DOMAIN (2)...(309): Fatty acid synthesis protein
  misc_feature (1)..(309): Xaa is any amino acid
MVRLAVDVDSGDFGPEAMVRGVIAARLAASEPFAVCLCGNEERIRRVLDDVGEDAGRCEFTIEHCPDEITEGDRRATVWKTKKGASIVRCVALQKEGCADASVSAGDTGVLIGSALFILGCADGVARPALAAFIPTPKKPVLIMDVGANINCRAELLAGFARLGCEYVRSVRGGGAPKAALLNIGSEPHKGPPEVRAAAELLSDYENYIGFIEGNRVFSGEADVVVCDGFVGNVLLKACESFYALTSEFLADSRDTYERLSQKISALNSENYGAVPFLGIKGTVLKAHGGSSVTSIKNAVLTAVKAVSS

SEQ ID NO: 49579 - DNA, 780 bp, Unknown
  Obtained from environmental sample
  misc_feature (1)..(780): n is a, c, g, or t
atgaaagccctgctccccctggttcccgcccagtttgaatatctcggtttcccgccggagtacgcgcatgactttgaaaatgaatcngcctcggcgcaatattgtcttcccacagacgcaaacgcgctttccattaccggtatttcaaaactgtggataggcggctacggaagaaattactactcctgcgttctgcccctcaagccaacagacgaggcgatcttcagggccattgccgaagaattcgattctgtttattttatcaacaaagcaaaggatataggacgcgacatggatacccttaccaggactatgctgttgttctttcttgccgcttatatggtcatatctgtcgtggtctgtgtcgcgtatccatggcgtgacagcgtaaaaatctgcgcggtccccctggtgattgttttgtccgcgctggctgtgttgtctctcaacaaaattccacttggctttttttcagccgcggctcttgttctggtttttggtttgggcctggactatattttttacatgacaggaaaaaagcagggagaagaaaaaccgcttacatcccttgcggtagttttatcgttcctgacaactcttctttcttttggcgctttggttttaagcaattttacgccgactcatatttttggacttaccgtttccgccggactgggcgcggcgtttgttttcgctatgcttttgcaggcaaggacgcaacgaaggcaccgcgttaagcggtgtttaacagcatatgcggcagtgcgggagccccgataa

SEQ ID NO: 49580 - protein, 259 aa, Unknown
  Obtained from environmental sample
  misc_feature (1)..(259): Xaa is any amino acid
MKALLPLVPAQFEYLGFPPEYAHDFENESASAQYCLPTDANALSITGISKLWIGGYGRNYYSCVLPLKPTDEAIFRAIAEEFDSVYFINKAKDIGRDMDTLTRTMLLFFLAAYMVISVVVCVAYPWRDSVKICAVPLVIVLSALAVLSLNKIPLGFFSAAALVLVFGLGLDYIFYMTGKKQGEEKPLTSLAVVLSFLTTLLSFGALVLSNFTPTHIFGLTVSAGLGAAFVFAMLLQARTQRRHRVKRCLTAYAAVREPR

SEQ ID NO: 49581 - DNA, 792 bp, Unknown
  Obtained from environmental sample
  misc_feature (1)..(792): n is a, c, g, or t
ttgattttgtttctgtatgccttccgttccgttttacccgtcttttcttccattttggcggcaggggtttctttatgtattgccgccgcagccgcattattgattttcagagaaattcatatcatcacctttgttttcggaacaacgcttatcggaacctgcgtggattattcggctcatttttttgttcattggaaggggaatccgtctttgaaaaaaggggcggaaattcgttcccgtatttcaaaaagcgttatcatgagttttatttctacggaaatttgtttttgtgtttttctgttcgccccgttccctattctgaaacaatttgcagtcttttctatggcggggcttctcagctcttttctcacttgtttctgcgtctacccccgcctgaaaataccggaacaaaacaaaagacattttcctctttttgaaagcaaaatttttctccggcttaaaaatctatctttgccgaggataacaaaacccgctcttgccgccgccctaattcttatcgtcctgacgcttattatttttaatttttcagagataaaaatagaaaacaacctttcttcactttacaccatgtcagctccattgctggaatctgaaaaacgggcggcgcaagttttagattacggttcttccggttggtactttattgtaacaggggcaaacgccgaagaaacactggagaacgaagaacctcttatctctcgcttggaagaagaaattctccgcggaaatcttgaatcttcactcgggacttcggtttttatcccttcataa

SEQ ID NO: 49582 - protein, 263 aa, Unknown
  Obtained from environmental sample
  SIGNAL (1)...(20)
  misc_feature (1)..(263): Xaa is any amino acid
MILFLYAFRSVLPVFSSILAAGVSLCIAAAAALLIFREIHIITFVFGTTLIGTCVDYSAHFFVHWKGNPSLKKGAEIRSRISKSVIMSFISTEICFCVFLFAPFPILKQFAVFSMAGLLSSFLTCFCVYPRLKIPEQNKRHFPLFESKIFLRLKNLSLPRITKPALAAALILIVLTLIIFNFSEIKIENNLSSLYTMSAPLLESEKRAAQVLDYGSSGWYFIVTGANAEETLENEEPLISRLEEEILRGNLESSLGTSVFIPS

SEQ ID NO: 49583 - DNA, 882 bp, Unknown
  Obtained from environmental sample
  misc_feature (1)..(882): n is a, c, g, or t
atggccatgctatgccgcgcaatgcaaagccggtttccaaacctgaaaatttccggcctttgccacagcgtacagggaaccgctatgatgctcgcccattggattggcgcaaaagacgaagatatcacatacacatgcgcgggaatcaaccatcaggctttttatttggattataaatggaagggaaaggacgcttatcctcttttaagggaagcgatgaaagatccaaaaatctataatgaggaaattgtgcgcaatgaaatgtttttgcttttggattattacccgacagaatcttcgggccacaattcggaatacaacgcatggttccgcaagcgtcccgaattaatcgaaaagttctgcacacacggaacgggctggaatccgggcgtttacgcttatattttaaatgaatacctcatcaaaaaagattcatggcaaaaagaaattgaagactggttaaatgagcaaaaggtcaatctgagccgtggtcatgaatacgcggcttacatttttaacgcaatgttcggcgataaaactatgtttaagtttaacggcaatgttttgaacaaaggcttaattgataatcttccgcaaggcgcttgcgtagaagtgccagtgcttgcgtctccccacggatttgaagcgataggggttggcaagcttcccgatcaattggcggctcttgtgcacacaagttccatttgtgaagaattggcagttgaaggcgctcttgcccgtgactcgcgaaaagtttatcaggcaatcgcctttgatcccttgacttcggcggtgttggtcattcaggaaataaaggaaatgacaaaaaaaatgttcaagcagaacgccgactatctgccggggtataattacgatttatga

SEQ ID NO: 49584 - protein, 293 aa, Unknown
  Obtained from environmental sample
  DOMAIN (1)...(262): Family 4 glycosyl hydrolase
  misc_feature (1)..(293): Xaa is any amino acid
MAMLCRAMQSRFPNLKISGLCHSVQGTAMMLAHWIGAKDEDITYTCAGINHQAFYLDYKWKGKDAYPLLREAMKDPKIYNEEIVRNEMFLLLDYYPTESSGHNSEYNAWFRKRPELIEKFCTHGTGWNPGVYAYILNEYLIKKDSWQKEIEDWLNEQKVNLSRGHEYAAYIFNAMFGDKTMFKFNGNVLNKGLIDNLPQGACVEVPVLASPHGFEAIGVGKLPDQLAALVHTSSICEELAVEGALARDSRKVYQAIAFDPLTSAVLVIQEIKEMTKKMFKQNADYLPGYNYDL

SEQ ID NO: 49585 - DNA, 807 bp, Unknown
  Obtained from environmental sample
  misc_feature (1)..(807): n is a, c, g, or t
atggtgtggggtggtggcggcttgttgggagacggctggctaaactcggttgattttgcaggcggaaacgttgtgcatatatcttcgggtgtgtctggattagtgctttgtttattacttggcaggcgtgaaggctatgaacttcatacttatagaattcacaatattccttttgttatgctcggtatggctcttctgtggttcggctggtacggcttcaatgccggtagtgctggtgctgcaaatggcttggctgcacatgcatttgcaacaacgtctatttcggcagctgcggcaatgctttcgtggatggcgatggatgttattttcagcggcaaacccactctaatcggtgcttgcacaggagttgtggcgggcttggttggaataaccccagctgctggttttgttccaatttgggctgcttttataataggctttttggtaagccctgtttgctatggcggcattttgctggttaaaaagaaactgaaaatagacgattcattagacgcctttggctgccacggcataggaggtatttttggcgggcttatgactggtttgtttgccgaccccaaggtcaacgaaaccgctggcctgttctttggcgaccccgcacagctcggacgtcaggcactcgctatagtaatcagcatagcgcttgctgttgtaggctcattggtttgcgccggaattgtccgttctttcacatcgctacgcgttgatagaaaacatgaacttactgggctagatgtatctgaacacggcgaaaacgcatatccagcatataacggtttggattaa

SEQ ID NO: 49586 - protein, 268 aa, Unknown
  Obtained from environmental sample
  DOMAIN (1)...(261): Ammonium Transporter Family
  misc_feature (1)..(268): Xaa is any amino acid
MVWGGGGLLGDGWLNSVDFAGGNVVHISSGVSGLVLCLLLGRREGYELHTYRIHNIPFVMLGMALLWFGWYGFNAGSAGAANGLAAHAFATTSISAAAAMLSWMAMDVIFSGKPTLIGACTGVVAGLVGITPAAGFVPIWAAFIIGFLVSPVCYGGILLVKKKLKIDDSLDAFGCHGIGGIFGGLMTGLFADPKVNETAGLFFGDPAQLGRQALAIVISIALAVVGSLVCAGIVRSFTSLRVDRKHELTGLDVSEHGENAYPAYNGLD

SEQ ID NO: 49587 - DNA, 345 bp, Unknown
  Obtained from environmental sample
  misc_feature (1)..(345): n is a, c, g, or t
atgattaaaatagaagctattgttcgcgaagagaagcttgaggatgtgaaggcagccttgaacaaaattgaagtcactggtattaccgtttttcaggttatgggatgcggtgtgcaaaaaggatataccgaattggtgcgtgggcagcaggttgactatgccctaaggccaaaagtgaagttcgaaattgttgtgtccactgaagaatgggcagataaaacaatcaaggccattcaagaagcagcctatacaggaagtgtgggagacggtaaaattttcgcttatgatttgcgttccgttatgcggattcgcactaaggaaactggaacccaagccataaactga

SEQ ID NO: 49588 - protein, 114 aa, Unknown
  Obtained from environmental sample
  DOMAIN (4)...(106): Nitrogen regulatory protein P-II
  misc_feature (1)..(114): Xaa is any amino acid
MIKIEAIVREEKLEDVKAALNKIEVTGITVFQVMGCGVQKGYTELVRGQQVDYALRPKVKFEIVVSTEEWADKTIKAIQEAAYTGSVGDGKIFAYDLRSVMRIRTKETGTQAIN

SEQ ID NO: 49589 - DNA, 1032 bp, Unknown
  Obtained from environmental sample
  misc_feature (1)..(1032): n is a, c, g, or t
gtggacgaaaaacagcaaagactcgctgtacacatagacaaggatatccccaaaaccctgatagccgacgatcaaaggctggctcaggttgttgccaatcttttgagcaatgcggttaagtttacgccggaaaatggcgcgattaccctggaagcgcgttttatgggagaggaaagaggtttttgcaccatacagatttccgtagccgatacgggaataggcataaacagcgaacagcaaaaacgcctgttcaattcctttcagcaggcggagagcagcacgacgcgcaaatacggcggtacggggctgggacttgctatttcaaaaagcatagtggaattgatgggcggaaaaatctgggttaaatcagaatcgcataaaggctcaaactttgcctttaccattaaggccaagcgcggcacattaaaagaaaaaggcgcgcttttacccccgggaataaaattagaagatattcgtattatggtcatagatgatgatcccgatatattggcgtatttcaatgatattatgcatgaatacggaatgaactgcgatactgcgtccggcggagaagaagcgcttaagcttgtagaaaagaacggtccctatcatatttattttgcggactggaagatgcctgttatggacggcatacagcttacgcgcgaactcaagtcgcggggtccccaaaactccgtagtgataatgatttccgccgttgaatggagcgtgatttccgaagaatccaaaaaagcgggagtggacaaattcctgtccaagcccctgttcccgtctaccatttttgaagctatcaatgaatgtataggcgcgggaaaagagcaggaagaagaagaacaggcggctgtcggcagctcatacagcgggcggaacattctgcttgtagaagatgtggaaattaaccgcgaggtagttcaggtgctgcttgaaccgacgcagctggaaatagactgcgctgaaaactggtatacaggcagtaaaaatgttaaagaagcgccggacaagtacgattga

SEQ ID NO: 49590 - protein, 343 aa, Unknown
  Obtained from environmental sample
  DOMAIN (158)...(272): Response regulator receiver domain
  misc_feature (1)..(343): Xaa is any amino acid
MDEKQQRLAVHIDKDIPKTLIADDQRLAQVVANLLSNAVKFTPENGAITLEARFMGEERGFCTIQISVADTGIGINSEQQKRLFNSFQQAESSTTRKYGGTGLGLAISKSIVELMGGKIWVKSESHKGSNFAFTIKAKRGTLKEKGALLPPGIKLEDIRIMVIDDDPDILAYFNDIMHEYGMNCDTASGGEEALKLVEKNGPYHIYFADWKMPVMDGIQLTRELKSRGPQNSVVIMISAVEWSVISEESKKAGVDKFLSKPLFPSTIFEAINECIGAGKEQEEEEQAAVGSSYSGRNILLVEDVEINREVVQVLLEPTQLEIDCAENWYTGSKNVKEAPDKYD

SEQ ID NO: 49591 - DNA, 522 bp, Unknown
  Obtained from environmental sample
  misc_feature (1)..(522): n is a, c, g, or t
atgccaattccaaaagaaatgcaagccaaatacaatgaaattgccgcactgatcattgatttctgtgacaagaaacttaatgataactataaaaatttatgcctgcaattattggaaaaactctgccgcaagcgtctgtctccattgctttcagggcgcgcccatacatgggcggctggaatagtgtataccataggctcaaacaattttatctttgacaaaacgcaaaagattcatttgaccgccaatgagcttgtcgctccttttggcgtttcctccagtacagccagcagtaaagccgctgaaataaagaaaatgtttaagatcgattatttcaataccgaatggatgctaccggagcatatagaaaacaattcgatggtttggacgatcatgattgacggattttttgttgatatccgcgatatgccgctggaaatacaggagcaagcgtttgaaatgggaatcattccgtatataccaggtgaaaaaaataacaggaacaacaggcaggaaaagtaa

SEQ ID NO: 49592 - protein, 173 aa, Unknown
  Obtained from environmental sample
  misc_feature (1)..(173): Xaa is any amino acid
MPIPKEMQAKYNEIAALIIDFCDKKLNDNYKNLCLQLLEKLCRKRLSPLLSGRAHTWAAGIVYTIGSNNFIFDKTQKIHLTANELVAPFGVSSSTASSKAAEIKKMFKIDYFNTEWMLPEHIENNSMVWTIMIDGFFVDIRDMPLEIQEQAFEMGIIPYIPGEKNNRNNRQEK

SEQ ID NO: 49593 - DNA, 486 bp, Unknown
  Obtained from environmental sample
  misc_feature (1)..(486): n is a, c, g, or t
atgctcaaaccaaatatcaagtacagggtaacattgaccgaggaagaacggaaaacattgcagaatctggttcgtactggaaatacagcgggctaccggatacgccatgcacagattttgcttgcgctggatgaaatgcctgcgaatgaatcatggaccgatgaaaagacaagcaaagcgtatggggcacacatacgcacaataggaaacataaggaaacggttcgtggaggaaggcatgcaagccgcgctggaaagaaaagaaagggaaaacccgccgttctcaaaaatagacggggaagccgaagcgaaaataatcgcccttacttgcagccagccgcctgaaggacactgccgatggactctgaaattaatagcgaacaaggtggtagaactgggaatactggacagcatctcggatcatgggataggagacctgttaaaaaaaacgaaattcagccatggctacagaaggaatggtgcatag

SEQ ID NO: 49594 - protein, 161 aa, Unknown
  Obtained from environmental sample
  misc_feature (1)..(161): Xaa is any amino acid
MLKPNIKYRVTLTEEERKTLQNLVRTGNTAGYRIRHAQILLALDEMPANESWTDEKTSKAYGAHIRTIGNIRKRFVEEGMQAALERKERENPPFSKIDGEAEAKIIALTCSQPPEGHCRWTLKLIANKVVELGILDSISDHGIGDLLKKTKFSHGYRRNGA

SEQ ID NO: 49595 - DNA, 1284 bp, Unknown
  Obtained from environmental sample
  misc_feature (1)..(1284): n is a, c, g, or t
ttgagcagacgttttcaaattcaagttttggctttagaccgggacggaacgcgcatcaggccatgcaacgtgcaaagagatactatgaggaagggtacaagtatgcacggaaatcaattttcaaaaacaccctctaatcacgataataactgtatggataaaaccatcaggatcacggagtattttgcggatgttgagactaccaaagaacacaacggctatttttgcagcgtgggggaggcgctgaccgtcgtgatactcggttctttgtgcggcctaagaaacgtcagccaaatcagccaatgggcagccaacgagcgaatcaaaggctttttagccgggcactttcgcatagaaagaataccgtgttactattggatgctgtgcttgctcgccctaattaagccaacgtctttaaaccaatgcctgaccagacgggtgcaatcgcttttgcctgacggaatgaaggcaatgaccatttcatttgacggcaaaacggtatgttctaccggaaagatggatgcgtacgacagccctctgcacattataagcgcacaccttgcggaactggggataacccttgcaggccttaagacggacggaaagagcaacgagatacccgccgtgcgggaactgataggcatgcttgaggttgccggctgcgttatcgttgccgatgcgatgcattgccagaaggaaacggcggcgcttgttgtgggaaaacaggcggattaccttttaaacgtcaaagacaaccagcctgcgctgaaaaacgacatagaagagtacgtgcaggacggcggtttgagaaagaccatggacactttcacgacatgcgagaaaaacggcgggaggattgagatacgcagtgggtttgtcacgcacgatattgactggcttcatggcaaggacgaatggaaaaaccttgcgtgcattggggcaatacaccgacaattcacctacaaggacaaaacaaccgatgaatggcactgctacatttccagccgggaacttaaggcggaaagcctgttaaagcacgcccgtttagaatggtcggtagaatcgatgcattggcttttggatgtgcattttggagaggaccgctgccgtgtcgaaggcgaaagcgtgcagcaggtcttaaatgcggtacgcaaaatcgctataaacagcgttaagacctataaagcaaagaccggctcaaagctccctttgtcgaaaatcatgtttggctgtctgctggattgccagaagctggttcctgtcttgttgtcatgtgaaaattga

SEQ ID NO: 49596 - protein, 427 aa, Unknown
  Obtained from environmental sample
  DOMAIN (159)...(390): Transposase DDE domain
  misc_feature (1)..(427): Xaa is any amino acid
MSRRFQIQVLALDRDGTRIRPCNVQRDTMRKGTSMHGNQFSKTPSNHDNNCMDKTIRITEYFADVETTKEHNGYFCSVGEALTVVILGSLCGLRNVSQISQWAANERIKGFLAGHFRIERIPCYYWMLCLLALIKPTSLNQCLTRRVQSLLPDGMKAMTISFDGKTVCSTGKMDAYDSPLHIISAHLAELGITLAGLKTDGKSNEIPAVRELIGMLEVAGCVIVADAMHCQKETAALVVGKQADYLLNVKDNQPALKNDIEEYVQDGGLRKTMDTFTTCEKNGGRIEIRSGFVTHDIDWLHGKDEWKNLACIGAIHRQFTYKDKTTDEWHCYISSRELKAESLLKHARLEWSVESMHWLLDVHFGEDRCRVEGESVQQVLNAVRKIAINSVKTYKAKTGSKLPLSKIMFGCLLDCQKLVPVLLSCEN

SEQ ID NO: 49597 - DNA, 411 bp, Unknown
  Obtained from environmental sample
  misc_feature (1)..(411): n is a, c, g, or t
ttgagcttgaacaatgtatggaaagcgcaggggcgggtaatagcgaacagggggtcagcgggaatagacgggatggcagtcgaggaattgaacgactatctcatcaatcactatctggaattgtgtgaaagcatacggggcggatggtacaaacccaagcctgtcaaacgggtggagataccgaaacctgacggcgggaaacggctgttgggagtgccgacggtaatagaccggatggtacagcaggcgatggtacaagtcctgcagccgatatttgagcagacgttttcaaattcaagttttggctttagaccgggacggaacgcgcatcaggccatgcaacgtgcaaagagatactatgaggaagggtacaagtatgcacggaaatcaattttcaaaaacaccctctaa

SEQ ID NO: 49598 - protein, 136 aa, Unknown
  Obtained from environmental sample
  misc_feature (1)..(136): Xaa is any amino acid
MSLNNVWKAQGRVIANRGSAGIDGMAVEELNDYLINHYLELCESIRGGWYKPKPVKRVEIPKPDGGKRLLGVPTVIDRMVQQAMVQVLQPIFEQTFSNSSFGFRPGRNAHQAMQRAKRYYEEGYKYARKSIFKNTL

SEQ ID NO: 49599 - DNA, 1008 bp, Unknown
  Obtained from environmental sample
  misc_feature (1)..(1008): n is a, c, g, or t
ttgaaaaataccaacaaaaacggcaaagcttatctcggcggaaacataactgtctcccctctgaccttccttgacgatttaaccgaaaacgacaatgttgttcttgagctctcaagttttcaacttggagatttgagggacaaaccgattaaaccgtgcgcggcggttcttacagccattatgtctgaccatcaggatcgttataattcaatggaagactatattgatgataaaaaatatatctaccggggacaggacaagaacgacatcacggtagctggcgacgacagttggggaaaaagtttcctcgccgaatccaaagcgcgccctcttgtctattctcatactgttttgccggaaggaataaacggaggctggctctctagcggcggtcccgcattcgcccgtctttcaaactgggaaggcgtctcgggcgaaatcgaagcgcttgtcccctcccgcctttttacaccgggtgaacatcaaaaaataaacctgctctccgcggctctcgctgtttacggctttggaacaaaagcaaaagatattcacgactcattgtcaaccttttccggcatcgaacaccgccttgaattgttccacacagcaaacggggcgcgttattacaacgacagcgccgccacaatccccgaagccgccgccgcctgtgtcgaagccctaagcgcggaggggcctctcgtccttgtaaccggcggcacggacaaaaaccttgatttctcaccgcttgttaaagtttgcggaaaagccgccgctataattttactcgcaggcagcggcagcgaaaaactttcacgcctgttaggtgaagctggtatcagttactcagggccttttgataacctcgaaaacgccgtccgctgtgccgttgaaaaagccgcgaatggaagcgttgtagcgctctcccccggctgcgccagcttcgggatgttcctcaacgaattcgaccgtgggcgcaaatggaaggacgctgttatacgtatggcttga

SEQ ID NO: 49600 - protein, 335 aa, Unknown
  Obtained from environmental sample
  DOMAIN (2)...(173): Mur ligase middle domain
  misc_feature (1)..(335): Xaa is any amino acid
MKNTNKNGKAYLGGNITVSPLTFLDDLTENDNVVLELSSFQLGDLRDKPIKPCAAVLTAIMSDHQDRYNSMEDYIDDKKYIYRGQDKNDITVAGDDSWGKSFLAESKARPLVYSHTVLPEGINGGWLSSGGPAFARLSNWEGVSGEIEALVPSRLFTPGEHQKINLLSAALAVYGFGTKAKDIHDSLSTFSGIEHRLELFHTANGARYYNDSAATIPEAAAACVEALSAEGPLVLVTGGTDKNLDFSPLVKVCGKAAAIILLAGSGSEKLSRLLGEAGISYSGPFDNLENAVRCAVEKAANGSVVALSPGCASFGMFLNEFDRGRKWKDAVIRMA

SEQ ID NO: 49601 - DNA, 564 bp, Unknown
  Obtained from environmental sample
  misc_feature (1)..(564): n is a, c, g, or t
atggatctggaaatgttacgaaaacgcgcttctattatcaagcatgtgcgttctttctttgatacaaaagactaccttgaacttgacactcccttgctctcaagcgatttaatcccggaatcctgccttgaagtttttgagacgaaacggcttttcccgcatggtagcaagaaagagagttctcctttatggcttatcccatcaccggaaatttggatgaaaaagatcattgctcagcataaaaagaatgtgtaccaaatttgcaagtgtttccgtaacggggaatctagcgggtatttgcacaatccggagtttacaatgttggagtactatacaatggaagcgaattatatggattctctttcgttaacagaggaactatttgccttccttgcgcaaaagaccgataatcctctcttaagcccgccttttgagcgcatatttatgggcgaagcttttgaaaaatgggccggctttgaccttttcgccgaggcggaaaaaaaaggcggactgaaaacgcaggcgcttaggcttgggcttgatcccatgcccgaatttgcctaa

SEQ ID NO: 49602 - protein, 187 aa, Unknown
  Obtained from environmental sample
  DOMAIN (1)...(186): tRNA synthetases class II (D, K and N)
  misc_feature (1)..(187): Xaa is any amino acid
MDLEMLRKRASIIKHVRSFFDTKDYLELDTPLLSSDLIPESCLEVFETKRLFPHGSKKESSPLWLIPSPEIWMKKIIAQHKKNVYQICKCFRNGESSGYLHNPEFTMLEYYTMEANYMDSLSLTEELFAFLAQKTDNPLLSPPFERIFMGEAFEKWAGFDLFAEAEKKGGLKTQALRLGLDPMPEFA

SEQ ID NO: 49603 - DNA, 636 bp, Unknown
  Obtained from environmental sample
  misc_feature (1)..(636): n is a, c, g, or t
atggcgactcgcggcgcgttaagaacttgcgtaaagccttcgttcagaaaaggtatcgctctgcgcgtatcagcaggctcatcaatgttaaatgacgatctcagccatgaacttgtctccgtagacgtagaagacgcaatccgcatgaatgcggactgtatggcggtgcaaacttttataggcgctgacggccagttatcaagtatcgaaaacctttccaaagtgataaatgccggcgcgcgttacagtattcccacgctaggcgttattgcagtaggcaaagatatggaaaggacaagtaagtacttcaaacttgcaacacgcattgtagcggaacttggagcgcatatcgtcaagacatactactgcgatgactttgaagaggttactgccgcatgtcctgttccgattgtagtggcaggcggaaagaagctgactgaaaaagaagctctgacaatggcgtacaagtcaatacaaggcggcgcatgcggtcttgatatgggcagaaatatttttcaaagttatcatcctgccgcaatggcggatactgtaggaaaaattgtgcataacaagtacacggacgcggaagcatgggaatatttctgcgaaaaaacaaagaaaaaaactaacgtctaa

SEQ ID NO: 49604 - protein, 211 aa, Unknown
  Obtained from environmental sample
  DOMAIN (7)...(174): DeoC/LacD family aldolase
  misc_feature (1)..(211): Xaa is any amino acid
MATRGALRTCVKPSFRKGIALRVSAGSSMLNDDLSHELVSVDVEDAIRMNADCMAVQTFIGADGQLSSIENLSKVINAGARYSIPTLGVIAVGKDMERTSKYFKLATRIVAELGAHIVKTYYCDDFEEVTAACPVPIVVAGGKKLTEKEALTMAYKSIQGGACGLDMGRNIFQSYHPAAMADTVGKIVHNKYTDAEAWEYFCEKTKKKTNV

SEQ ID NO: 49605 - DNA, 378 bp, Unknown
  Obtained from environmental sample
  misc_feature (1)..(378): n is a, c, g, or t
atgaaaaaggttataaaaacaaataaaaacgtaaaaacaactaaaaagaccatagtaaaaaaagccgcgcttaaaataactaaaaccacgtctaaactaaaaaccgtacctgccaaaaaaacagtaaaaaagccgttggacagagcatcggcggcaaaaaagccggcggtaaaaaaattgacggttaaaccgcctaaaaaaactgctaaaaagcctgtatctactaagaaaccaatagcttcaaaaccggcagatgaaaaatctgtaccggaaaagaaacctgccccagcgccggttcagccaaatcttggacttcccgacggcagtgaataccagcaaacaggtctgcgccgcccccttattgtattcccaaagtaa

SEQ ID NO: 49606 - protein, 125 aa, Unknown
  Obtained from environmental sample
  misc_feature (1)..(125): Xaa is any amino acid
MKKVIKTNKNVKTTKKTIVKKAALKITKTTSKLKTVPAKKTVKKPLDRASAAKKPAVKKLTVKPPKKTAKKPVSTKKPIASKPADEKSVPEKKPAPAPVQPNLGLPDGSEYQQTGLRRPLIVFPK

SEQ ID NO: 49607 - DNA, 354 bp, Unknown
  Obtained from environmental sample
  misc_feature (1)..(354): n is a, c, g, or t
atgtttataatagacgaaaaagaaaaagaataccgttttggcgactcagggccaaagtaccttatgcaggggccgcgcatgaattttgcgcttgttcaatttatgccgggacaggactttaaagcccattatcataatgtaatggaagaaaacttttttgtacttgagggaacggttacaattgttgttaacgggaaaccgcataccttaactcaaggacaatttatccacatagaaccgggtgaaacccactatgtaattaataagtcttcatctaaggtacgcatgacagcctgccttgccccgttcaaggagggagacaaggtagaagttgataatcctgtattggagtag

SEQ ID NO: 49608 - protein, 117 aa, Unknown
  Obtained from environmental sample
  DOMAIN (30)...(103): Cupin domain
  misc_feature (1)..(117): Xaa is any amino acid
MFIIDEKEKEYRFGDSGPKYLMQGPRMNFALVQFMPGQDFKAHYHNVMEENFFVLEGTVTIVVNGKPHTLTQGQFIHIEPGETHYVINKSSSKVRMTACLAPFKEGDKVEVDNPVLE

SEQ ID NO: 49609 - DNA, 318 bp, Unknown
  Obtained from environmental sample
  misc_feature (1)..(318): n is a, c, g, or t
gtgttcgcaggcggagcggcaaaaagtttcctctggccgcagatactcgcagacgttcttggcattccggttgacgttcctgttgtaaaagaagccactgcgttgggaacagccgtaatggcaggtaagggtatcgggttgtacacggacataaaggaagccgttaataatctggtaaaaattgaaaaaacatttttgcctgataaagaaaaccgtgaagtttatgatagggcgtaccaaaactggaaagccgcatatcagcctcttctgcgtttaagcgatgaaaatataacgaaatatatgtggcgttctccataa

SEQ ID NO: 49610 - protein, 105 aa, Unknown
  Obtained from environmental sample
  misc_feature (1)..(105): Xaa is any amino acid
MFAGGAAKSFLWPQILADVLGIPVDVPVVKEATALGTAVMAGKGIGLYTDIKEAVNNLVKIEKTFLPDKENREVYDRAYQNWKAAYQPLLRLSDENITKYMWRSP

SEQ ID NO: 49611 - DNA, 861 bp, Unknown
  Obtained from environmental sample
  misc_feature (1)..(861): n is a, c, g, or t
gtgccgccgaaggccagggaggtgctgaagcttggcggggtgcaggtcaacggcaggcgcgtgcgcgttgctggccgcccccagcaccccgacgcggacattagggtgactgttgacggttcgcttggagaagagccgaattttgtccccgtggccctatttgaggacgaatggctgctggcgctgaacaagccccctggcatcccagcccaggggacgctggcttcggacaagcacgattttcttgccgttgcaaaaaagcatcatccaaattgcgaactgttcttgacccataggctggatacaggcacatctggcgtgatgctgctggccaagggttcgggattggcgggggaagttggcaagctgttcgcaagccaccaagtaaaaaaaacatatctggcggccatccttggccaattagaaccatgcaggctagaccagcccattggccgcatccccgactccagacctgcgcgatatggatgcacgggcaacttggttgggcccaaagacgccatcaccgctttttcaaatgctgggcctgatgcaatcgccgttgggcttggccttggctttgaacttggctttgaacttggccttggcgatgcgccaacgtgcgtcaattggattttggcagagccgatcactgggcgcacgcaccagatacgcgcacacctggcccaccttggctgccccgtcatcggagacgttctatacggcgggccgccctctagccgcatgtggctgcatgcatggaagctggaactgccgcaccctgtcacaaaagaaataatctcgattcaggctatattaataacgaagccaaaacgattggcacaggagaggagccctttttga

SEQ ID NO: 49612 - protein, 286 aa, Unknown
  Obtained from environmental sample
  DOMAIN (58)...(229): RNA pseudouridylate synthase
  misc_feature (1)..(286): Xaa is any amino acid
MPPKAREVLKLGGVQVNGRRVRVAGRPQHPDADIRVTVDGSLGEEPNFVPVALFEDEWLLALNKPPGIPAQGTLASDKHDFLAVAKKHHPNCELFLTHRLDTGTSGVMLLAKGSGLAGEVGKLFASHQVKKTYLAAILGQLEPCRLDQPIGRIPDSRPARYGCTGNLVGPKDAITAFSNAGPDAIAVGLGLGFELGFELGLGDAPTCVNWILAEPITGRTHQIRAHLAHLGCPVIGDVLYGGPPSSRMWLHAWKLELPHPVTKEIISIQAILITKPKRLAQERSPF

SEQ ID NO: 49613 - DNA, 834 bp, Unknown
  Obtained from environmental sample
  misc_feature (1)..(834): n is a, c, g, or t
ttggacaagggatggaaatttattcccacagacagcccaaagtttgccgagcccagcctgaatgacagtgactggaagccgataaacgttgatcaggattgggattcccaggggcacaaagggctggttggctttgcatggtacagactaaagttcacgctcccaagcgaactccgcaccagcaacagaataaaggaaggtctgatattcgcgatgggcgcgatagacgatggcgaccaagtgttcttgaatggggagattttgggccagaatgggcgcactttcgggcctgggacaaagccgccagagggcttcaacaccggcccttggagcttgttcagggaatacacggttgcgctggatgacccaaggataaagtggggcaaagaaaatgtgttggccgtcagggtggtgaacaacagcgggcctgggggaatgtttggcgggggccagcacgtaaggctgctggggatgccagattggattgactttcgggccagcggaactccctttcggttttttggccaagaggtggcaaaagagttcgacattgcaaataaatccgacaaaacaaagatgcagggaactttgaccatcgaagcggtgggcgcgctgtctggcaaggtcgtcgcaaaaagcgctagggccattgacttgggcccaaaagaaaaaatgccggtgaatgtgcagcttggcctaaacgaagaagcctgcagagtcagctaccatgtcgcttttaaggatggcagcacattcgactactttgaatatagcccctacatcctcacgccgcccattcctcagcgcccaagatcaatgtctcggccgatctga

SEQ ID NO: 49614 - protein, 277 aa, Unknown
  Obtained from environmental sample
  DOMAIN (1)...(159): Glycosyl hydrolases family 2, sugar binding domain
  misc_feature (1)..(277): Xaa is any amino acid
MDKGWKFIPTDSPKFAEPSLNDSDWKPINVDQDWDSQGHKGLVGFAWYRLKFTLPSELRTSNRIKEGLIFAMGAIDDGDQVFLNGEILGQNGRTFGPGTKPPEGFNTGPWSLFREYTVALDDPRIKWGKENVLAVRVVNNSGPGGMFGGGQHVRLLGMPDWIDFRASGTPFRFFGQEVAKEFDIANKSDKTKMQGTLTIEAVGALSGKVVAKSARAIDLGPKEKMPVNVQLGLNEEACRVSYHVAFKDGSTFDYFEYSPYILTPPIPQRPRSMSRPI

SEQ ID NO: 49615 - DNA, 792 bp, Unknown
  Obtained from environmental sample
  misc_feature (1)..(792): n is a, c, g, or t
gtgctggtggtggacgatttccccagcaacctgttggtggccgaatgcctcctggccccctaccagatgcgggtttccacctgccttaacggccgggaggtcttggaggcggtccagaagcgttccttcgacctggtcttgatggaccacatgatgcccgaaatggacggcctggaggccaccctggccatccgggccctgggcgggcctttcgcgagcctccccattgcggccttgacggccaacgccatggccggggtgagagagaacttcctggccagcggtttcaatgatttcctggccaagcccataaacacctccgacctggacgccttgcttaggaaatggatccccgccgccaagcaacagggcgtgacggccgagggcgaaggcgcttcggaaggcgaggcggaggaaaacgacctgccggaaatcgaaggcttggatatggccgccggaatggacatcatcggcgggtcgcccggcctttaccgggagcttttgcgcgtctttttgaaggatgtggcggcgcgtttcgcccttctggaagccggcccggaggcggcggacctgcccaacttcaccatcgcggtgcatgccttgaaaagcgccctggccaatatcggggccaaggccttgtccgagtcggcggccgcgctggagcgggccgggcgcgacggggacctggccgtaatccatgaccggctgcctttatttcgggccggcttggccgccttggcggcgcgtatagatgaggccacggccgaagaccggcgaagcgggccgtcgtaa

SEQ ID NO: 49616 - protein, 263 aa, Unknown
  Obtained from environmental sample
  DOMAIN (166)...(249): Hpt domain
  misc_feature (1)..(263): Xaa is any amino acid
MLVVDDFPSNLLVAECLLAPYQMRVSTCLNGREVLEAVQKRSFDLVLMDHMMPEMDGLEATLAIRALGGPFASLPIAALTANAMAGVRENFLASGFNDFLAKPINTSDLDALLRKWIPAAKQQGVTAEGEGASEGEAEENDLPEIEGLDMAAGMDIIGGSPGLYRELLRVFLKDVAARFALLEAGPEAADLPNFTIAVHALKSALANIGAKALSESAAALERAGRDGDLAVIHDRLPLFRAGLAALAARIDEATAEDRRSGPS

SEQ ID NO: 49617 - DNA, 591 bp, Unknown
  Obtained from environmental sample
  misc_feature (1)..(591): n is a, c, g, or t
atgcttggaatattcagtgtagtattgtgcttctgcattcttccgtgttttctctattttctaaagccaagggtcaatccatggcttgttctttacggcttccttggacctgcgcttacagctttcttttcaggagacattaacttaacaattccggtacttcagcgccattcaaaagaaaactttggaatacgcaggcgatccagctctttatccatcgctcttttcgctactttttgcagatgcggcagcgccatgacagcggcggcgggctttatcgtcattatcaagtcatattcgtatatggggattggttcagttgaattatttaagataggcctatatgcctttattatttcattcatacttgcgcggcatccgggagacggcgcatacatcgcgttagccgcattatgcctgagttacggaggcggtgaatacagggcaggttatctaatcttaaaaccgctggctttttaccttatagctgtcggcgcatttatcgatataatgttatgcgcatttggctcctatattttagcgcgtgccaatggttttatagaagaaaaacatctggtacattttatttaa

SEQ ID NO: 49618 - protein, 196 aa, Unknown
  Obtained from environmental sample
  misc_feature (1)..(196): Xaa is any amino acid
MLGIFSVVLCFCILPCFLYFLKPRVNPWLVLYGFLGPALTAFFSGDINLTIPVLQRHSKENFGIRRRSSSLSIALFATFCRCGSAMTAAAGFIVIIKSYSYMGIGSVELFKIGLYAFIISFILARHPGDGAYIALAALCLSYGGGEYRAGYLILKPLAFYLIAVGAFIDIMLCAFGSYILARANGFIEEKHLVHFI

SEQ ID NO: 49619 - DNA, 771 bp, Unknown
  Obtained from environmental sample
  misc_feature (1)..(771): n is a, c, g, or t
ttgcgtgcctgcacgtcgactcaggaggatcccacaaacccaacgccttttacttttgccggaaaagaaacttttattttcagaataggagttcccataaccagaagcaccagcaacgaagtagtcggacacttatgtgttcttatagacatcgccccaatgcaggcagtggttgaaaaaaccattaaagattacgaagaaatatcggcattggttctttattcgggtaacggaatgataatgggacatttggttcctgaacgtgtaggaaagatgctgattgatgtggatacgatatacggcgattatataaaagaagcagataaggcggtgaaagaagggaaggaatttgagtgcagcagctattcaccggttctaaaagcagatatgaaaataaccatgattcccttccagataggcgattccgacatgaactggacaataatgatagcgtcatcggaaacgtacattatgcaggaagttaacgcgattaccagatttactattatccttgcggcgatcgccattgtagtggctgcggtaatagtttactttgtccttaacagtactaccaagccaatcgtcaaagtagcggacacactcaaggacatttcagaaggcgaaggcgatctgacgcggagcattgccgtcagttccaaagacgaaattggcgaccttgctttgtacttcaataaaacgcttggaaaaatcaaagaccttgtacttatcattaaaagaacaagcgggattattgaaagatataggcaataa

SEQ ID NO: 49620 - protein, 256 aa, Unknown
  Obtained from environmental sample
  DOMAIN (168)...(239): HAMP domain
  misc_feature (1)..(256): Xaa is any amino acid
MRACTSTQEDPTNPTPFTFAGKETFIFRIGVPITRSTSNEVVGHLCVLIDIAPMQAVVEKTIKDYEEISALVLYSGNGMIMGHLVPERVGKMLIDVDTIYGDYIKEADKAVKEGKEFECSSYSPVLKADMKITMIPFQIGDSDMNWTIMIASSETYIMQEVNAITRFTIILAAIAIVVAAVIVYFVLNSTTKPIVKVADTLKDISEGEGDLTRSIAVSSKDEIGDLALYFNKTLGKIKDLVLIIKRTSGIIERYRQ

SEQ ID NO: 49621 - DNA, 861 bp, Unknown
  Obtained from environmental sample
  misc_feature (1)..(861): n is a, c, g, or t
atgccccgaatgcaacagggttctgtcttttatggaaggatgcgtaaaatgcacaagttgcggatacagcaagtgctagtgcttttatttttgctgcttgccgcagtttcttttgcggccaatccttttttggattccttggttgcatattcacagtccattgctcctgacgcgaaacttggcattgccgttcgttctgttaaaacagattccattgtttacaactacaatggaaatgaatggtttgtgccagcttctacaatgaagctccttgtaacggctgctgccgtgcaaaaactccctttgaactacgcccctaaaacaataattcatttagaaggaattaaaaagcaaaatgttttttctggtgttattagaatagaaggcaggggcgacccgaatatatctgcaagatactatccagatgctctctatgttcctggcaacttaacagattctctcaaaagcaaaggaatagacacactgcgcggaattttggatctagacacttcttttttcaaaggtccaagaaaaccagaggaatggcgcaaaaagttttttgattcctggtatggagcagaaatttcaccgctgtcttttaacgacaactgcgctttgtttgaaataaaaccaggagcaaaagacggagatactgccaaaataaccgctcttccagatattggctatgttaaaataaaaaacgaagtgaaaaccgcaggcaagggagcaaaatacaaatatgcaatggatcctgtaaatcccgaaatttcctttaccggaaccataggttccaaagtttccgcttccactattgtgctgcctattcgcaaccctgcagcttattttaaagcagctttttaa

SEQ ID NO: 49622 - protein, 286 aa, Unknown
  Obtained from environmental sample
  misc_feature (1)..(286): Xaa is any amino acid
MPRMQQGSVFYGRMRKMHKLRIQQVLVLLFLLLAAVSFAANPFLDSLVAYSQSIAPDAKLGIAVRSVKTDSIVYNYNGNEWFVPASTMKLLVTAAAVQKLPLNYAPKTIIHLEGIKKQNVFSGVIRIEGRGDPNISARYYPDALYVPGNLTDSLKSKGIDTLRGILDLDTSFFKGPRKPEEWRKKFFDSWYGAEISPLSFNDNCALFEIKPGAKDGDTAKITALPDIGYVKIKNEVKTAGKGAKYKYAMDPVNPEISFTGTIGSKVSASTIVLPIRNPAAYFKAAF

SEQ ID NO: 49623 - DNA, 561 bp, Unknown
  Obtained from environmental sample
  misc_feature (1)..(561): n is a, c, g, or t
atgctgccagccgtacgtatgaggcaaacaacgctttttgggcacatgcacatagcggttacggtggatcccataccgggaaaagaaatggaaatttttgcgcagctaggcaaagccggagatgttgcttcttctgatttagaggctataagccgcatggttagcttgtatttgcgcattggcggttcattagaagatataattgaacaattggaaggcattggaagccatatggcaatcccatctaaagacggaaaggtcataagccttgccgatgcgcttggaaaaagcctgcgccgctataatctggcaaaacgcacttatgggctaaccaatattttaacgggcaaaataaactttgacgagttgccaacattaaaagatttggagcaacaagatagttccattacgctgaatacaggagaccagtctaaacctctggttgaagcggcggcaacagattctaatctttacaaagcaaaatgccccgaatgcaacagggttctgtcttttatggaaggatgcgtaaaatgcacaagttgcggatacagcaagtgctag

SEQ ID NO: 49624 - protein, 186 aa, Unknown
  Obtained from environmental sample
  misc_feature (1)..(186): Xaa is any amino acid
MLPAVRMRQTTLFGHMHIAVTVDPIPGKEMEIFAQLGKAGDVASSDLEAISRMVSLYLRIGGSLEDIIEQLEGIGSHMAIPSKDGKVISLADALGKSLRRYNLAKRTYGLTNILTGKINFDELPTLKDLEQQDSSITLNTGDQSKPLVEAAATDSNLYKAKCPECNRVLSFMEGCVKCTSCGYSKC

SEQ ID NO: 49625 - DNA, 381 bp, Unknown
  Obtained from environmental sample
  misc_feature (1)..(381): n is a, c, g, or t
gtggccgaggggtcggtcggtgtgatccgcgccgtcgactttctggagcacgtccccgacaaggtcgcgctcttcaacgagctccatcgcgtcctggcccccggcggcctgctcctgagccagaccccgagcaccgacggccgcggcgccttccaggaccccacgcacgtggccttctacaacgagaactcattctggtacttcaccgaggcgagatatcaagcctacgtgccggagatcaccgcgcgctttcagtcctcccgggtggtcactcacttcccgagcgagtggcactcggagcacaacatcccctatgtgtgcgcgaacctgatcgcgctcaaggagccgatgccgcgtaacggcggcctgctcctctggtag

SEQ ID NO: 49626 - protein, 126 aa, Unknown
  Obtained from environmental sample
  misc_feature (1)..(126): Xaa is any amino acid
MAEGSVGVIRAVDFLEHVPDKVALFNELHRVLAPGGLLLSQTPSTDGRGAFQDPTHVAFYNENSFWYFTEARYQAYVPEITARFQSSRVVTHFPSEWHSEHNIPYVCANLIALKEPMPRNGGLLLW

SEQ ID NO: 49627 - DNA, 681 bp, Unknown
  Obtained from environmental sample
  misc_feature (1)..(681): n is a, c, g, or t
atgaaacgcggaaaaaaatacaaagcaagcgccaaaaactacgaccccatgaatacttatgaattaaaagaagcggtttcccttgtaaagaaaatggctttcgcgaagtttgacgaatcggtagacctttccatcaaactgaatctgaaaaagagccaggccgtgcgcgacacggtggttcttccccaccagttccggggcgacaagaaagtgcttgttttctgcaaaccggaaaaagaaaaggaagcgcaggaagcgggagccgcgtttgtcggcgccgacgacttaatcgaaaaagtcaaaggcggctggacggattttgacgtagccgtagcgacccccgacatgatgaaagatgtcggcaagcttggtatggtattaggccgtaaaggacttatgcccaacccgaaaaccggaacagtcactttcgatcttaaaggcactttagccgaacttaaaaaaggccgcgttgaattcagggcggacaaaaccggcgtagtgcatcttgttgtaggcaaggtttccatggagccggaaaaagtcgcggaaaacgttgaagtagttgtaaccgaaattaaacgcaaacggccgcccgatgtaaaaggcgagtttattcaatcggtatcggttgcgtcaacaatgggacccggcgtctgggtagccatgagagatcaggattag

SEQ ID NO: 49628 - protein, 226 aa, Unknown
  Obtained from environmental sample
  DOMAIN (14)...(217): Ribosomal protein L1p/L10e family
  misc_feature (1)..(226): Xaa is any amino acid
MKRGKKYKASAKNYDPMNTYELKEAVSLVKKMAFAKFDESVDLSIKLNLKKSQAVRDTVVLPHQFRGDKKVLVFCKPEKEKEAQEAGAAFVGADDLIEKVKGGWTDFDVAVATPDMMKDVGKLGMVLGRKGLMPNPKTGTVTFDLKGTLAELKKGRVEFRADKTGVVHLVVGKVSMEPEKVAENVEVVVTEIKRKRPPDVKGEFIQSVSVASTMGPGVWVAMRDQD

SEQ ID NO: 49629 - DNA, 432 bp, Unknown
  Obtained from environmental sample
  misc_feature (1)..(432): n is a, c, g, or t
atggcaaaaaagaaaattgcgacatacattaagttgcaatgtccggcgggaaaagccactccggctccacccgtaggacccgcgcttgggcctcacggcgtcagcgcgccccagtttgtccagcagtttaacgacaggacaaaaggcatggaaccgggacttatcattccggttattatcacggtttatgtggataaatcatttacatttatcctcaaaaccccgcccgcttcggttttgatcaaaaaggctatcggactggaatcgggttcaaaggaatctcacaaggtcaaggtcggcaaaatctcaagaaagcagcttgaagacatcgccaaaacaaaaatggctgatctttcagctaacgatctggacgccgccgttaaaattatcgccggtaccgcccggtctatgggtgtagaggtggacaaatga

SEQ ID NO: 49630 - protein, 143 aa, Unknown
  Obtained from environmental sample
  DOMAIN (9)...(68): Ribosomal protein L11, N-terminal domain
  misc_feature (1)..(143): Xaa is any amino acid
MAKKKIATYIKLQCPAGKATPAPPVGPALGPHGVSAPQFVQQFNDRTKGMEPGLIIPVIITVYVDKSFTFILKTPPASVLIKKAIGLESGSKESHKVKVGKISRKQLEDIAKTKMADLSANDLDAAVKIIAGTARSMGVEVDK

SEQ ID NO: 49631 - DNA, 564 bp, Unknown
  Obtained from environmental sample
  misc_feature (1)..(564): n is a, c, g, or t
atggctacgggttggtacgtcctgcatacttattcgggatacgaaaataaaatagaaagaacaatccgcatgatgaccggaaacggggaactggacaagaatgttgtccgtgatgtgaaagtccccagtgaggaagtggtcgaagttaaagacggaaaaaaacgcacccagaacagaaagtttcttcccggttatattttagtcgagatggatcttcccgataccgaaatggattggaaactgccctgttccaaaataaaaaaaattcaaggcgttacgggatttgtcgggactccctcggacaaaaagccgcagccgcttacaggcgatgaagcgcgtgcgattttacagaagtcgggtgaaattaagggagaaagaacagtccgcgcaagacagacttttgcccccggtgaacaggtaaaaattgtcgacgggccgtttgagtcatttgtcggaactatcgaagaagttaatcaagagaaaaataaattaaaagtaatggttggaattttcggcagaaatgcgcctgtggaagttgatcttttacaggtagaaaaagtataa

SEQ ID NO: 49632 - protein, 187 aa, Unknown
  Obtained from environmental sample
  DOMAIN (134)...(171): KOW motif
  misc_feature (1)..(187): Xaa is any amino acid
MATGWYVLHTYSGYENKIERTIRMMTGNGELDKNVVRDVKVPSEEVVEVKDGKKRTQNRKFLPGYILVEMDLPDTEMDWKLPCSKIKKIQGVTGFVGTPSDKKPQPLTGDEARAILQKSGEIKGERTVRARQTFAPGEQVKIVDGPFESFVGTIEEVNQEKNKLKVMVGIFGRNAPVEVDLLQVEKV

SEQ ID NO: 49633 - DNA, 771 bp, Unknown
  Obtained from environmental sample
  misc_feature (1)..(771): n is a, c, g, or t
atgcttaaaccgtatgatttactcgaaaatatactgcttgatattgaaagtggtattaaaaaaaatataaacgcatctgtcctttccaaaaaatacggattttcggaaggccatttgcgcagactattcagttttgccttcaatcaacccattgccgcttatattcgttcccgcacattagctgcaagcatttacgatttattggaaaccgataccaatattcttgatattgcgggtgaatacggctttgaatatgaacagtcgtatatcaggacattcaaacgtgaatatggaataacacccggcgatttgcgtaaaacagggcaggtcgtacaaatcaaaccgccgcttcatctttttgccgacagaaggctggacaacggcattttattcggacctgattttgtaatggttcctcagtttcatgttataggtaagcgccatcacttatcattcaatgatatgcgtacagaaccgttacttgcaaagcaattcatggataatgaacgcaagttgataaagaaagccgtaaatcccaatgtatttatcggcttatcctgcaacataaatatcaaggaaggacaatttgattatttaccttccgtaaaggttgaaaatttaaaaaacataccgcttggtctttccggcgaaacttttgagacttcaatgtgcgccagattccgttatatagggcagcacggttattccggcattacgggaaatatcgtgtctatgatgtccaatgcccgttgtaaattttgcccaggatga

SEQ ID NO: 49634 - protein, 256 aa, Unknown
  Obtained from environmental sample
  DOMAIN (62)...(106): Bacterial regulatory helix-turn-helix proteins, AraC family
  misc_feature (1)..(256): Xaa is any amino acid
MLKPYDLLENILLDIESGIKKNINASVLSKKYGFSEGHLRRLFSFAFNQPIAAYIRSRTLAASIYDLLETDTNILDIAGEYGFEYEQSYIRTFKREYGITPGDLRKTGQVVQIKPPLHLFADRRLDNGILFGPDFVMVPQFHVIGKRHHLSFNDMRTEPLLAKQFMDNERKLIKKAVNPNVFIGLSCNINIKEGQFDYLPSVKVENLKNIPLGLSGETFETSMCARFRYIGQHGYSGITGNIVSMMSNARCKFCPG

SEQ ID NO: 49635 - DNA, 534 bp, Unknown
  Obtained from environmental sample
  misc_feature (1)..(534): n is a, c, g, or t
atgcggaacgccgctggcagacagaaccacgccgcgcccggagagggagtgttgcagccgcttgtcttggtcataggcgaaggtccgggagcggacgaagacgcgcaaggccgccctttcgtcggcagggccggacagcttttggataaaatgctcgcttctatcaatctttcgcgtaacacaaattgttttatcgccaatgtggtaaaatgcaggccgcccaataaccgcgacccctaccccgaagaaacatcagcctgcgcgcattttctccggcggcagattactcttttaaaaccaaaatttatacttatcgccggaaggatcgctatgcagacgcttttaaaaacaaccgaagcgattggcaaaaagcgcggaaaaattacggaactggctgtgggagacgctgtttatccgctccttatcacatatcatcccgccgccctcttgcgcaacgaagagttaaaacgccccgcgtgggaagatttgaaacttctgcgctcaaaattgaatgaattgaacgggggcgcttaa

SEQ ID NO: 49636 - protein, 177 aa, Unknown
  Obtained from environmental sample
  DOMAIN (13)...(168): Uracil DNA glycosylase superfamily
  misc_feature (1)..(177): Xaa is any amino acid
MRNAAGRQNHAAPGEGVLQPLVLVIGEGPGADEDAQGRPFVGRAGQLLDKMLASINLSRNTNCFIANVVKCRPPNNRDPYPEETSACAHFLRRQITLLKPKFILIAGRIAMQTLLKTTEAIGKKRGKITELAVGDAVYPLLITYHPAALLRNEELKRPAWEDLKLLRSKLNELNGGA

SEQ ID NO: 49637 - DNA, 552 bp, Unknown
  Obtained from environmental sample
  misc_feature (1)..(552): n is a, c, g, or t
ttgcaaataaattacacttatccgattttccttgcccctgcgttctatatattctttttattacccggcanagaggtatggacagtccccgtgctttggttcattttcattatttccgaattatccgacatgttcgacggaatggcggcccgcaaacaaaaagaagtcagcgaccttggcaaactttttgatccgtttgccgacacttttatgcagcttacctgtttcttctgttttgtagtcgccggtatatttcaccccatcctctttttgctggttatttaccgcgagttcagcatcctttttatccgcaatttgatgctaaaaaaaggcataacccttggcgccagaatgagcggaaaagttaaaaccgtctcttacatcattgcgataggcgccgccctcctcgttgacagttttcaacgtctttcactttttgaaaacctcatccccgcctttaaaatcataacctttattatctttattatttcgataattatttccattatatccttcattgactatctgataattttcaaaaacaatcaatga

SEQ ID NO: 49638 - protein, 183 aa, Unknown
  Obtained from environmental sample
  DOMAIN (33)...(178): CDP-alcohol phosphatidyltransferase
  misc_feature (1)..(183): Xaa is any amino acid
MQINYTYPIFLAPAFYIFFLLPGXEVWTVPVLWFIFIISELSDMFDGMAARKQKEVSDLGKLFDPFADTFMQLTCFFCFVVAGIFHPILFLLVIYREFSILFIRNLMLKKGITLGARMSGKVKTVSYIIAIGAALLVDSFQRLSLFENLIPAFKIITFIIFIISIIISIISFIDYLIIFKNNQ

SEQ ID NO: 49639 - DNA, 414 bp, Unknown
  Obtained from environmental sample
  misc_feature (1)..(414): n is a, c, g, or t
atggttatacctgtcattgaaagcccagaagggaaaaaatttgtcatggtgtggcaatggcggcatggctctaaaagcttaagtctggaatttccgggcggcgtctttgaacccggggaaaatcctgaagaagccgctttaagggaactgcgggaagagaccggttataagcctgaaaaaatgattaagctgggctcgcttagtccaaatcccgcgattatgtcaaacacaatgcattttttccttgccgaaggtatttccggcgacggaagacagtctttggatgaagatgaatacgttgacgttgtcctgattgatgtcaatgatgtaataaaaggtattggaaaggagccttacattcacgcgctgattggaaccgctttagctttatatcaatcgaaagaaaaaaaataa

SEQ ID NO: 49640 - protein, 137 aa, Unknown
  Obtained from environmental sample
  DOMAIN (1)...(130): NUDIX domain
  misc_feature (1)..(137): Xaa is any amino acid
MVIPVIESPEGKKFVMVWQWRHGSKSLSLEFPGGVFEPGENPEEAALRELREETGYKPEKMIKLGSLSPNPAIMSNTMHFFLAEGISGDGRQSLDEDEYVDVVLIDVNDVIKGIGKEPYIHALIGTALALYQSKEKK

SEQ ID NO: 49641 - DNA, 825 bp, Unknown
  Obtained from environmental sample
  misc_feature (1)..(825): n is a, c, g, or t
atgacggttctcttcctgcttatgatggccgccatcgcgggtatattggtaatttcctatatatttatcctgagccttgtcaggcccatgaagaacatggtaaagacgatggatcaaatagcggataactcggatcttaccaagcggcttgaattcaaacacctggacgaaataggcgttcttgcccatgattttaactccatgatggagaaaatcagaacctttgtagggacgataaaatacaaaataaacgcgctgacaaataccggctatgagctttccacaaatatgatgaaaacttcaaaatcggttgatcaaatttcggcggattttgacggtatgaagagcgctatgggcaaacaggaagaaagcgccgccgaggctgacaaagcggtaaaagttatagaagccagcattgaaagcctgaacaagctgatagaagaccagtccaaaagtataaacacgtcgtcttccgctattgaagtaatgacagctaacattcattcggtgagaaatacgctgattgaaaacggcaaaaacgtcagcgaattggccgaggcctccgaaaacggaaaaaccggccttcagaccgtggcggagaaaatacaggaaatcgcccgtgactccgaaggtcttttggaaataaacgcggccatagacaatatcgccagccagaccaacctgctttcgatgaatgcggctattgaggcggcgcacgcaggagaggcgggcaaaggctttgccgtagtcgccgacgagatccgcaaacttgccgaatcctcaagcgagcagtcaaaaacgaccgcgacgatgctgaaaaaataa

SEQ ID NO: 49642 - protein, 274 aa, Unknown
  Obtained from environmental sample
  SIGNAL (1)...(19)
  DOMAIN (147)...(273): Methyl-accepting chemotaxis protein (MCP) signaling domain
  misc_feature (1)..(274): Xaa is any amino acid
MTVLFLLMMAAIAGILVISYIFILSLVRPMKNMVKTMDQIADNSDLTKRLEFKHLDEIGVLAHDFNSMMEKIRTFVGTIKYKINALTNTGYELSTNMMKTSKSVDQISADFDGMKSAMGKQEESAAEADKAVKVIEASIESLNKLIEDQSKSINTSSSAIEVMTANIHSVRNTLIENGKNVSELAEASENGKTGLQTVAEKIQEIARDSEGLLEINAAIDNIASQTNLLSMNAAIEAAHAGEAGKGFAVVADEIRKLAESSSEQSKTTATMLKK

SEQ ID NO: 49643 - DNA, 675 bp, Unknown
  Obtained from environmental sample
  misc_feature (1)..(675): n is a, c, g, or t
atggaagagcaggaaacaggcggcaagcaaatactggaatcgatggatcggctgaaagagataagcgtatcggtcaagaaaggcgcacaagacatgttggcgtcgggtgaaaagttgaaccggcagaccgaggaattcataaatatcagcaatgaaacgatggccggcatgaatagaattgtgaatggggcgatgcgggagataaaagccgcggtagtcaccgtggatgagatgagcggcgagaacagccgtaactttgaagagttgaaatctgaatcacaaaaatttaaagccgatttaagcggcggcaagaaaaaaatcatcgtggttgacgacgaggaaaccgttcttaccctgacaaaagccatgctggagagcagatacgacgttactaccgtcagttcgggcaaagcggcattgggcttgttcttccagggttatactcccgctctggtgttattggatttgaatatgcctgaaatgggcggctgggatacatttatcaggatacgggatttatccaaactgcataaaactccgatagcgatttacacgacatcggatgatccgggtgacagggccaaagcgaaagaaatgggcgcggttgatttcatcaagaagccctgtaagaaagaggagttgttaaacaggatacaagggataataaataagtaa

SEQ ID NO: 49644 - protein, 224 aa, Unknown
  Obtained from environmental sample
  DOMAIN (105)...(219): Response regulator receiver domain
  misc_feature (1)..(224): Xaa is any amino acid
MEEQETGGKQILESMDRLKEISVSVKKGAQDMLASGEKLNRQTEEFINISNETMAGMNRIVNGAMREIKAAVVTVDEMSGENSRNFEELKSESQKFKADLSGGKKKIIVVDDEETVLTLTKAMLESRYDVTTVSSGKAALGLFFQGYTPALVLLDLNMPEMGGWDTFIRIRDLSKLHKTPIAIYTTSDDPGDRAKAKEMGAVDFIKKPCKKEELLNRIQGIINK

SEQ ID NO: 49645 - DNA, 1074 bp, Unknown
  Obtained from environmental sample
  misc_feature (1)..(1074): n is a, c, g, or t
atggactatgaaaaggcgacaagccttggcatagtcaggatattaatacttataatgggtttttcattcgcgttgtttgttgtttctgattattactattacggaaaagaaagcggattttatatttcacttgcgctgcgctgcgcggctttactaattacggttgtttcatcttttcttgccgcttcatttaagcgctacgatcgtacgctggttctaattacattaacggagctggcggtttttgtaatttatcttttaaacctgtatgcaagcgtactcctggcttccggtcggcaggccggcgaacccgcaattacgaattttatgtcggtgttgattttaatactggctgtctttcttgttccaaaccgctggaagaattgccttttcgcgggccttttcataataacctgttatcttattttttgtttcgtgttcctgagccacattgatttgccgtctctttttcaacaggggttatacctcggcatatgccttgcctcctgtgccatttttatttacggcagggagaattccgagcgcagacatttcgccgcggagaagcttcttgagatcatgacaataaccgactggctgacaggcatatacaaccgccgccgctttgagtatattttgggcctgtggataaaaaacaagcgccacgatccgttctgcctgctcttttttgacattgatgattttaaaaccataaatgatacctacgggcacaaaaccggagacgaagtacttgtgaaaaccacgtctgccgtttcatccaaaatccgggatgacgatatttttgcccgctggggaggcgaggaatttgtgatcctgttcggaggggtagaaagcgacatgggaaaagaactcgcggaaaggctccgtaaagcggtggaaaacaatccatgcggcgaagcgggaaatattacaataagcatcggagtcgtgcagtaccaccgggatgaaaaaaacgaggaaggtgaaagcctggaaaattttgtgaagcgggcggatgaaaaaatgtacgaagccaaaaaggcaggaaaaaacagggtcgtggcagatgtatag

SEQ ID NO: 49646 - protein, 357 aa, Unknown
  Obtained from environmental sample
  DOMAIN (191)...(352): GGDEF domain
  misc_feature (1)..(357): Xaa is any amino acid
MDYEKATSLGIVRILILIMGFSFALFVVSDYYYYGKESGFYISLALRCAALLITVVSSFLAASFKRYDRTLVLITLTELAVFVIYLLNLYASVLLASGRQAGEPAITNFMSVLILILAVFLVPNRWKNCLFAGLFIITCYLIFCFVFLSHIDLPSLFQQGLYLGICLASCAIFIYGRENSERRHFAAEKLLEIMTITDWLTGIYNRRRFEYILGLWIKNKRHDPFCLLFFDIDDFKTINDTYGHKTGDEVLVKTTSAVSSKIRDDDIFARWGGEEFVILFGGVESDMGKELAERLRKAVENNPCGEAGNITISIGVVQYHRDEKNEEGESLENFVKRADEKMYEAKKAGKNRVVADV

SEQ ID NO: 49647 - DNA, 900 bp, Unknown
  Obtained from environmental sample
  misc_feature (1)..(900): n is a, c, g, or t
ttggggttttatggcgaatatacgggttacgcgctcattattgcgcctttagcggttgtacacgtttttcaagacgatgcgaaaaaacttttaggaataaaagatattccgtacgtccgcaacatggcggaagtcgagaagattagtcatacgataataatgataaccaattacgaacgtgtaagagacggcgacatagaccccacatattttaccgctgtatcccttgacgaagcatcggtgttgcgctcttacgggagcaaaacttaccaagaatttttgacaaagtttcagaccgtcaaataccgcttcgtggctaccgcgacaccttcacctaacaaatacaaagagcttattcattacgcaggctttttggggattatggacactgggcaggcgcttacaaggtttttccaccgcgatagcacaaaggcgaataatttaacgctgtatcctcacaaagaaaaagaattctggttttgggtttccacttgggcgctgtttatcacaaagccatctgatctcggatattcagacgaaggctacaatttgccgcctatgaacatcatatatcatgaggtagaagttgaccatttaaacgccggaacggaagatgacgggcagataaaactattccgagatgctgctttagggttaagagatgcttcaaaagaaaagcgcgattctcttccggccagaattgaaaagatgatggagattttaagtgataaccccgacgaccattttattatatggcatgatttggaatgtgaaaggcacgcgatacgaaaagcgattactgaaagcaatttaaaagatttgacttacgatgagatattcggctccccagacgttgaaaccaacacgcaaatatccatagcctttgagcaaggtaaataa

SEQ ID NO: 49648 - protein, 299 aa, Unknown
  Obtained from environmental sample
  misc_feature (1)..(299): Xaa is any amino acid
MGFYGEYTGYALIIAPLAVVHVFQDDAKKLLGIKDIPYVRNMAEVEKISHTIIMITNYERVRDGDIDPTYFTAVSLDEASVLRSYGSKTYQEFLTKFQTVKYRFVATATPSPNKYKELIHYAGFLGIMDTGQALTRFFHRDSTKANNLTLYPHKEKEFWFWVSTWALFITKPSDLGYSDEGYNLPPMNIIYHEVEVDHLNAGTEDDGQIKLFRDAALGLRDASKEKRDSLPARIEKMMEILSDNPDDHFIIWHDLECERHAIRKAITESNLKDLTYDEIFGSPDVETNTQISIAFEQGK

SEQ ID NO: 49649 - DNA, 894 bp, Unknown
  Obtained from environmental sample
  misc_feature (1)..(894): n is a, c, g, or t
atgaaggttcataatgattttaccttgtattttcgggtcatcccttcggggaaacgggtcgtgtatttctatgcctatgacgaaaacggcaagcggacgcagggcaggtctaccgggcagaccaacaaaactgcggcaagggtactggtaaacaggcttttgaaagaaggggcattgctgccgaaaaaagacggcgtgcctacttttggcgaatacgccgtaaactggtgggattgggaaaaatgcgagtacctgaaaaaaaggcggaagcgggcaaacctgacccaaagctattcagaccatatgaagcggaatttggataaagtcgtgctgccgtatttcaaaaacatgaaaatggacgcgattaccccagcggcgattgaagcgtttcttgacagccttataaaacaaaaatacaagaataccacgattaacggctattacggcactttcaaaaccatgatgattgaagccgtcgagcgcggggttatagccacagacccaaccgccaaagtcgagaggctgataaacgaccgcgatgaaataaagattatcactccccttgaattcaaaaagctgtttgtggtggactggcgcaaggtttgggaagacaatttcatcgcctgtacagtgaacaagctggcggctctgtcgggcatgagggtgtccgagattttggggcttaaagggagctgcctgttcgacgatcacatttacgtttgtatgcagcatgacatttacggctacaggccgaccaaaacgaaagacaagcataatataccccttcccgcttcccctgatgccgatttgaagctgcttaaagaaacagcggggacggctacttgttttccactaacggcgggggcagccctatttgcaggaaaacggttttga

SEQ ID NO: 49650 - protein, 297 aa, Unknown
  Obtained from environmental sample
  misc_feature (1)..(297): Xaa is any amino acid
MKVHNDFTLYFRVIPSGKRVVYFYAYDENGKRTQGRSTGQTNKTAARVLVNRLLKEGALLPKKDGVPTFGEYAVNWWDWEKCEYLKKRRKRANLTQSYSDHMKRNLDKVVLPYFKNMKMDAITPAAIEAFLDSLIKQKYKNTTINGYYGTFKTMMIEAVERGVIATDPTAKVERLINDRDEIKIITPLEFKKLFVVDWRKVWEDNFIACTVNKLAALSGMRVSEILGLKGSCLFDDHIYVCMQHDIYGYRPTKTKDKHNIPLPASPDADLKLLKETAGTATCFPLTAGAALFAGKRF

SEQ ID NO: 49651 - DNA, 1602 bp, Unknown
  Obtained from environmental sample
  misc_feature (1)..(1602): n is a, c, g, or t
ttggttacagggcaaactatgggtgatgtaccgttactgcggctggaaggtatcacaaaggacttttacggcgcgacagttctttcgggtgtaagtttctccctgaacccgggtgagattctgggactggtcggggagaacggcgccggaaaaacgacgttgatgcacatactctttgggatgtcggatattatcgataccggagggtttggcggctctatttttatcgngggcaagactgttactttcaaatcgccctttgaagccctggacgccggtattggtatggttcaccaggaattttccctgataccaagttttacggcttgcgaaaacattatgctgaaccgtgagcctacccgtttcaattttgcggtggagttattcggcgaacggctcgccaccctaaaactccnccagatgcacgaacacgcgacaaaaaccattaccaagctgggagtgaacattgcatcggacacgctggtaatggaaatgcccgtggcgcacaagcagttcacggaaatcgcgcgggaaatcagccgtgatcaggtaaagcttctggtgttggacgagcctacggcagtgcttaccgagaccgaagccgacatcctgctggaaagtctaaagcgcctttcaagcgaaggtataggcatcatttttatttcccaccgccttcatgaggtaacaaaaatctgcaaccgaattttggtactccgggacggtcagctaattcgagacacgccgaacaaggatatatcggttcaggatattacaacctggatggtgggccgcgaaatttcccatagacccgcagacagcgcagagcgcagccttgaaggtgaggcctttaaggtggaaaacctctgggtggacatgccgggcgaaaccgtgcgggacgtttcattcacggtaaagaaaggggaaatcttcggtatagggggccttgcgggtcaaggaaaactgggcatccccaatggcatcatgggccttttcgcctcgggcggcaaagcctggatagacggcgaaagcctggagctaggttaccccaggaagatactcgatgcgggcgttgcctttgtttccgaagaccgccggggtgtgggccttttgatggacgaaagccttgagtggaacatagcttttggcgttatgcagatcaaaggccaaaatttgaaaaaattccttggcgggcttttcagcctgcgagatgagaaagccatgtgtcatcttgccgaggaatatatcaaaaagctggaaataaagtgtaccggatcaagacaggctgctaaagagctttccggcggcaaccagcagaaaatctgcctttccaaagcctttgccctggaaccgaaactgctttttgtttccgagcccacccgaggcatagacgtgggagccaaaaaaatcgtgctggataccctgcgcttttacaaccagagcaaaggaaccaccatcgtgatgatctccagcgagcttgaagagctccgttcaatctgcgacagaatcgccattgtagacgaaggaaagatcgccggggttctgtcgccgcaatcgcctgccgcagaattcggtttattaatgtccggggagaaaatagtatga

SEQ ID NO: 49652 - protein, 533 aa, Unknown
  Obtained from environmental sample
  DOMAIN (307)...(508): ABC transporter
  misc_feature (1)..(533): Xaa is any amino acid
MVTGQTMGDVPLLRLEGITKDFYGATVLSGVSFSLNPGEILGLVGENGAGKTTLMHILFGMSDIIDTGGFGGSIFIXGKTVTFKSPFEALDAGIGMVHQEFSLIPSFTACENIMLNREPTRFNFAVELFGERLATLKLXQMHEHATKTITKLGVNIASDTLVMEMPVAHKQFTEIAREISRDQVKLLVLDEPTAVLTETEADILLESLKRLSSEGIGIIFISHRLHEVTKICNRILVLRDGQLIRDTPNKDISVQDITTWMVGREISHRPADSAERSLEGEAFKVENLWVDMPGETVRDVSFTVKKGEIFGIGGLAGQGKLGIPNGIMGLFASGGKAWIDGESLELGYPRKILDAGVAFVSEDRRGVGLLMDESLEWNIAFGVMQIKGQNLKKFLGGLFSLRDEKAMCHLAEEYIKKLEIKCTGSRQAAKELSGGNQQKICLSKAFALEPKLLFVSEPTRGIDVGAKKIVLDTLRFYNQSKGTTIVMISSELEELRSICDRIAIVDEGKIAGVLSPQSPAAEFGLLMSGEKIV

SEQ ID NO: 49653 - DNA, 438 bp, Unknown
  Obtained from environmental sample
  misc_feature (1)..(438): n is a, c, g, or t
ttgttgagccgaccttccagccctctcatgggctatcccggcgctttgggcatcgacctttccgccgaagcgggagacttccccgcgattctgaaaaaagttgaagacgcggttaaagccaaaggcggcgcgggcaagttcggtacatgggctttctcttacgggttcacagcttccgccggtcttggcgaattcgcgaaacgcatcctggacggcaaagccaagttggaaaataccgcggatctttatgcggctctgggcgaattcacccccggcgcgaaatggaacggcggtttttatattgacgccgcgaccggtgtacgcgcaaggaatcagttgctcatttacatggatacctacattatggggcagggcttccttcccaccacggcgcaaactgttcctgacaagtattaccagatcaaattccagcgctaa

SEQ ID NO: 49654 - protein, 145 aa, Unknown
  Obtained from environmental sample
  SIGNAL (1)...(24)
  misc_feature (1)..(145): Xaa is any amino acid
MLSRPSSPLMGYPGALGIDLSAEAGDFPAILKKVEDAVKAKGGAGKFGTWAFSYGFTASAGLGEFAKRILDGKAKLENTADLYAALGEFTPGAKWNGGFYIDAATGVRARNQLLIYMDTYIMGQGFLPTTAQTVPDKYYQIKFQR

SEQ ID NO: 49655 - DNA, 336 bp, Unknown
  Obtained from environmental sample
  misc_feature (1)..(336): n is a, c, g, or t
atggccgagacgatgttattcctgctggccggcataagcataatcggcctgggcataatgctttacctcagggctgatctcctgccccagccggcggaagggctcatactggcgattgagaaaaagaccgggtggaaactgcacaatatcaaagtcgctttcgactcttcggttgttggtatagcggcggcaatttccttcatcatcaccggaaagattgtcggcatcagggaaggaacgctcatctcaatgatcgggataggcaagtgcatgggcttttttaccaagtaccttggcgggaagatagacgctcttttcaggcttccaggtaaatag

SEQ ID NO: 49656 - protein, 111 aa, Unknown
  Obtained from environmental sample
  SIGNAL (1)...(25)
  misc_feature (1)..(111): Xaa is any amino acid
MAETMLFLLAGISIIGLGIMLYLRADLLPQPAEGLILAIEKKTGWKLHNIKVAFDSSVVGIAAAISFIITGKIVGIREGTLISMIGIGKCMGFFTKYLGGKIDALFRLPGK

SEQ ID NO: 49657 - DNA, 720 bp, Unknown
  Obtained from environmental sample
  misc_feature (1)..(720): n is a, c, g, or t
atggcgcaaaggttaggtgaaactctaaaagaaaaatacccggcggtagattatgttatgggtacttccgcccgctccatctttccgcttatactggaagctgcggaaaaaggcgaaaaagccgcgcttgatttaaccgaaaacgcggttttctctttttcaaattcccaccttgaagaagggcagttccgcagttttattcccatcatgcacggctgcgacaacttctgctcatactgcattgttccgtatgtgcgcggcagggaagtttcccgcgatcctgaaaatatcgcggaggaaatgcgtcttgtcgccgaaaggggagtgcgcgaaattaccctgcttgggcagaatgtaaacagttatttttgggaaaaagacaaaatgaatttttccgctctgctaaaatttgttgcggatacagccggaaaaagcgggataaaatggatacgcttcctttccgcaaacccaaggaatttttcatccgagacaatacaggttatggctgaaaatcccgttttctgccgacatttgcacttacccgttcagcacggctcanacactgtcctgaaagcgatgaaccgcggctatacaagggagcgctacattgagcttgtcggggaaatccgcgccgcaatgccgggaaataccctgtccacggacattttggccggttttccgggcgaacagaggaagatttggaacagacactccaattaa

SEQ ID NO: 49658 - protein, 239 aa, Unknown
  Obtained from environmental sample
  DOMAIN (67)...(238): Radical SAM superfamily
  misc_feature (1)..(239): Xaa is any amino acid
MAQRLGETLKEKYPAVDYVMGTSARSIFPLILEAAEKGEKAALDLTENAVFSFSNSHLEEGQFRSFIPIMHGCDNFCSYCIVPYVRGREVSRDPENIAEEMRLVAERGVREITLLGQNVNSYFWEKDKMNFSALLKFVADTAGKSGIKWIRFLSANPRNFSSETIQVMAENPVFCRHLHLPVQHGSXTVLKAMNRGYTRERYIELVGEIRAAMPGNTLSTDILAGFPGEQRKIWNRHSN

SEQ ID NO: 49659 - DNA, 390 bp, Unknown
  Obtained from environmental sample
  misc_feature (1)..(390): n is a, c, g, or t
ttggaacagacactccaattaatggaagaagttaagtttctttacgcttatatgtaccattttaacccaagggaggggacaaaggcctttgatttgcccggcaggataagcgatgagataaaaagggaaaggctttcccgggtaatcgcccttcaaaaaaaacatacaaccggcctgttaaaaagcaggattggcagtaaagaaacggtactaatagagggaatttcccgaaaaaatgccgatgaattaataacaaggacagaaaaagacgaaatggcggtggttccggggcctgcttctatgataggatcttttgcggaagtcaccctttctgccctaaagggaaatacatttatttcgaaggagttgaatttatgccaggtcgtttaa

SEQ ID NO: 49660 - protein, 129 aa, Unknown
  Obtained from environmental sample
  DOMAIN (61)...(124): TRAM domain
  misc_feature (1)..(129): Xaa is any amino acid
MEQTLQLMEEVKFLYAYMYHFNPREGTKAFDLPGRISDEIKRERLSRVIALQKKHTTGLLKSRIGSKETVLIEGISRKNADELITRTEKDEMAVVPGPASMIGSFAEVTLSALKGNTFISKELNLCQVV

SEQ ID NO: 49661 - DNA, 360 bp, Unknown
  Obtained from environmental sample
  misc_feature (1)..(360): n is a, c, g, or t
atgccaggtcgtttaataatttttattctaatacttgctataattcttttttttataggattaaatcttgacaataaatgcgatataaactttggttttaccaaattggaaaatacccctgttttctttcctatctttgtctcgtttgcattagggcttatatgttctttgcctttcattattaaaagtaaaataggaagaaagcgaaatgatacagtaaaagacataaaaccggccaaagataatttttccggttctgatgacgttccttatattgttcccgaacctgatgaaaaattaaaacaggaagccatgtcggcaagagaaaaattttttgccaagaagttcggaaaaaaataa

SEQ ID NO: 49662 - protein, 119 aa, Unknown
  Obtained from environmental sample
  misc_feature (1)..(119): Xaa is any amino acid
MPGRLIIFILILAIILFFIGLNLDNKCDINFGFTKLENTPVFFPIFVSFALGLICSLPFIIKSKIGRKRNDTVKDIKPAKDNFSGSDDVPYIVPEPDEKLKQEAMSAREKFFAKKFGKK

SEQ ID NO: 49663 - DNA, 882 bp, Unknown
  Obtained from environmental sample
  misc_feature (1)..(882): n is a, c, g, or t
atggagcccttaatggaaactgacattgaaaagagcttaaaggaatacataaaaaatatgcccagtcttcccacctctgtaacgaaagtgctggaaatttgcaataacccccaggccagtccaatggatttgaaccatgttatttcccttgatcctgtattggtaggccgggtgcttaagctcattaattcagcttattatggggttggacagcctgtgaccagccttgccagggctattatcatgctggggatcaataccgtaaaaaacctcgccctgtccacgacagtgataggccaactgagtccccaaaaaaaatccatgggccttgatttggaaggtttctggcggcattccctttgcgtgggggttgctgccaagtttttggccaagaagcgcggaattgattcaaaattggtcgaggaatactttaccgccggccttttgcatgatattggcaagataccgctaaacgcggttctttcgaagcagtacatggttacggtcagcaacgccgacagggaaaggaaaccccttaccctggcggaagaaaatgtctttggaataaaccattgtattgccggcgaaattatagccagcgcctggaaactggatggcgcgattggggacgcgataaagtaccatcatagttatgacgaatatacgggaaacaacaaggatattctttacagtgtcgcagccgccaaccggtttgccacgctttcggtaattggtttttcaggagagcgccatcccgcccctcttcccaatatgatttgggaagcgttgaaagtttcccgggatgtttttgacgagatcgaagaaaaagtgaacgctgaaattgaaaaggctgaaattttccttaaaataggccacatgtag

SEQ ID NO: 49664 - protein, 293 aa, Unknown
  Obtained from environmental sample
  DOMAIN (115)...(241): HD domain
  misc_feature (1)..(293): Xaa is any amino acid
MEPLMETDIEKSLKEYIKNMPSLPTSVTKVLEICNNPQASPMDLNHVISLDPVLVGRVLKLINSAYYGVGQPVTSLARAIIMLGINTVKNLALSTTVIGQLSPQKKSMGLDLEGFWRHSLCVGVAAKFLAKKRGIDSKLVEEYFTAGLLHDIGKIPLNAVLSKQYMVTVSNADRERKPLTLAEENVFGINHCIAGEIIASAWKLDGAIGDAIKYHHSYDEYTGNNKDILYSVAAANRFATLSVIGFSGERHPAPLPNMIWEALKVSRDVFDEIEEKVNAEIEKAEIFLKIGHM

SEQ ID NO: 49665 - DNA, 744 bp, Unknown
  Obtained from environmental sample
  misc_feature (1)..(744): n is a, c, g, or t
atgttggacacgctttttacaatcagggtgatactttgcaagcacaggctgcttataagatgctcagataattttctatattttcccctaaatatgattttcggtaataaaacaacatttatcgcattggtggcaattttcggatttgccttgacattcacattttcctgctcaggcggcgatgacggcggcggcggcaattccagcggtggcagctcctgcgatatgagcggttacaaaagcaaaaaaatgccggacgggaaaacgtggatgacggagaatttgaattgcaaagttgctggcagcgaatgctatgataaaaatgaaagcaactgcaatacctacggtcgtctttacactgggaaagcggcaaagaaagcctgttccggtggctggcatttgccaagcgatgatgaatgggaagcattggtgacagcggctggcggtgaagaaacagcgggcaagcatttgaaggcaaaagaaggctggaatagttgcggtccttcaggttcaggcaaaagctattcgtgcgaggacacgcatggcttttccgcccttccgggcggcagcggtagttctggtggcagtttcatcaatgtcggcgacgacggctactggtggagttccacagagagcgatagctacgacgcttacagcaggaatgtggactacagctacgaggacgtaagcaggcacgactacggtaagctcatcttgtttagtgttcgttgcttgcaggactaa

SEQ ID NO: 49666 - protein, 247 aa, Unknown
  Obtained from environmental sample
  misc_feature (1)..(247): Xaa is any amino acid
MLDTLFTIRVILCKHRLLIRCSDNFLYFPLNMIFGNKTTFIALVAIFGFALTFTFSCSGGDDGGGGNSSGGSSCDMSGYKSKKMPDGKTWMTENLNCKVAGSECYDKNESNCNTYGRLYTGKAAKKACSGGWHLPSDDEWEALVTAAGGEETAGKHLKAKEGWNSCGPSGSGKSYSCEDTHGFSALPGGSGSSGGSFINVGDDGYWWSSTESDSYDAYSRNVDYSYEDVSRHDYGKLILFSVRCLQD

SEQ ID NO: 49667 - DNA, 585 bp, Unknown
  Obtained from environmental sample
  misc_feature (1)..(585): n is a, c, g, or t
atgacaatacttgatgaaattgccgcgaagactcatctcagggtcgagagggcaaaggaaaatgcgccgctcgatcttatgcgggaaaaggccctgggaacttgtcaggcgcgtgccggcgatgcgatgccttttgaaaaggcccttaccgcgcccgatctttcttttatctgtgaggtaaaaagggcctccccttcaaaaggaataatcgccgaaagttttccgtaccttgagatcgcgaaggaatacgaaaccgccggagctgcggcgatttccgtgcttaccgagccggaatattttctgggaagcgatcgttatctgcaagagatagcggcggaaataaatataccagtccttagaaaggattttgttatcgatccctaccagatctacgaggcgaaacttttgggggcgcaagcggtactgctaatcgtggctctactggacgcgaaggctcttgaggctttcatcaagatcgcttcggaagcggggctttcggcgttagttgaaattcacagcgaggcggaagcagagcaggcgcttgaagccggagcgggaattatcggaataaacaacgcgatttaa

SEQ ID NO: 49668 - protein, 194 aa, Unknown
  Obtained from environmental sample
  DOMAIN (3)...(194): Indole-3-glycerol phosphate synthase
  misc_feature (1)..(194): Xaa is any amino acid
MTILDEIAAKTHLRVERAKENAPLDLMREKALGTCQARAGDAMPFEKALTAPDLSFICEVKRASPSKGIIAESFPYLEIAKEYETAGAAAISVLTEPEYFLGSDRYLQEIAAEINIPVLRKDFVIDPYQIYEAKLLGAQAVLLIVALLDAKALEAFIKIASEAGLSALVEIHSEAEAEQALEAGAGIIGINNAI

SEQ ID NO: 49669 - DNA, 480 bp, Unknown
  Obtained from environmental sample
  misc_feature (1)..(480): n is a, c, g, or t
atgacagattggccgaggctgcatgagacctcggcttctttctcaaagcccggcaggcatcagggacttggtcttgatatttatacgcaggttacaagccctttgcgcaggtatacagaccttcttgcccatatacagatacgatcttttttgcgcggcggtgtagtccttagcgctgatgatgttttaacacggcttggttacagcgaagcggccgcatctgcggctgttcagacggaacgggcatctgtcaattactggataatggtgtaccttgcagataaaatagattctgattgggaagccgttgcacttgagaaaaagggaaaccgctgggcagtcattatcccttcacttgcgcttgaaacacaggttccgcttcaaaaagacgttgcgctcaatgatactgttagtttaattttaaaatcagtgaatattcctaaatgtgaagcggtatttgtgcaggctaccagtaaataa

SEQ ID NO: 49670 - protein, 159 aa, Unknown
  Obtained from environmental sample
  misc_feature (1)..(159): Xaa is any amino acid
MTDWPRLHETSASFSKPGRHQGLGLDIYTQVTSPLRRYTDLLAHIQIRSFLRGGVVLSADDVLTRLGYSEAAASAAVQTERASVNYWIMVYLADKIDSDWEAVALEKKGNRWAVIIPSLALETQVPLQKDVALNDTVSLILKSVNIPKCEAVFVQATSK

SEQ ID NO: 49671 - DNA, 2091 bp, Unknown
  Obtained from environmental sample
  misc_feature (1)..(2091): n is a, c, g, or t
atgcgccaaaaatcaaaacggctctttgatgccgccatgaatgataaaggttttcccgtaacagcggaagcatggcggagctgtcttgtcgattcttttgacatggacggattccgtgaattaatttcttccgtcaataacggaagcattactttgtcattttttcaaactgttctaccctctccgttttccgcaaatattgtcagacaggaaacaaataccttcatgtatgaatacgatgatcgaaaggatttgacgggcaaaaaacattccgcttctctttccgacaaagtaatagaagaagcaatcggcaatgaagcgctgcgccctgttttaaaaacggaaatgatcgcaagttttgtctcaagactgcgaagagaaattgcagggtgggctcctgaagacagtctctcgttaaacgaatggataaaagagcgaatagcaattcctgttgacgagtgggaaatactaaaagctgcaatgccggaaacagttgtaaaagaatttgacgaaaactggattaaaattattacgcgcaatggagcggaagcagcttccgtcattcaccgcgaatgggaagaaaactggaaaaatgagcctttaagccttctcggtcaatggctgcgttatgaaggacctgtttccattgaacgaatttgctcagtcttcggagttaattccgccgaagcggaagatgctgtcaatgcgttagttgaagttgatgaagcagtccgcaatattgccgtagaagatgcaaataataatttctcgcttatatgcgaccgtgaaaaccttgaaatgctcctgcgtctttcccgcaaaaaacagcgattgggaattaaggaacgtcccgcatccgtattgttcctttttcttgccctgcgtcatggattgactgaaggcagctcaggtttcaggaaaaatctttacggttgggcagcgcaggcaaaactatgggaaactgaaatactttacgccagagacaataattataatccagaaaaaattaacaacgaactgtgcgagaggctcatctggtacggagccggaaaagaaaaaatcgcattctgccgaatcgaggatttggatttggtgaatgatttgccagccgcatcattaaacaacagagaaaataaaaacgaaaaacataatattacgcatcttatttcatcgtcatttcttgaccatccgcgcgatttttgggaaataaaaaacgaactttcattagatataaaatcctgcgcgcaggttctttggcaggaagtctggcgcggcgctattacggcagattcatttgatcctgtaagaaagggaatagaaaacggtttcattccgaaaaatgttgaatttccgcaaaataagaaaatggcgtatccgttcggaagacaaccgcgtatacccggcgctctccgtaaccgctggcgtaacggcgcaccggtgcaggggaactggttttcacttgtaccggaagccggcggcgaaatcagcccccttgaagaagatgcgcttaaccgggaccgcgtacgccttcttcttgaccggtggggagtactttgccgtccgcttcttgaacatgaagcgcctgttttttcatggtcaaaactgttacccgcgatgcggcgcatggaactttcaggagaactgattgcagtacgcattttcgcaggtattaattcactgcagtttacttctccttccgttattgcggaacttgagcgcgcggaaacatttgacggtttttactggatgaatgcagcggaccccgcaagccctgcgggacttgaaatcgaaggacttggttattcgttatgcgcaagaagctcaagcaacaggctttatttcaagggcgcaaacttaattgccatatcagcgaaaaacggcagagaaatgcaaattttcatggaagcggatgatcccggtattgagaagttaatcgaactttttaaattaccgcgcacaaggaaggttctgcctgaaaataaaatattaatcgaaaaaatcaacgggcagagcgcggcaggaagcgcttacgcgccgttttttaaagatttaaaatttgtgagcgacaggggaaggcttatttactggtag

SEQ ID NO: 49672 - protein, 696 aa, Unknown
  Obtained from environmental sample
  misc_feature (1)..(696): Xaa is any amino acid
MRQKSKRLFDAAMNDKGFPVTAEAWRSCLVDSFDMDGFRELISSVNNGSITLSFFQTVLPSPFSANIVRQETNTFMYEYDDRKDLTGKKHSASLSDKVIEEAIGNEALRPVLKTEMIASFVSRLRREIAGWAPEDSLSLNEWIKERIAIPVDEWEILKAAMPETVVKEFDENWIKIITRNGAEAASVIHREWEENWKNEPLSLLGQWLRYEGPVSIERICSVFGVNSAEAEDAVNALVEVDEAVRNIAVEDANNNFSLICDRENLEMLLRLSRKKQRLGIKERPASVLFLFLALRHGLTEGSSGFRKNLYGWAAQAKLWETEILYARDNNYNPEKINNELCERLIWYGAGKEKIAFCRIEDLDLVNDLPAASLNNRENKNEKHNITHLISSSFLDHPRDFWEIKNELSLDIKSCAQVLWQEVWRGAITADSFDPVRKGIENGFIPKNVEFPQNKKMAYPFGRQPRIPGALRNRWRNGAPVQGNWFSLVPEAGGEISPLEEDALNRDRVRLLLDRWGVLCRPLLEHEAPVFSWSKLLPAMRRMELSGELIAVRIFAGINSLQFTSPSVIAELERAETFDGFYWMNAADPASPAGLEIEGLGYSLCARSSSNRLYFKGANLIAISAKNGREMQIFMEADDPGIEKLIELFKLPRTRKVLPENKILIEKINGQSAAGSAYAPFFKDLKFVSDRGRLIYW

SEQ ID NO: 49673 - DNA, 720 bp, Unknown
  Obtained from environmental sample
  misc_feature (1)..(720): n is a, c, g, or t
gtggcttccctgatctcttttagaaacggcgttcctgacagaaaaaactaccgctattttaagctcagaaccgtagtgggagttgtcgatgactttgcctccattcgggaagcggttcagcgccgctatgcccggctcgtacgggaaagcaaggaactgcccgacctggtgctaatcgacggcggcataggccaggtaaatgcggcccgcggcgttatggatgagctgggtattgactgcgatgtcataggccttgcaaagcgggaagaagaaatttggcttccgcacgccacagaacctgtcaggctttctcaaagatccgaagccctgaaagtcttgcagcacgttcgggacgaaacccaccgttttgccaccggactgaaccagcgtctgcgatctggcgatctttacttcccggtattggaatcaatcgaaggcattggcccaaaacgcgccgcggccatcatgaaagcctacggaagcctggaaaaaatcgccgccgccgacccgcaagaaatcgccgacaaatgcggcatatcggcaacagcagcgagagccgcaaggtcttctgtccgccttgctatcgaagagcaggaagcaaagaaaaagaagctctcaataagcaggttcaggacttcctacggagattcctccgccagcgccgcagacttggcggcggaagcgtttgcggcagaagaaacgccggattataagccttaa

SEQ ID NO: 49674 - protein, 239 aa, Unknown
  Obtained from environmental sample
  DOMAIN (1)...(125): UvrC Helix-hairpin-helix N-terminal
  misc_feature (1)..(239): Xaa is any amino acid
MASLISFRNGVPDRKNYRYFKLRTVVGVVDDFASIREAVQRRYARLVRESKELPDLVLIDGGIGQVNAARGVMDELGIDCDVIGLAKREEEIWLPHATEPVRLSQRSEALKVLQHVRDETHRFATGLNQRLRSGDLYFPVLESIEGIGPKRAAAIMKAYGSLEKIAAADPQEIADKCGISATAARAARSSVRLAIEEQEAKKKKLSISRFRTSYGDSSASAADLAAEAFAAEETPDYKP

SEQ ID NO: 49675 - DNA, 795 bp, Unknown
  Obtained from environmental sample
  misc_feature (1)..(795): n is a, c, g, or t
ttgatcagatcggccgagcaggttctggatgagactcttgcggtgattgaaaaactctttcccctgcgcaaatgcagaaccatgaaaaagcgcgaaaatccctgtatgtactatcacataaaccgctgtctcgcgccgtgctgcggcagggtggaagaaccggcgtatcaagcccaggtcgagagggtacggaaacttctagccggagagacttccgccctgacacgggatttaagcgcccaaatgcaagcggcggcggcggccctgaaattcgaggaggccgcaggcttcaggaacgcgattcaggcgattgaaagcctttcggaaaacaactccgttgccgacatggatccggaaaaccgcgattacattgcctgggcagaggaagggattttcaccaccttttctgttctttccatgcggggcggccgcatgacaggccgggagctttttaactcccgttccgccgcaaaagaagacgagtccctggtaacattcctggccgcttactattcccccgaccgccctcccccgccccggatttacctaaccggactgtccgtccaggttgatgccctggacaggtactttagggaacagttcggtatcacccccgaccttatatggcaggaggggcttgaaaaaaggcacattgccgccctaagcatggcccggcaaaacgcgcaggaagagcttaaacggcggcttagggaacgtggagcggggcccgccctggacgagcttaagcgggttttgaacctcaaagcaaggcccggaacgcatcgaaggctttga

SEQ ID NO: 49676 - protein, 264 aa, Unknown
  Obtained from environmental sample
  DOMAIN (72)...(107): UvrB/uvrC motif
  misc_feature (1)..(264): Xaa is any amino acid
MIRSAEQVLDETLAVIEKLFPLRKCRTMKKRENPCMYYHINRCLAPCCGRVEEPAYQAQVERVRKLLAGETSALTRDLSAQMQAAAAALKFEEAAGFRNAIQAIESLSENNSVADMDPENRDYIAWAEEGIFTTFSVLSMRGGRMTGRELFNSRSAAKEDESLVTFLAAYYSPDRPPPPRIYLTGLSVQVDALDRYFREQFGITPDLIWQEGLEKRHIAALSMARQNAQEELKRRLRERGAGPALDELKRVLNLKARPGTHRRL

SEQ ID NO: 49677 - DNA, 1254 bp, Unknown
  Obtained from environmental sample
  misc_feature (1)..(1254): n is a, c, g, or t
atggcgagagcgggtggagcctttctgcggcactgccagttgcccagcctgccgggcaaagcccctctgggcggcgaaatcctcagccacgacttcgtggaatccgcgctcatgcgccgggccggctacggagtgtggctggcctatgaactttccggctcgttcgagcagaatccgccttcgctcattgacgaactcattcgcgaccggcgctggtgccagggcaacctccagcacagccggctgctgttcacccgcggcttttttcccacccaccgcgccctgttcatcaacggcatcatgtcttacggctcggccatgctgtggcttttgttcctgatcgtcagctgtttgcaggctgtgtccgaactgctcgttctgcccacatattttcctcccggcccaagcctgttccccaactggcccaaatattttcccaactgggcgctgaccctggtcggcggcacggcgtccctcctgtttctgcccaaggttctgtccctttttctggtgacgatcaagggcggcgccgccggtttcggcggcgttattcccatgacgctcagcgcctgcggcgaagtgctgatttccacctttcttgcgccggtgcggatgctctttcacagtcttttcgtggccgccaccctgctcggccgcagcgtgagctggagcacacagaaccggggcggcgaaggcacatcctggggcgacgccgtgcgttttcactggtggggcacagtcctcggccttgtctggggctggttcatgtacctgatcaatcccggattctttctctggctgtcgcccatcatcatcggactgattctggctgttcccctttcggttctgaccagccgggcgtcgcttggcgagatcgccggacggctcaagctgtttcttacgcccgttgatgttgatcccccgcccgaacttgagtgctttgcggccaacctggccagacctgcgcctttttgtcctttccgcctgccgcccggcgccggctttgcgcgggcggtggtcattccccgcgtgtttgtcctgcacgccacgctggcccataacaaacgccgcaatccgccgggcaaaaccgcccggctgcggcaactgctgtttaaagctctggcccaagggccggacagcctcagcccccccgaaaaaatggccattctcaatgagccggactgcctgtacacgctgcaccgcgaagtatgggaactcgacgcggcggcagccgcccgctggggcatccggtaa

SEQ ID NO: 49678 - protein, 417 aa, Unknown
  Obtained from environmental sample
  misc_feature (1)..(417): Xaa is any amino acid
MARAGGAFLRHCQLPSLPGKAPLGGEILSHDFVESALMRRAGYGVWLAYELSGSFEQNPPSLIDELIRDRRWCQGNLQHSRLLFTRGFFPTHRALFINGIMSYGSAMLWLLFLIVSCLQAVSELLVLPTYFPPGPSLFPNWPKYFPNWALTLVGGTASLLFLPKVLSLFLVTIKGGAAGFGGVIPMTLSACGEVLISTFLAPVRMLFHSLFVAATLLGRSVSWSTQNRGGEGTSWGDAVRFHWWGTVLGLVWGWFMYLINPGFFLWLSPIIIGLILAVPLSVLTSRASLGEIAGRLKLFLTPVDVDPPPELECFAANLARPAPFCPFRLPPGAGFARAVVIPRVFVLHATLAHNKRRNPPGKTARLRQLLFKALAQGPDSLSPPEKMAILNEPDCLYTLHREVWELDAAAAARWGIR

SEQ ID NO: 49679 - DNA, 849 bp, Unknown
  Obtained from environmental sample
  misc_feature (1)..(849): n is a, c, g, or t
atgaacacatcgttgcgaaccgtgcagggaaaaacgtatttcatggccgaatggggcacgcccggcccaaagaccattctgggcatccacggtctgaccgccaactgctatcacatggccgccgtatcggagtttttgaccgccgggggacgccacgcgctggcgtatgacgtgcgcggccggggcgacagttcgccagcccaggcgccctcgaccatgctccgccatgctcaggacgccgtagagatcatggacgcgctcccggccgaaaaggtgttgattctcggctattccatgggcgcgttcatcggcagcatggcggccggcatgagcgacaaggcggcgggcctggtgctgttcgacggcggcggcatactcacaggcgccgacgctgaaaagctccttcccgctctcgcccgtctggacaaggtctttgccggcgctgaagactatgtggaggcggccaagcccaattacgcttttctcgggctgccctggaacagcttcatcgaagccgccgtgcgccacgaagtcggcccctgcgaggacggccggtacaagtacaagggccaggcggagcgcgtgaaggaagatatgctggacatcgcggggttcaagtacgaggaggtcttcgcccgcatcaagtgtccggtttttctggtgcatgctcaggggggactggggcaaggcccggcgctgtacagtgaatccggctatgacatcacccgcaagtgcctgcccgaattgacattctatcagaccaaagccaatcactacaccatgatgctggagccgcagccggaaatgaacacgcacctggaagcctttgtgtccaaatgcggattttag

SEQ ID NO: 49680 - protein, 282 aa, Unknown
  Obtained from environmental sample
  DOMAIN (51)...(275): alpha/beta hydrolase fold
  misc_feature (1)..(282): Xaa is any amino acid
MNTSLRTVQGKTYFMAEWGTPGPKTILGIHGLTANCYHMAAVSEFLTAGGRHALAYDVRGRGDSSPAQAPSTMLRHAQDAVEIMDALPAEKVLILGYSMGAFIGSMAAGMSDKAAGLVLFDGGGILTGADAEKLLPALARLDKVFAGAEDYVEAAKPNYAFLGLPWNSFIEAAVRHEVGPCEDGRYKYKGQAERVKEDMLDIAGFKYEEVFARIKCPVFLVHAQGGLGQGPALYSESGYDITRKCLPELTFYQTKANHYTMMLEPQPEMNTHLEAFVSKCGF

SEQ ID NO: 49681 - DNA, 441 bp, Unknown
  Obtained from environmental sample
  misc_feature (1)..(441): n is a, c, g, or t
gtgattttgcctttgactttgcttttgattttgactttgcctttgactgaagttcgggggtttagcccccgaactatctatgaaagggcgcgtttacgcgccctttcgtctaaaaaagaatttaaagattttgaatttaataatttgacgttaacaaggaaaaaacaaatggatccgatagtagtggtagacataggccgtcaagcgttgataataacgctgctgctgtccggcccgatgctgttggtgggcttggctttgggcgtgataataggtatattccaagccgcgacccagatacacgaggccacgctcacgttcattcctaaatttttgggaatatcgctggtactcctgttgttaatgccgtggatgatgattaagttggtagaatacacctctaatctgttcagcatgataggcagaatagggctgggatga

SEQ ID NO: 49682 - protein, 146 aa, Unknown
  Obtained from environmental sample
  DOMAIN (60)...(135): Bacterial export proteins, family 3
  misc_feature (1)..(146): Xaa is any amino acid
MILPLTLLLILTLPLTEVRGFSPRTIYERARLRALSSKKEFKDFEFNNLTLTRKKQMDPIVVVDIGRQALIITLLLSGPMLLVGLALGVIIGIFQAATQIHEATLTFIPKFLGISLVLLLLMPWMMIKLVEYTSNLFSMIGRIGLG

SEQ ID NO: 49683 - DNA, 795 bp, Unknown
  Obtained from environmental sample
  misc_feature (1)..(795): n is a, c, g, or t
atggaaggcctaatggtcacgctcgatcagattcagtactacctgctgatgttcgtacgtgttataaccatgttggcgttgctcccgattttcggcgcgaactacattcccgtgcaggtcaaggcggcgctcggtttgctgcttacctccgtgctcttttccgttcagcttgccgccgggcttccggcctttcccgggccgttcacgttgccgctcttctttatgctcgtggtaaaggaggcgctcgtcgggcttgccgtcggtttcgcctcctcgttcctcttcacggccgttcagttcgccggacgtatggtggacacggagatgggcttcggcttcgtggaggtagtcgacccgttcaccgaggagcagacgacggtcttggggcagttgcaggtgatactctttacaatattgtttttggcgataaacggccactactttatgcttataacggtgcagaagagctttgagatagtcccgatgttcagcgcggtcttcccgggcggcaaaatgaccgaccacctgacgacgatgaccgccgacgtcttcgtactgggtctaaagctctccgccccgatattcgtaacgctgctgctctccgaattggcaatgggcatagtggcccgcaccgtgccccagatgaacatcttcttcgtgggattgccgctgaagattttcataggaatggcgacgatgataatcgtgctgccgatgctcgcggaattgtttaagagaatggcggaggggattatcaaggacatttggaaattattatatttgatgagcgggtaa

SEQ ID NO: 49684 - protein, 264 aa, Unknown
  Obtained from environmental sample
  DOMAIN (5)...(256): Bacterial export proteins, family 1
  misc_feature (1)..(264): Xaa is any amino acid
MEGLMVTLDQIQYYLLMFVRVITMLALLPIFGANYIPVQVKAALGLLLTSVLFSVQLAAGLPAFPGPFTLPLFFMLVVKEALVGLAVGFASSFLFTAVQFAGRMVDTEMGFGFVEVVDPFTEEQTTVLGQLQVILFTILFLAINGHYFMLITVQKSFEIVPMFSAVFPGGKMTDHLTTMTADVFVLGLKLSAPIFVTLLLSELAMGIVARTVPQMNIFFVGLPLKIFIGMATMIIVLPMLAELFKRMAEGIIKDIWKLLYLMSG

SEQ ID NO: 49685 - DNA, 567 bp, Unknown
  Obtained from environmental sample
  misc_feature (1)..(567): n is a, c, g, or t
gtgcttatgttgctggattttgagaatatgaaaaagaatatggcaaagcaaattcctgaggaatattcagaaagggttttgcagttttttggttcctttgacaatataatgagcaaatattttagagcgcaaacctccattgccgctatagtcggggtactttttgcaatatcgtttaacataatggggttacctctggggcttccatttgggcttttcattggcgttttgaatatggttccatatatgcaaatagcgagcatacctatagccgcatttttgggtttaatctactctttggaaacgggaattgcattttggcaagtagttttgataataactgcaatttacgggggcattcaggttttgcaagatatggtgataactccaaaaataatgggcggtgtgcttggtctttctccaattctcattttgatgtctcttgcaatttggggaaaacttctaggattcttggggtttgtgcttgccattcccttcacgtgcattgccattgccacatataaaagctatcttgtgaggaataagagtacagccaaatgcgactag

SEQ ID NO: 49686 - protein, 188 aa, Unknown
  Obtained from environmental sample
  misc_feature (1)..(188): Xaa is any amino acid
MLMLLDFENMKKNMAKQIPEEYSERVLQFFGSFDNIMSKYFRAQTSIAAIVGVLFAISFNIMGLPLGLPFGLFIGVLNMVPYMQIASIPIAAFLGLIYSLETGIAFWQVVLIITAIYGGIQVLQDMVITPKIMGGVLGLSPILILMSLAIWGKLLGFLGFVLAIPFTCIAIATYKSYLVRNKSTAKCD

SEQ ID NO: 49687 - DNA, 1131 bp, Unknown
  Obtained from environmental sample
  misc_feature (1)..(1131): n is a, c, g, or t
atgcgactagacaaatatttgcaggcgaaatatccagaatattccagaacagatttgcaaaaaataattgcagacaaaaaagttctattgaatggcaagcccttgctaaaaagttttgaagtagatgaaaataatgatttacccattgaaattttgcaattgcctattaaaacagaaagccatttggaacccgaaaacattcctttgaacattgtttttgaagatgagcatttagcggtaatcaataaaccgcgcgatatggcaatgcacccgggaaacggagtgagcaaaagaactctcgctgccgcattgctttggcatttcaaaaatctctcgcaagtgaacggacctttgcgccctggaattttgcacaggctagacaaagacactccggggcttttggttgtggcaaaaacagatttggctcatatggaattaacgcgccaactggaagcgcgaattttggagcgaacatatagagcggtgatttggggaattttgcgcgataatgagggtgaaattgatgcccccatagaacgcgacccaaggaatcggcttaaaatgtctgtgcaagcagacggcaaagttgcgaaaacgaattacaaaacgctggaaacttatggcattgcatctttggttgagttcaagctgaacacgggaagaacccaccagataagggttcacgcacgctacttaggaaatccggttgttggtgacccgctttatgatggcagagaagaaagcacaaaaagagtagataccatttacaagcctgtggcagaaaaacttttggaactctcccctgcccagcttttgcagtcttacaaaataaaattcaaacatcccaaaacaaaaaaagcgatggaattcaaaatagatgaagatgaatccttaaaaaacgctcttgattttttgcgaaaaaaccgtgaaaaaagcaatctgcctgtacagctttttgagccaccccaaatttttgcaaaccccgaagacattgaattgccaccggaggaaattgaggaaatgcctgtgaaagcacgcccaacaagagcggagcgttatgccgccacaaaaataaaacgtgcattgaaaaagaaaaagaagctcatgctccagacaaaagataatccctga

SEQ ID NO: 49688 - protein, 376 aa, Unknown
  Obtained from environmental sample
  DOMAIN (1)...(47): S4 domain
  misc_feature (1)..(376): Xaa is any amino acid
MRLDKYLQAKYPEYSRTDLQKIIADKKVLLNGKPLLKSFEVDENNDLPIEILQLPIKTESHLEPENIPLNIVFEDEHLAVINKPRDMAMHPGNGVSKRTLAAALLWHFKNLSQVNGPLRPGILHRLDKDTPGLLVVAKTDLAHMELTRQLEARILERTYRAVIWGILRDNEGEIDAPIERDPRNRLKMSVQADGKVAKTNYKTLETYGIASLVEFKLNTGRTHQIRVHARYLGNPVVGDPLYDGREESTKRVDTIYKPVAEKLLELSPAQLLQSYKIKFKHPKTKKAMEFKIDEDESLKNALDFLRKNREKSNLPVQLFEPPQIFANPEDIELPPEEIEEMPVKARPTRAERYAATKIKRALKKKKKLMLQTKDNP

SEQ ID NO: 49689 - DNA, 480 bp, Unknown
  Obtained from environmental sample
  misc_feature (1)..(480): n is a, c, g, or t
ttgcctttttctatattacctcaaaccgataagagggctaacatggaagaaaaatcaataacagatgacggtttgtttaaccataatctctttattgtgtggaaacccgaatacgatttgggaatacacattattgacgagcagcacaagggaattgtgtccaccatcaattctctgttctacgcaatgcagaataagcacggcgaaaatgtgctcaagtctgtaataggtatggttaccgaatatacgcacatccattttgatgttgaagaggattttctgcgcaaatgcgggttcagcgattttaaaaaacatcaagcttggcacaatgagttgaggaataagctgtcacatgagggaagcaaaagtttatgggaccacaaccctcaagaatttttggatttcctcanagattggtggatagaccatatatgcgaaaaagacagggtattcagggattatcttttgtctggagcatga

SEQ ID NO: 49690 - protein, 159 aa, Unknown
  Obtained from environmental sample
  misc_feature (1)..(159): Xaa is any amino acid
MPFSILPQTDKRANMEEKSITDDGLFNHNLFIVWKPEYDLGIHIIDEQHKGIVSTINSLFYAMQNKHGENVLKSVIGMVTEYTHIHFDVEEDFLRKCGFSDFKKHQAWHNELRNKLSHEGSKSLWDHNPQEFLDFLXDWWIDHICEKDRVFRDYLLSGA

SEQ ID NO: 49691 - DNA, 615 bp, Unknown
  Obtained from environmental sample
  misc_feature (1)..(615): n is a, c, g, or t
atgtgcggctaccgcccctcnttcaagtccatgcgggcggcgtaccgcgacaaggtgatggagctggccgcgatagtcggcatacaagacgcgctgttcaaaccaataaagaagctctccggcggtatgcagcgcaagctggagatcatccgaagcctgatccacacgccggaggtgctcttcttggacgagccgacccaagggctcgacgcggtaagccgccgggggctttgggagtacatcaacagcgcccgcgagcgctacgggaccacggtcttcctcacgacccactacatagacgaggcggagaatgtggacaccgtctgcctgataaacagaggcaagatcgcggcgtgttcctcgcccgacgagttaaaacggaagctgttacgtcacgaattagtattggacgccgacgacaggacggcgctgaccgccgaactatcagacctcggggtgccgtttaccataaacgggcgtgttaccgttcccttcgaggggacggctcagggtatcatatcgcgtctgaaaacggacttgacggttctgcgaataaacgaaccgtcgcttgaagacgcttacatcgaatttctaaacaaggagagagcggcatga

SEQ ID NO: 49692 - protein, 204 aa, Unknown
  Obtained from environmental sample
  DOMAIN (4)...(114): ABC transporter
  misc_feature (1)..(204): Xaa is any amino acid
MCGYRPSFKSMRAAYRDKVMELAAIVGIQDALFKPIKKLSGGMQRKLEIIRSLIHTPEVLFLDEPTQGLDAVSRRGLWEYINSARERYGTTVFLTTHYIDEAENVDTVCLINRGKIAACSSPDELKRKLLRHELVLDADDRTALTAELSDLGVPFTINGRVTVPFEGTAQGIISRLKTDLTVLRINEPSLEDAYIEFLNKERAA

SEQ ID NO: 49693 - DNA, 324 bp, Unknown
  Obtained from environmental sample
  misc_feature (1)..(324): n is a, c, g, or t
atgggtgttttgaccaacgagaggaacacaaagagggcgatggccatgaataaaccccttattgccgtccagaacctgaccaagcggtacaagggcgcggggataccagcagtagacagcatccgtttttccgttggcgaaggggagttctttgccttccttgggccaaatggcgcggggaaaacgacaaccatttcaatcctgaccacaacgcttaccaaaacttcaggggagctgcgcatcgcccgattcgacgtgcacacccagtcgcggtcggaacacgaagaaatcgggattatcttccaacactcgagccttgactaa

SEQ ID NO: 49694 - protein, 107 aa, Unknown
  Obtained from environmental sample
  misc_feature (1)..(107): Xaa is any amino acid
MGVLTNERNTKRAMAMNKPLIAVQNLTKRYKGAGIPAVDSIRFSVGEGEFFAFLGPNGAGKTTTISILTTTLTKTSGELRIARFDVHTQSRSEHEEIGIIFQHSSLD

SEQ ID NO: 49695 - DNA, 900 bp, Unknown
  Obtained from environmental sample
  misc_feature (1)..(900): n is a, c, g, or t
gtggcccttatgggcaggcctatttttccggggatttttaccccgataatgataggaaaccccgtcgatgtcaaagtgattgacgacgccgtagccggcgacgcgatgatcgggctggtgatgctgcaaaacgagaccgaaacgccctccatcggggacctttacaaagtggggacagcggcgaagatcgttaaaaaaatcaatcttccggatggcggggtgaatatctttatctccacgcttaagcgttttaaggttaagaagaccctccatgccagcaaccccatagtggcggcggtggagtacctgaatgaggaagaggacgacaccagcgaggtaaaggcccttacaagagcgctcatttcggaaatgaagcagatttccgagaacaaccccctgttttcagaggaaatgcgcctcaacatgataaatatagatcatcccggcaagatcgccgattttatcgccagtattctgaatattgacaaggcggaaatgcagaagattctggagatcctcaacgtgcgaaagcgcatggaacaggtgctggtattcattaagaaagaacaggaacttctgcggattcaaaaaaagatacagaaagagataaacgaaaaaatagaaaaatcgcaaagagattattttcttaaagaggagttgaaggcgataaagggcgagctggggatgaccaccgacgccaaaagctccgactaccagcggttcaaggacattattgaagccttcaaatttgaaggcgaggtaaaggaagcagtagagcaggagcttgagaaattcaacctgatggagccaactcggcggaatttgttgttacgcgcaattaccttgaccttatcgtcagccttccctggggcgttcccgaaccggagaatttcagcatga

SEQ ID NO: 49696 - protein, 299 aa, Unknown
  Obtained from environmental sample
  DOMAIN (1)...(188): ATP-dependent protease La (LON) domain
  misc_feature (1)..(299): Xaa is any amino acid
MALMGRPIFPGIFTPIMIGNPVDVKVIDDAVAGDAMIGLVMLQNETETPSIGDLYKVGTAAKIVKKINLPDGGVNIFISTLKRFKVKKTLHASNPIVAAVEYLNEEEDDTSEVKALTRALISEMKQISENNPLFSEEMRLNMINIDHPGKIADFIASILNIDKAEMQKILEILNVRKRMEQVLVFIKKEQELLRIQKKIQKEINEKIEKSQRDYFLKEELKAIKGELGMTTDAKSSDYQRFKDIIEAFKFEGEVKEAVEQELEKFNLMEPTRRNLLLRAITLTLSSAFPGAFPNRRISA

SEQ ID NO: 49697 - DNA, 1527 bp, Unknown
  Obtained from environmental sample
  misc_feature (1)..(1527): n is a, c, g, or t
atgaaaaacgccgcggcggttctggaagcggatcattacggccttgaggacgtaaagacccgtatcatggaatacctcgccgtgagaaagctgcggggctataacgccgaaagcgcccccgttgaagctcccgcccccgcgcccacagttgccgccgaagcgggcacggctcccgcgggttccataatctgccttgtcgggccgcccggcgtgggaaaaacatcggtcggcagatccatagcccgcgccctgggcaagcagttcttccgtttttcagtgggcgggatgcgggacgaggccgagataaaaggccaccgccgcacctacataggcgccatgccggggaagatcatacaggggcttaaaatcgtcaaaacaaaggcccccgtgtttatgattgacgagattgacaagatgggggcgagttaccagggcgatcccgccagtgcccttcttgaagtgctggatcccgagcagaatatcgagttcagggatcattatctggatatgccttttgacatttcccatatcttctttattgttacggctaacaccctggacacaatcccccctccgcttctggatcgcatggagataatacagctccccggctatatcgacacggaaaagctggaaatcgcacgcaggtaccttgtccccaaaagccttgagaaaaacggcctgaaaaaaaaccaggtcaagtacaccaaggacagccttttgcatatagccaattcctacgcccgtgaggccggcgtcaggaattttgaaaaaaaccttgacaagattcaccgcaagctggcgaagcagatagtcgaggagagggagaaagccggcgggaacggcgttcccgatgggaccggcgtttccggagaagacgccgctgtcgcgaagcccgtcatattccccatagataagaagcttattgagaagcatttgggcaagccgatttttcccgaaggcgacataaaaaaagcggacaggccgggaatgtcagtggggcttgcctggacaagcatgggcggcgacaccctggtaatcgaggcgacttcggttccgggcaaggaaggtctgacccttacaggcaaaatgggcgacacgatgaaggaaagcgccaccatagccatgaccgtggcgcgcaagctggccgttgaacgttaccgggtcgcgcaggactggtttgatttcaaccatatacacctgcacattcccgaaggcgccacgcccaaagacggcccctcggccggaataacgatggcaacggccctgctttcgcttatgagggacaaggtcgtaaccgaacggctggtaatgaccggtgagctttccctgaccggccaggtgcttcccataggcggccttaaagaaaaaacagtagccgcgaggcggaacaaagcccggcacatcattatcccgcgccagaacgagcgcgatcttgacgagattcccgatcatgtgaagaagggcatcagcttccacccggtagaacgcttcgaggaagtgctggcattagcgctgccagaataa

SEQ ID NO: 49698 - protein, 508 aa, Unknown
  Obtained from environmental sample
  DOMAIN (63)...(199): ATPase family associated with various cellular activities (AAA)
  misc_feature (1)..(508): Xaa is any amino acid
MKNAAAVLEADHYGLEDVKTRIMEYLAVRKLRGYNAESAPVEAPAPAPTVAAEAGTAPAGSIICLVGPPGVGKTSVGRSIARALGKQFFRFSVGGMRDEAEIKGHRRTYIGAMPGKIIQGLKIVKTKAPVFMIDEIDKMGASYQGDPASALLEVLDPEQNIEFRDHYLDMPFDISHIFFIVTANTLDTIPPPLLDRMEIIQLPGYIDTEKLEIARRYLVPKSLEKNGLKKNQVKYTKDSLLHIANSYAREAGVRNFEKNLDKIHRKLAKQIVEEREKAGGNGVPDGTGVSGEDAAVAKPVIFPIDKKLIEKHLGKPIFPEGDIKKADRPGMSVGLAWTSMGGDTLVIEATSVPGKEGLTLTGKMGDTMKESATIAMTVARKLAVERYRVAQDWFDFNHIHLHIPEGATPKDGPSAGITMATALLSLMRDKVVTERLVMTGELSLTGQVLPIGGLKEKTVAARRNKARHIIIPRQNERDLDEIPDHVKKGISFHPVERFEEVLALALPE

SEQ ID NO: 49699 - DNA, 663 bp, Unknown
  Obtained from environmental sample
  misc_feature (1)..(663): n is a, c, g, or t
atgcttctcaataagcttcttatctatggggaatatgacgggcttcgcgacagcggcgtcttctccggaaacgccggtcccatcgggaacgccgttcccgccggctttctccctctcctcgactatctgcttcgccagcttgcggtgaatcttgtcaaggtttttttcaaaattcctgacgccggcctcacgggcgtaggaattggctatatgcaaaaggctgtccttggtgtacttgacctggttttttttcaggccgtttttctcaaggcttttggggacaaggtacctgcgtgcgatttccagcttttccgtgtcgatatagccggggagctgtattatctccatgcgatccagaagcggaggggggattgtgtccagggtgttagccgtaacaataaagaagatatgggaaatgtcaaaaggcatatccagataatgatccctgaactcgatattctgctcgggatccagcacttcaagaagggcactggcgggatcgccctggtaactcgcccccatcttgtcaatctcgtcaatcataaacacgggggcctttgttttgacgattttaagcccctgtatgatcttccccggcatggcgcctatgtaggtgcggcggtggccttttatctcggcctcgtcccgcatcccgcccactga

SEQ ID NO: 49700 - protein, 220 aa, Unknown
  Obtained from environmental sample
  misc_feature (1)..(220): Xaa is any amino acid
MLLNKLLIYGEYDGLRDSGVFSGNAGPIGNAVPAGFLPLLDYLLRQLAVNLVKVFFKIPDAGLTGVGIGYMQKAVLGVLDLVFFQAVFLKAFGDKVPACDFQLFRVDIAGELYYLHAIQKRRGDCVQGVSRNNKEDMGNVKRHIQIMIPELDILLGIQHFKKGTGGIALVTRPHLVNLVNHKHGGLCFDDFKPLYDLPRHGAYVGAAVAFYLGLVPHPAH

SEQ ID NO: 49701 - DNA, 486 bp, Unknown
  Obtained from environmental sample
  misc_feature (1)..(486): n is a, c, g, or t
gtggaagctgatgcccttcttcacatgatcgggaatctcgtcaagatcgcgctcgttctggcgcgggataatgatgtgccgggctttgttccgcctcgcggctactgttttttctttaaggccgcctatgggaagcacctggccggtcagggaaagctcaccggtcattaccagccgttcggttacgaccttgtccctcataagcgaaagcagggccgttgccatcgttattccggccgaggggccgtctttgggcgtggcgccttcgggaatgtgcaggtgtatatggttgaaatcaaaccagtcctgcgcgacccggtaacgttcaacggccagcttgcgcgccacggtcatggctatggtggcgctttccttcatcgtgtcgcccattttgcctgtaagggtcagaccttccttgcccggaaccgaagtcgcctcgattaccagggtgtcgccgcccatgcttgtccaggcaagccccactga

SEQ ID NO: 49702 - protein, 161 aa, Unknown
  Obtained from environmental sample
  misc_feature (1)..(161): Xaa is any amino acid
MEADALLHMIGNLVKIALVLARDNDVPGFVPPRGYCFFFKAAYGKHLAGQGKLTGHYQPFGYDLVPHKRKQGRCHRYSGRGAVFGRGAFGNVQVYMVEIKPVLRDPVTFNGQLARHGHGYGGAFLHRVAHFACKGQTFLARNRSRLDYQGVAAHACPGKPH

SEQ ID NO: 49703 - DNA, 951 bp, Unknown
  Obtained from environmental sample
  misc_feature (1)..(951): n is a, c, g, or t
atgaaacgcttatttacaatccccgcgtggattttaattttttcaatcactattttttccggaggatgtatccgttcaagatccgcaaaggcaaacggtaaaatcaatgttacttctgtaatatttccttcgtatgattttgtccgcgccattgccggagacaaggtgaacctggtcatgctgttgccgcccggttctgaaagccattcctatgaaccaacgccacaggacataatcgctataaaaaacagcaacctttttatatatccgggcggagaaaattccaattgggtagaaagaatacttgactcaattagtaatgtatctgaaagcatgatagtcctcagcatgcttgatctggttgacgttgtggaagaagaaatcgtggagggcatggaggaggaggaagaggaagaagaaccggcctatgacgagcacgtttggacttcgccgcagaacgccaaagttattgttgccgcgattacagaagccctctgtgaattggacagcgcaaacgcggacttttataagcaaagcgtggcggcctattccgtacagttggacgagctggacgcttcatttaaggccgttgtagacggcgcaaaaaggaaaaccatcatatttggcgaccgcttccccttccgctatttggctgacgcttacgggctccagtacttcgccgcctttccaggctgttccaccgacacagagccaagcgcggccaccgtggcttttttaatcaacaaggtcagaagcgaaaaactccccgttattttccatatcgagctttcaaatgaaagaatggccgataccataagcgaggctacgggggcaaagaaacttctcttgcactcgtgccacaatctgaccaaaaacaattttgaaaaaggcatcacctatctggatgtccaaaaggccaatgtggtaaatttaaaagaggctttgtggtaa

SEQ ID NO: 49704 - protein, 316 aa, Unknown
  Obtained from environmental sample
  DOMAIN (9)...(316): Periplasmic solute binding protein family
  misc_feature (1)..(316): Xaa is any amino acid
MKRLFTIPAWILIFSITIFSGGCIRSRSAKANGKINVTSVIFPSYDFVRAIAGDKVNLVMLLPPGSESHSYEPTPQDIIAIKNSNLFIYPGGENSNWVERILDSISNVSESMIVLSMLDLVDVVEEEIVEGMEEEEEEEEPAYDEHVWTSPQNAKVIVAAITEALCELDSANADFYKQSVAAYSVQLDELDASFKAVVDGAKRKTIIFGDRFPFRYLADAYGLQYFAAFPGCSTDTEPSAATVAFLINKVRSEKLPVIFHIELSNERMADTISEATGAKKLLLHSCHNLTKNNFEKGITYLDVQKANVVNLKEALW

SEQ ID NO: 49705 - DNA, 708 bp, Unknown
  Obtained from environmental sample
  misc_feature (1)..(708): n is a, c, g, or t
ttggaaaatttagagagcatagagatttttccaatgaatttaagcgaggaaaatgatagttttgcatttgattttttaaaagattatttaatagcaacagaggattattacagcctgccgttggaattttcagaggaactctcaaaacattcaatagtgaatttttccgttttgaacaatgccaaatcctcaaatcaaataatgccccaagctcgttcaagttctggttttgagggtgtggaaaaggaaattacacagtacagtgcaaaaggtggcgatgtttatttgctggctccttcgcaggggcaggcacttaggctttatcacttgtcgcagggttctgcggcaaaagaaattctggtggggcatataacggaaggcttttggtgctgcgataattcctttgccattttatgcgaaaatcagattttcaaccgctttgggcacttaacaaaaaagaagcataaatcttctagcttgcacaatgcaatttttgcagattcgctaacaaatggcgattatgttgtgcacgaagaatgtggggtgggaaaatttctgggtcttgcccgcatagaggcactgggtgcgcaagtggattgcgttatgatagaatacgcagacaaggctaggctctcttttcctgttggcgatttgcacaaactggaaaaactcgttggaacgaagacgatggtccgcccagataaataa

SEQ ID NO: 49706 - protein, 235 aa, Unknown
  Obtained from environmental sample
  DOMAIN (168)...(230): CarD-like/TRCF domain
  misc_feature (1)..(235): Xaa is any amino acid
MENLESIEIFPMNLSEENDSFAFDFLKDYLIATEDYYSLPLEFSEELSKHSIVNFSVLNNAKSSNQIMPQARSSSGFEGVEKEITQYSAKGGDVYLLAPSQGQALRLYHLSQGSAAKEILVGHITEGFWCCDNSFAILCENQIFNRFGHLTKKKHKSSSLHNAIFADSLTNGDYVVHEECGVGKFLGLARIEALGAQVDCVMIEYADKARLSFPVGDLHKLEKLVGTKTMVRPDK

SEQ ID NO: 49707 - DNA, 651 bp, Unknown
  Obtained from environmental sample
  misc_feature (1)..(651): n is a, c, g, or t
ttgcgtttccgtacgctttctgattttttgcaaagcgaaagtttgggtttattggataacttgaattttccggcaaagggggatgtttgccattcaggcaatctgggcatctccgcacaggctttgtgggttagcgcaaaatttttgaagaactcaaaaccaattttaataataacaaaagaacaaaaatccgttgacttatggcacgaaaacctttgcttgcaaattgatgagtgcgacttgctctcattgcccttaacaaaagaaacggacaaaactagagttttcagcggaattttagaagaaaaattgaaatttattcaaaatgcggcggcaggttctaaaatagttattgcaagtgcggaggcacttaaaacaaaattgccatctgcaaaacgtttaaaagaaaaatccttgaatttgaaagtgggagatattttaagcgaagaaaatttgcaggaaatttttatatcaaggggctttaaggagcagcccgttgtggaaggtgttggggatttttccataagaggctgcatcatagacataaacccgcttttgcgcgaacacccaattcgtatggaactttggggcaatactctggaatccataagaacctgtgatattttcacgcagaggtcttggaaaatttag

SEQ ID NO: 49708 - protein, 216 aa, Unknown
  Obtained from environmental sample
  misc_feature (1)..(216): Xaa is any amino acid
MRFRTLSDFLQSESLGLLDNLNFPAKGDVCHSGNLGISAQALWVSAKFLKNSKPILIITKEQKSVDLWHENLCLQIDECDLLSLPLTKETDKTRVFSGILEEKLKFIQNAAAGSKIVIASAEALKTKLPSAKRLKEKSLNLKVGDILSEENLQEIFISRGFKEQPVVEGVGDFSIRGCIIDINPLLREHPIRMELWGNTLESIRTCDIFTQRSWKI

SEQ ID NO: 49709 - DNA, 651 bp, Unknown
  Obtained from environmental sample
  misc_feature (1)..(651): n is a, c, g, or t
atgacatcgcagcgcgggaagcccatcctcaacgaagacggagacccgatcccgcagataggggacggcatgggggccaacttcaaggaagtcctgttcgcgttctacgccgatgcccacattttcgtctttgactgcgggaacattagccccaaacagttcgagcgggcgctcggcggaatactggggcacgacgatgtcaaggccaggttcggcccagtgtcggccacgatactgcccaccagtgacgcgctggaaaaacttctcgaactacccaagaaaaccaagattgtgctcaaatacacgctgcccaacggggacgtagcggacgaagagggcaggatcatgcaaaggctggacgcgatgggggcttccgccgtagagaaaaagataacgagccagtccaagattgagctcaagcccgatggcacactgatggcggaaatgaacattgccagcgccaacggctatgtgatggtccaccacacaggacccgatggcaagacgcacaagaaatcaacgaaaaagataccaaggacagaaactgtttcctacgatagccccgaagggtactgggacgccttggactcagcggcagaagaattcgtatccgaccatggaggcagacatggccccaacaggcgaagatag

SEQ ID NO: 49710 - protein, 216 aa, Unknown
  Obtained from environmental sample
  misc_feature (1)..(216): Xaa is any amino acid
MTSQRGKPILNEDGDPIPQIGDGMGANFKEVLFAFYADAHIFVFDCGNISPKQFERALGGILGHDDVKARFGPVSATILPTSDALEKLLELPKKTKIVLKYTLPNGDVADEEGRIMQRLDAMGASAVEKKITSQSKIELKPDGTLMAEMNIASANGYVMVHHTGPDGKTHKKSTKKIPRTETVSYDSPEGYWDALDSAAEEFVSDHGGRHGPNRRR

SEQ ID NO: 49711 - DNA, 969 bp, Unknown
  Obtained from environmental sample
  misc_feature (1)..(969): n is a, c, g, or t
gtgcttttaacggaaaccacaaaagaccctaaaatgcaggcggataattacgcgtacagggcggctgagtggaatccgataaacggggacgaggtgcgccttcttaacggggaacctattccaaaggaaagcaaaatttattcgcttatctcgtccaccgtcgaaaatcacccggttttgggacaggcttttcatatatatattccttacatactttactacggctacgaaaacagccgccacggagaggttcctcttaaggacggaacttttcttaatatccgcgctttctcaatgcggtacgccgactaccggggcagttttaaggacaatccttttgtacttgaggcaaaacaggagcctcccgtcaacaaaaaagaaggggaatacatacctgaaacgctcagcgcttttacggaaatagccaaatcctcgggcggcagtttgatctactgcaatgatccggacgaagtggtggatttaatacaaaacttacttaataaagaaacaggaaaaaaagttgacattgttttatgccttgacactaccctaagcatgaaaaaatatatcgatccgttacgcgcaaaacttgttccggcccttgatcagcttataaaaaagttttcttctttcaggattggtatggttctatttaaagactattatgacgtatacctgacaaaaattgttccgtttacatccgatttcaagcgttttcagcgtgatcttaacgacattcgcgtacaaggcggcggcgatattcccgaagccgtttacgaagccctttacgatggggcgactaaattttcatgggatgccgagtcaaagataatgatccttatcggcgacgctccgcctcatccaaagccaaggggtaagattacaaaggaaatgcaggaaaaagccgcgaaggataaaaacataaaagtcagcgctatcctgctgccgcagtgtacgccttcaaaataa

SEQ ID NO: 49712 - protein, 322 aa, Unknown
  Obtained from environmental sample
  misc_feature (1)..(322): Xaa is any amino acid
MLLTETTKDPKMQADNYAYRAAEWNPINGDEVRLLNGEPIPKESKIYSLISSTVENHPVLGQAFHIYIPYILYYGYENSRHGEVPLKDGTFLNIRAFSMRYADYRGSFKDNPFVLEAKQEPPVNKKEGEYIPETLSAFTEIAKSSGGSLIYCNDPDEVVDLIQNLLNKETGKKVDIVLCLDTTLSMKKYIDPLRAKLVPALDQLIKKFSSFRIGMVLFKDYYDVYLTKIVPFTSDFKRFQRDLNDIRVQGGGDIPEAVYEALYDGATKFSWDAESKIMILIGDAPPHPKPRGKITKEMQEKAAKDKNIKVSAILLPQCTPSK

SEQ ID NO: 49713 - DNA, 345 bp, Unknown
  Obtained from environmental sample
  misc_feature (1)..(345): n is a, c, g, or t
atgtgcgacaaagccgtcttggacgagataacgtcaagggtctgcgccgccgccaaagaggtcttgggcgacaagttggagaaggtgatactcttcggttcatacgcgaggggtgactacgacgaggagtcggacgtagacattatggtgatagccgacatagcgttggaggaggttcatgagacacgggataagatccgtgatgtaaccggaagttttctttgggactacggcatactcgtatgtttgattatgacttgcagtgacatatttcacaaatgcaaggatgttaccggtttttacataaacgtccagaaagacggggtgctgttgtatgccgcctga

SEQ ID NO: 49714 - protein, 114 aa, Unknown
  Obtained from environmental sample
  DOMAIN (7)...(111): Nucleotidyltransferase domain
  misc_feature (1)..(114): Xaa is any amino acid
MCDKAVLDEITSRVCAAAKEVLGDKLEKVILFGSYARGDYDEESDVDIMVIADIALEEVHETRDKIRDVTGSFLWDYGILVCLIMTCSDIFHKCKDVTGFYINVQKDGVLLYAA

SEQ ID NO: 49715 - DNA, 411 bp, Unknown
  Obtained from environmental sample
  misc_feature (1)..(411): n is a, c, g, or t
atgccgcctgattctaactctgttccggttgattccgcccgttatctaattgataaagcgaggttatgtttgcaagatgccaaaacgccgggcatttcatttgagaccgccgctaaccgttcgtactactgtatatttaatgctatgcgcgcggttttggcgcttgaccgattcgactcaaaaaagcattccggcataatatcggcatttcagaaagactatataagaacgggtatctttcccaaagaattttcagacatcgttgagaaagccttcgaaatccgccttgaaagcgattacgtagtcttctacctcgtatcaaaagccgccgtcgccgcccagattgaaaatgccggaatgttcttggaagcgatggagaagtacgtcggcgagaggatccaaagcatgtga

SEQ ID NO: 49716 - protein, 136 aa, Unknown
  Obtained from environmental sample
  DOMAIN (10)...(133): Protein of unknown function DUF103
  misc_feature (1)..(136): Xaa is any amino acid
MPPDSNSVPVDSARYLIDKARLCLQDAKTPGISFETAANRSYYCIFNAMRAVLALDRFDSKKHSGIISAFQKDYIRTGIFPKEFSDIVEKAFEIRLESDYVVFYLVSKAAVAAQIENAGMFLEAMEKYVGERIQSM

SEQ ID NO: 49717 - DNA, 315 bp, Unknown
  Obtained from environmental sample
  misc_feature (1)..(315): n is a, c, g, or t
atggataaaacagaagatataatcttactcgcgaaaaaatatttggaattggtgaaagccgccaatttcccgatgcaaatagaaacggcgtatcttttcggctcgttcgcaaaaggacaacctcacgaggatagcgacattgatattgcttttgtggtgcacaaatggaccggcggatatgaagataccgttgttccgatgtggncgctacgtgatgaagtagatataagaatcgaaccgcatatcgttgacccagattatgaccccgcctactttctngcggagataatacggaacgggattgagttggcgtaa

SEQ ID NO: 49718 - protein, 104 aa, Unknown
  Obtained from environmental sample
  DOMAIN (7)...(99): Nucleotidyltransferase domain
  misc_feature (1)..(104): Xaa is any amino acid
MDKTEDIILLAKKYLELVKAANFPMQIETAYLFGSFAKGQPHEDSDIDIAFVVHKWTGGYEDTVVPMWXLRDEVDIRIEPHIVDPDYDPAYFLAEIIRNGIELA

SEQ ID NO: 49719 - DNA, 393 bp, Unknown
  Obtained from environmental sample
  misc_feature (1)..(393): n is a, c, g, or t
atgacacctgaagaaatactgcaatattggattaatttatccgataacggcctcgtcgtggccgaaacgctgattaaaaacaaacataacctctatgccggttttatgtgccatcaagcggttgaaaagatgtttaaggggtattacgtcaatattaataaagatacccctccgcttagacatgatttgaaatatttggcccaaaaaaccggactttacgacttattggatgatgttcaaaaatccgttatagacgaactgaacccgctcaacatagaggcccgttatccagattatcaaaatactatggcgaagcgtttaacggatgaaaaaataaaaaatatctttgaccaaacaaaggagttcgtgcaatggataaaacagaagatataa

SEQ ID NO: 49720 - protein, 130 aa, Unknown
  Obtained from environmental sample
  DOMAIN (7)...(122): HEPN domain
  misc_feature (1)..(130): Xaa is any amino acid
MTPEEILQYWINLSDNGLVVAETLIKNKHNLYAGFMCHQAVEKMFKGYYVNINKDTPPLRHDLKYLAQKTGLYDLLDDVQKSVIDELNPLNIEARYPDYQNTMAKRLTDEKIKNIFDQTKEFVQWIKQKI

SEQ ID NO: 49721 - DNA, 600 bp, Unknown
  Obtained from environmental sample
  misc_feature (1)..(600): n is a, c, g, or t
atgaaaaataataaaaaattggttttggcgttaagcgctattttaataatcgcagccatattcatcgtatccgaaaagatgtcttccatacgccccccggagcaccgcgctcggttcttccctacccttgaggagcggcacatcaacgccataaccgtgaatgacgacggcagcgtgattaagctcaataaacggggcgagggcgattggacggtggacggcggcgattccggcggtttatctccggccgacagcggacttgtccaaatagccttagagaagatagtaacgcttaaaaagggcgaggcggtctccgtcaatcctgacaaacaggccgctttcgacgtcagcgacaccggcaagtcgttcgtgtcggtctacgccggcaagtctgacgccgtcggcgtgttgcttgtcggcaagaacgggcctgattggaacagcaattacgtgcgtttgacggggagcgacacggtctaccttattcccggcggcttgcggcaatcgcttttcttcggtatcgacaggtggaaaaaaaaggaggcggttatgccggacagcggcggcgacaacgtgtccgcagacgcggctgtaaagtaa

SEQ ID NO: 49722 - protein, 199 aa, Unknown
  Obtained from environmental sample
  SIGNAL (1)...(25)
  misc_feature (1)..(199): Xaa is any amino acid
MKNNKKLVLALSAILIIAAIFIVSEKMSSIRPPEHRARFFPTLEERHINAITVNDDGSVIKLNKRGEGDWTVDGGDSGGLSPADSGLVQIALEKIVTLKKGEAVSVNPDKQAAFDVSDTGKSFVSVYAGKSDAVGVLLVGKNGPDWNSNYVRLTGSDTVYLIPGGLRQSLFFGIDRWKKKEAVMPDSGGDNVSADAAVK

SEQ ID NO: 49723 - DNA, 1065 bp, Unknown
  Obtained from environmental sample
  misc_feature (1)..(1065): n is a, c, g, or t
atgctgaaaaaaatatccgatctttacgataggctctttcaggccccggataatctgttcaatagcgagaccttttacggcgaactgaactacgagtgcagtaagctgtctttcatgtttttcctctcctctatcgcatggctgacctacataccgctcgacattaagctgcatagcaactatctcgcaatgaccttggggctgcgattcggcctcacgttgttgagtgtgtcgagcatcgcgctgacgtttactaaattcttcagggcgcgcccgatcattttgctcatggcgctcgtcgcgtatctcaacttcggaacggccatcgttaccgccaccgccgacgcgagcgtcgtctcgccgtatatgggcggttttttattcgtgctgatgatacccgtgttcgccccgttcccgcttataagcaagtttatcatcacgttcatcccggtggtgcttctcttcgtattggggagcgttagaggcataccttttttcaagccccctatctcctacgccacaaacgacacgctctgcactttcatcatgacgatgatcctctcttacgcgcagaacacgctgcgtttcaacgcgtggcggcagcaggtaacgctgaagtttttggtgcagcaggatcaagagcgcataacgaccatatcggatctggcgaacaaggctgaggcggcgtctaagtctaagagcgattttttggcaaggatgagccacgaaatccgcacgccgatgaatgccgtcataggcatctcggaactcgcgatgcgcgaaaaggaggtgccgcagagcacatacaacctcttggtaaccatcagacaagccgggcaaaacctgctgtccatcataaatgacattctcgacttttcgaagatcgagagcggtatgatgaagatcataccggcaaactatcacttcccgtcgctcataaaggatgtcgtcaacatcataggcataaaggcgtccaactctatgcttgattttcaggtgagcgtggacaggaacattccggacaccctcttcgggacgaagtcaggattcgccaaatatttctga

SEQ ID NO: 49724 - protein, 354 aa, Unknown
  Obtained from environmental sample
  DOMAIN (232)...(298): His Kinase A (phosphoacceptor) domain
  misc_feature (1)..(354): Xaa is any amino acid
MLKKISDLYDRLFQAPDNLFNSETFYGELNYECSKLSFMFFLSSIAWLTYIPLDIKLHSNYLAMTLGLRFGLTLLSVSSIALTFTKFFRARPIILLMALVAYLNFGTAIVTATADASVVSPYMGGFLFVLMIPVFAPFPLISKFIITFIPVVLLFVLGSVRGIPFFKPPISYATNDTLCTFIMTMILSYAQNTLRFNAWRQQVTLKFLVQQDQERITTISDLANKAEAASKSKSDFLARMSHEIRTPMNAVIGISELAMREKEVPQSTYNLLVTIRQAGQNLLSIINDILDFSKIESGMMKIIPANYHFPSLIKDVVNIIGIKASNSMLDFQVSVDRNIPDTLFGTKSGFAKYF

SEQ ID NO: 49725 - DNA, 1260 bp, Unknown
  Obtained from environmental sample
  misc_feature (1)..(1260): n is a, c, g, or t
atgtttgcgttaggtggaaccatgaccaacgccctgatgagcaaaatcgccatttcctcctgcaatcacgggattgccgaagagtttatcaaacgcctggatgcctatcaaaaatcaaacttccttgcctcgcgtcacgaggttccggttgatcctgaactgtgcaagtggatgctggacaggatggttattgatgaagcaggaactgaagttagatttgggacgacgatctgcgatgtagtttccaataaccgcaggattgaatacgtgatcattgacagcatcaacggttttgaggctgttaaagcggattactttgccgactgtaccggtgacggccagttgagttttaaggccgggtcttcttattcgattggcaacgacgagggttacggctcgtctccctcgctcctattccgcgttgccaatgttgacatcgaaaaactgatctccgatatggaagcccaccctgatgcttatgttccggaacgcaacacctattccaaccataaattacgccccagccaaaacagggaaaatatcgccaatggtagatacgcccactttgccgactttgttccgtttatcaggcagaaggtaaaagagaacactgggtttttgacggaatgggaacttgagaagatcctccagcgtggactcattttcatgaaccagcctcagggaactcacgtgctggtaaactcaacacggattccattttttaagggcaatgataacaaagagcttgccgacgcaatggtatcgggaagaaaacaaatagaagcgacgttccgttttatgaaagcgtttattccggggttgaaaaaagcctttataatggataccgcaagcatgctgggtatccgcgagtcaaggcggattacaggcgactatgtttttaccgaggaggatgtgaacaactgccgcaaattcgacgacgctatagcaagcaattttggcggcgtggaaattcacgcggccaacgggcagggcacaaagattaacgagctgggaaagaacgattattatcacatcccctaccggagtattatcgcaaaggattttgacaacctgtatgtggccggacgctgtttcagcgccaaccacgccgccatctcggcggcccggaacatcgcttattgtatggcgctgggacaggctgtgggaagcgccgccgcgcagcttgcacacaacgggaaaaagaacatcagggaaatcgagataaaatctttacagaaagaacttgcttcgattatgtag

SEQ ID NO: 49726 - protein, 419 aa, Unknown
  Obtained from environmental sample
  misc_feature (1)..(419): Xaa is any amino acid
MFALGGTMTNALMSKIAISSCNHGIAEEFIKRLDAYQKSNFLASRHEVPVDPELCKWMLDRMVIDEAGTEVRFGTTICDVVSNNRRIEYVIIDSINGFEAVKADYFADCTGDGQLSFKAGSSYSIGNDEGYGSSPSLLFRVANVDIEKLISDMEAHPDAYVPERNTYSNHKLRPSQNRENIANGRYAHFADFVPFIRQKVKENTGFLTEWELEKILQRGLIFMNQPQGTHVLVNSTRIPFFKGNDNKELADAMVSGRKQIEATFRFMKAFIPGLKKAFIMDTASMLGIRESRRITGDYVFTEEDVNNCRKFDDAIASNFGGVEIHAANGQGTKINELGKNDYYHIPYRSIIAKDFDNLYVAGRCFSANHAAISAARNIAYCMALGQAVGSAAAQLAHNGKKNIREIEIKSLQKELASIM

SEQ ID NO: 49727 - DNA, 369 bp, Unknown
  Obtained from environmental sample
  misc_feature (1)..(369): n is a, c, g, or t
atgattcaaatggggtccatgctcacagtcgccgacaacagcggcgccaaaaaaatatgctgcatcttgccattgggcgggggagtggggaggatcgcccagataggcgacgtgataaccgcctccgtcaaagaggccatccctggcggcacagtcaagaaaaaggcagttgtgcaggcggtcatagtcaggcagagaaaggcgtttcgcagaaaagacggatcgtatatccgctttgacgaaaacgccgccgtcatcatcaagaaagacggcgagcccgtgggtacccgcgtgtttggccccgtcgcccgcgagctgcgcgaaaggaagtacatgaagatcatctccttggccccggaggtgctgtaa

SEQ ID NO: 49728 - protein, 122 aa, Unknown
  Obtained from environmental sample
  DOMAIN (1)...(122): Ribosomal protein L14p/L23e
  misc_feature (1)..(122): Xaa is any amino acid
MIQMGSMLTVADNSGAKKICCILPLGGGVGRIAQIGDVITASVKEAIPGGTVKKKAVVQAVIVRQRKAFRRKDGSYIRFDENAAVIIKKDGEPVGTRVFGPVARELRERKYMKIISLAPEVL

SEQ ID NO: 49729 - DNA, 339 bp, Unknown
  Obtained from environmental sample
  misc_feature (1)..(339): n is a, c, g, or t
atgatcttcatgtacttcctttcgcgcagctcgcgggcgacggggccaaacacgcgggtacccacgggctcgccgtctttcttgatgatgacggcggcgttttcgtcaaagcggatatacgatccgtcttttctgcgaaacgcctttctctgcctgactatgaccgcctgcacaactgcctttttcttgactgtgccgccagggatggcctctttgacggaggcggttatcacgtcgcctatctgggcgatcctccccactcccccgcccaatggcaagatgcagcatatttttttggcgccgctgttgtcggcgactgtgagcatggaccccatttga

SEQ ID NO: 49730 - protein, 112 aa, Unknown
  Obtained from environmental sample
  misc_feature (1)..(112): Xaa is any amino acid
MIFMYFLSRSSRATGPNTRVPTGSPSFLMMTAAFSSKRIYDPSFLRNAFLCLTMTACTTAFFLTVPPGMASLTEAVITSPIWAILPTPPPNGKMQHIFLAPLLSATVSMDPI

SEQ ID NO: 49731 - DNA, 459 bp, Unknown
  Obtained from environmental sample
  misc_feature (1)..(459): n is a, c, g, or t
atggatacggattttcccggacaagccgactaccagcaagcccgccgagacccgtatgggttcaggcaaaggtgcccccgatggctgggttgccgtagtgcgccccggcaagatgctcttcgaaatggagggcgtagaagaggccatcgcccgcgaagccctccgccttgcccagatgaaactaagcgttgcgtccatgtttgtttcgcggacgccgccggaggaatagccatggcaaaaaaatcaccatttagcgaccttctcgctaaaagtcctgaagagctgcacaaaatcgaagtagaattggccgccaaaaaatttacgcttcgcatccagcacgccgtaggccaagtggaagacaccgccgaaataagaaagacaaggcgggagatggcccgagtcaagaccgccatcaccaagaaggcagcgtccgccgcagctgacaaggcatcaaagtga

SEQ ID NO: 49732 - protein, 152 aa, Unknown
  Obtained from environmental sample
  DOMAIN (84)...(141): Ribosomal L29 protein
  misc_feature (1)..(152): Xaa is any amino acid
MDTDFPGQADYQQARRDPYGFRQRCPRWLGCRSAPRQDALRNGGRRRGHRPRSPPPCPDETKRCVHVCFADAAGGIAMAKKSPFSDLLAKSPEELHKIEVELAAKKFTLRIQHAVGQVEDTAEIRKTRREMARVKTAITKKAASAAADKASK

SEQ ID NO: 49733 - DNA, 420 bp, Unknown
  Obtained from environmental sample
  misc_feature (1)..(420): n is a, c, g, or t
atgttaagcccgaaacgagttaaacgcaggaaggtacagaggggcaggatgcccggaaacgccaccagatgcaacaccgtggtgttcggcgagtacgcccttgtagcgatggaacggatgtggattaccaaccgccagatagaggcggcgcgtatcgcgcttaaccgccacataaagcgcggcggccgaatatggatacggattttcccggacaagccgactaccagcaagcccgccgagacccgtatgggttcaggcaaaggtgcccccgatggctgggttgccgtagtgcgccccggcaagatgctcttcgaaatggagggcgtagaagaggccatcgcccgcgaagccctccgccttgcccagatgaaactaagcgttgcgtccatgtttgtttcgcggacgccgccggaggaatag

SEQ ID NO: 49734 - protein, 139 aa, Unknown
  Obtained from environmental sample
  DOMAIN (2)...(138): Ribosomal L10
  misc_feature (1)..(139): Xaa is any amino acid
MLSPKRVKRRKVQRGRMPGNATRCNTVVFGEYALVAMERMWITNRQIEAARIALNRHIKRGGRIWIRIFPDKPTTSKPAETRMGSGKGAPDGWVAVVRPGKMLFEMEGVEEAIAREALRLAQMKLSVASMFVSRTPPEE

SEQ ID NO: 49735 - DNA, 1059 bp, Unknown
  Obtained from environmental sample
  misc_feature (1)..(1059): n is a, c, g, or t
atggacgcaacgcttagtttcatctgggcaaggcggagggcttcgcgggcgatggcctcttctacgccctccatttcgaagagcatcttgccggggcgcactacggcaacccagccatcgggggcacctttgcctgaacccatacgggtctcggcgggcttgctggtagtcggcttgtccgggaaaatccgtatccatattcggccgccgcgctttatgtggcggttaagcgcgatacgcgccgcctctatctggcggttggtaatccacatccgttccatcgctacaagggcgtactcgccgaacaccacggtgttgcatctggtggcgtttccgggcatcctgcccctctgtaccttcctgcgtttaactcgtttcgggcttaacataatttatcccctgccgcccggagcgcgatcccgccgtttgcggacgagcgcccccgcgtcttctttttgttcttttccgaatttcatgccgttgtacacccataccttcacgccgatggcgccgaaggtggtctgcgcttcggcaaaaccgtattcaatatcggcacgcaaagtatgtaacggaatgcggccttccttcgcttcctcggtgcgggacatttccgcgccgcccagcctgcctgagagccttacctttacgccctgcgcgttgcctttcttcatcgcgttggaaatggcctgcttcatggtccgcctgaaagaggagcgcgccaaaagctgccgggcgatattctgcgcgatgatctgggcgttgccctccgcgctgcgtatttccttgatctttatctttatttctttggtcgtgttcttctgcaattccgcgttgatcttctctatgttcgcgcccttcaccccgatcataacgccgggcctcgccgtatggattgtaatcgttatgcgctgcgggtgccgggtaatgtcgatctcggcgatatccgcgccctttgtttcgggcatattcagtatctgcttgcggaatttgagatcctcgtgcagggtgtccgcgtattccttgggatccacgtaccagcgggaaccccatgtcctgtga

SEQ ID NO: 49736 - protein, 352 aa, Unknown
  Obtained from environmental sample
  misc_feature (1)..(352): Xaa is any amino acid
MDATLSFIWARRRASRAMASSTPSISKSILPGRTTATQPSGAPLPEPIRVSAGLLVVGLSGKIRIHIRPPRFMWRLSAIRAASIWRLVIHIRSIATRAYSPNTTVLHLVAFPGILPLCTFLRLTRFGLNIIYPLPPGARSRRLRTSAPASSFCSFPNFMPLYTHTFTPMAPKVVCASAKPYSISARKVCNGMRPSFASSVRDISAPPSLPESLTFTPCALPFFIALEMACFMVRLKEERAKSCRAIFCAMIWALPSALRISLIFIFISLVVFFCNSALIFSMFAPFTPIITPGLAVWIVIVMRCGCRVMSISAISAPFVSGIFSICLRNLRSSCRVSAYSLGSTYQREPHVL

SEQ ID NO: 49737 - DNA, 699 bp, Unknown
  Obtained from environmental sample
  misc_feature (1)..(699): n is a, c, g, or t
ttgatgacagtatcgatgggctcaggtcggcatcacaggacatggggttcccgctggtacgtggatcccaaggaatacgcggacaccctgcacgaggatctcaaattccgcaagcagatactgaatatgcccgaaacaaagggcgcggatatcgccgagatcgacattacccggcacccgcagcgcataacgattacaatccatacggcgaggcccggcgttatgatcggggtgaagggcgcgaacatagagaagatcaacgcggaattgcagaagaacacgaccaaagaaataaagataaagatcaaggaaatacgcagcgcggagggcaacgcccagatcatcgcgcagaatatcgcccggcagcttttggcgcgctcctctttcaggcggaccatgaagcaggccatttccaacgcgatgaagaaaggcaacgcgcagggcgtaaaggtaaggctctcaggcaggctgggcggcgcggaaatgtcccgcaccgaggaagcgaaggaaggccgcattccgttacatactttgcgtgccgatattgaatacggttttgccgaagcgcagaccaccttcggcgccatcggcgtgaaggtatgggtgtacaacggcatgaaattcggaaaagaacaaaaagaagacgcgggggcgctcgtccgcaaacggcgggatcgcgctccgggcggcaggggataa

SEQ ID NO: 49738 - protein, 232 aa, Unknown
  Obtained from environmental sample
  DOMAIN (13)...(61): Ribosomal protein S3, N-terminal domain
  misc_feature (1)..(232): Xaa is any amino acid
MMTVSMGSGRHHRTWGSRWYVDPKEYADTLHEDLKFRKQILNMPETKGADIAEIDITRHPQRITITIHTARPGVMIGVKGANIEKINAELQKNTTKEIKIKIKEIRSAEGNAQIIAQNIARQLLARSSFRRTMKQAISNAMKKGNAQGVKVRLSGRLGGAEMSRTEEAKEGRIPLHTLRADIEYGFAEAQTTFGAIGVKVWVYNGMKFGKEQKEDAGALVRKRRDRAPGGRG

SEQ ID NO: 49739 - DNA, 807 bp, Unknown
  Obtained from environmental sample
  misc_feature (1)..(807): n is a, c, g, or t
ttgggaataacaagccttgaattgttgcctgttcaggaatttaacgaaaacgaaattatccgcaatcatccgcgcaccggaaaaagattgaccaattactggggatattccacagcggcgttttttgcgcctaagggttcttactcgtcggataaaagtccgggcggacaagttagtgaatttaaagagatggtgcgcgaattgcacaaagccggaatagaagtaattcttgacattgtttttaaccacaccgccgagggcaacgaacagggaccgactatttctttccgcggacttgataattcaatctattacatacttaacgaaaacaggcgttattatcaaaattattcaggctgcggcaatacggtaaattgtaatcatcctgtggtgcgaacatttataatggagtgtcttcgttattgggtaatggaaatgcacgtagacggtttccgttttgatttaggatcgattctgggacgcgaccaaacagggaagatcatggaaaatccgcctacgcttgaacaaatagcggaagaccctgttttaaactcgacaaaaattatcgccgaagcgtgggacgcgggcggcgcttatcaggtaggatggttccccggcggacgctgggcggaatggaacgataaattccgcgacaatgtgcgcaaatactggaaaggcgatcagaaagaaacccgttatttggcgacacgcattgccggcagttccgatctttatttgcgcgacggacgcaaaccatttcattcaatcaattttattacaagccacgacgggttttacgctgaatga

SEQ ID NO: 49740 - protein, 268 aa, Unknown
  Obtained from environmental sample
  DOMAIN (1)...(266): Alpha amylase, catalytic domain
  misc_feature (1)..(268): Xaa is any amino acid
MGITSLELLPVQEFNENEIIRNHPRTGKRLTNYWGYSTAAFFAPKGSYSSDKSPGGQVSEFKEMVRELHKAGIEVILDIVFNHTAEGNEQGPTISFRGLDNSIYYILNENRRYYQNYSGCGNTVNCNHPVVRTFIMECLRYWVMEMHVDGFRFDLGSILGRDQTGKIMENPPTLEQIAEDPVLNSTKIIAEAWDAGGAYQVGWFPGGRWAEWNDKFRDNVRKYWKGDQKETRYLATRIAGSSDLYLRDGRKPFHSINFITSHDGFYAE

SEQ ID NO: 49741 - DNA, 885 bp, Unknown
  Obtained from environmental sample
  misc_feature (1)..(885): n is a, c, g, or t
atgtgcgcaaatactggaaaggcgatcagaaagaaacccgttatttggcgacacgcattgccggcagttccgatctttatttgcgcgacggacgcaaaccatttcattcaatcaattttattacaagccacgacgggttttacgctgaatgatttagtatcgtataaccaaaagcacaacgaagaaaacggagaagataaccgcgacggcagtgatttaaatttaagttataattacggcgtagaagggcagaccggcgatcctattataaaaacgattcgagaacggcaactaaggaattttttcgctaccctgatggtttcgctcggcactcctatgattcttggcggcgatgaattcgggcgtactcaaaacggcaacaataacgcttattgtcaggacaatgaaacgtcatggtacgactggtctctgcttgaaaaaaatgccggtctgtaccgttttgtcaaagaaatgatagctttccgtcttagacatcacggctttatgcgccccgaatttttcacgggcaagggcggcgcgtataaaggcattcccgatataagctggttcaatgaaaaaggcgctcccattgattgggaaaaaatagattattgtttagctttacgtttacttggcacaaaagcggatacgttagctgatagggacgataatgatttttacataatgtttaacgcaaattcagaccctcatacttttacagtcgccgatccgccgccgaagaaaaaatggtatcgcgctgtggatacagggcagtcgtctcccagcgacattcttcttccgggaactgaagaaatccttatttatcaaaactcttattccattaaagcccgaagtacggtaatattaatttccaaggaagggtaa

SEQ ID NO: 49742 - protein, 294 aa, Unknown
  Obtained from environmental sample
  misc_feature (1)..(294): Xaa is any amino acid
MCANTGKAIRKKPVIWRHALPAVPIFICATDANHFIQSILLQATTGFTLNDLVSYNQKHNEENGEDNRDGSDLNLSYNYGVEGQTGDPIIKTIRERQLRNFFATLMVSLGTPMILGGDEFGRTQNGNNNAYCQDNETSWYDWSLLEKNAGLYRFVKEMIAFRLRHHGFMRPEFFTGKGGAYKGIPDISWFNEKGAPIDWEKIDYCLALRLLGTKADTLADRDDNDFYIMFNANSDPHTFTVADPPPKKKWYRAVDTGQSSPSDILLPGTEEILIYQNSYSIKARSTVILISKEG

SEQ ID NO: 49743 - DNA, 1092 bp, Unknown
  Obtained from environmental sample
  misc_feature (1)..(1092): n is a, c, g, or t
ttggcgctttcggtattgtttgcgctgattggctgcgaagatccggttaagggcggaacgccccgcttgagcggaaccgtaaccatagacggagcccccggcgtgggtacgactctgacagcgaatattagtaagctgcacggatccggaggcgtttcctgccagtggaaatactatgatcccgataataaaacctacacgcccattaacggcgcgaacaccagctcttacaaggtgaagcccgaagacataggcaagtttattaccgtaaccgttacccgcgccggttattccggcagcgttaccagtgccgaaaaaggccccataagtgacaaaccctccttggaagaagccgtaaccgtcaatgtaatcggaaatgccgaagtagaggggatactggtggtgaatgttgttgccgatggagatgaagaaattgaagacaaatatgaataccagtggcaacgcgctaacagcgaaaatggcgaaggaacggacattcccggcgaaatcggcaacgaatacacgctgactgccgaagacgcaggcaagtatatctttgtagtcgtaacgcaccccgattattccggcagcgctaccggcaacacaataggccccgttctcttccccgcattaaccggaaccgtaaccataagcggagacgccatagtggggcagacgctgacagcggttactgctgacttgaacgtgcctgaagaggcaaccttgtcctatcagtggaaaatggctgacagtgaaacggccgccggaacggacatcggcacaagtagcgaaactttcgagctgactgcgttagaagcaaacaagtggatcaccgtaaccgtaaaaagttcccaaaatcccggcgaggttaccagcgccgccaaaagtccccgttaccttccccgcattaaccggagccccaaccataaccggaaccgccacagtggggctgacgctgacagcggttactaccggcgtgagcggcaagccaacagcggccaacttcacctaccagtggcaacgctccggcaccgccaacggcacttatgcggacattgccggcgcaacgagcagcacttacactctggttga

SEQ ID NO: 49744 - protein, 363 aa, Unknown
  Obtained from environmental sample
  misc_feature (1)..(363): Xaa is any amino acid
MALSVLFALIGCEDPVKGGTPRLSGTVTIDGAPGVGTTLTANISKLHGSGGVSCQWKYYDPDNKTYTPINGANTSSYKVKPEDIGKFITVTVTRAGYSGSVTSAEKGPISDKPSLEEAVTVNVIGNAEVEGILVVNVVADGDEEIEDKYEYQWQRANSENGEGTDIPGEIGNEYTLTAEDAGKYIFVVVTHPDYSGSATGNTIGPVLFPALTGTVTISGDAIVGQTLTAVTADLNVPEEATLSYQWKMADSETAAGTDIGTSSETFELTALEANKWITVTVKSSQNPGEVTSAAKSPRYLPRINRSPNHNRNRHSGADADSGYYRRERQANSGQLHLPVATLRHRQRHLCGHCRRNEQHLHSG

SEQ ID NO: 49745 - DNA, 1035 bp, Unknown
  Obtained from environmental sample
  misc_feature (1)..(1035): n is a, c, g, or t
ttgcgagcggccgagagtgcaggcgacgagcgggacgtcattctcttttctgtgggctatgggccggatgaacaagggcgcgtggccctcaatttcgggccgctcaaccgcgatggcggctggcgcaggctaaacgtggccgtcacccgtgcaaggcacgagatgatgattttttccacgctaaaatctgagcagatagacctcaacaagaccaggtcggatggactcgccggattaaagacattcctcgaatttgccgacaaaggcatccgcgccctacccgatccagacaggaaaaaggctttctcacaaggcgcggttgaagtcatggcaaaagaaatccgcaagctgggatacgctgctaacataaacgtcggatgttcgggctaccgtgtggacattggagtcatccatcctgaaaagcccgatgcgtatgtacttggcattttgtgcgacagcatgaattactataatggcggtacggctattgatcgcaatagcacacaggaatccgttttgcgcggattgggctggcgcatctgccggacgtggatcttggattggtgggacaaccctgaaaaagaattgggccgcatacatgccgaaattgaaaacgcgataacaggcagagttgaggcagaaaatgaacaaaaggcccaagccgacccaaccatgccttcggcgcaagaaaaccattccgccagccgaacggcgtttgtaacattcgaaaaattggaagacgatgcagcggccaaagcactcaagccatacagcatcgctcagttggccgttgtacaggggcatcagggagattccgattacttcgccgacnatgagagtacctacatcatcaaaaaacaaatatcatctgtgttggaagccgaggcccccatcagccgggaactgttgtgcaaaagggtactgaaagcctggggcatctcgcgcgtgaatactaagataggcaagcgatttgacatgcttgtctccacgatgtggctaaaaagtacgacatggggagatgccattttttattga

SEQ ID NO: 49746 - protein, 344 aa, Unknown
  Obtained from environmental sample
  misc_feature (1)..(344): Xaa is any amino acid
MRAAESAGDERDVILFSVGYGPDEQGRVALNFGPLNRDGGWRRLNVAVTRARHEMMIFSTLKSEQIDLNKTRSDGLAGLKTFLEFADKGIRALPDPDRKKAFSQGAVEVMAKEIRKLGYAANINVGCSGYRVDIGVIHPEKPDAYVLGILCDSMNYYNGGTAIDRNSTQESVLRGLGWRICRTWILDWWDNPEKELGRIHAEIENAITGRVEAENEQKAQADPTMPSAQENHSASRTAFVTFEKLEDDAAAKALKPYSIAQLAVVQGHQGDSDYFADXESTYIIKKQISSVLEAEAPISRELLCKRVLKAWGISRVNTKIGKRFDMLVSTMWLKSTTWGDAIFY

SEQ ID NO: 49747 - DNA, 651 bp, Unknown
  Obtained from environmental sample
  misc_feature (1)..(651): n is a, c, g, or t
atggttacccttcttctctgcttttttgcggtcctctttaacccggttacagatagtgaggatatcctcaacgccgtagctcaatatttttctaatattggttggggatattcattatccccaggggcgatggtgccctctggtaataccatcgcgtctttgccttcccagacccgcgggaatgttttgggcgaggtacttaaacgggccgtaagcctttttaaccctgaaaaccgttccaatatggtaaaagtgacccaggacgagcggggggtggtgatcagttttgcctcggatgtgttttttaacgaggccagcgcagccatcaatatggaagctgcccgaggtatattgcttaacctggtcgcgttacttagttccgaagaagtggcgggaaggaaattccgcattgaaggacattccgattcatcgcccattgatcccgcgggcccctgggtctccaattggcagctttcaacagaacgcgccttaagcgtcctttactatctaatcgacatgggggtatctgaaacccgtatgaatgtagcgggctttgggagtaccatgcccattagcagcgacagcactccccagggccgcgcaaacaaccgccgcgtggacatcgttatcattgatgacgcccatttgtga

SEQ ID NO: 49748 - protein, 216 aa, Unknown
  Obtained from environmental sample
  SIGNAL (1)...(19)
  DOMAIN (101)...(204): OmpA family
  misc_feature (1)..(216): Xaa is any amino acid
MVTLLLCFFAVLFNPVTDSEDILNAVAQYFSNIGWGYSLSPGAMVPSGNTIASLPSQTRGNVLGEVLKRAVSLFNPENRSNMVKVTQDERGVVISFASDVFFNEASAAINMEAARGILLNLVALLSSEEVAGRKFRIEGHSDSSPIDPAGPWVSNWQLSTERALSVLYYLIDMGVSETRMNVAGFGSTMPISSDSTPQGRANNRRVDIVIIDDAHL

SEQ ID NO: 49749 - DNA, 1164 bp, Unknown
  Obtained from environmental sample
  misc_feature (1)..(1164): n is a, c, g, or t
gtgcctattgccatagagattcccggagcggtgaacaagacgcggcaccggctgggcataccttttgatctgcctttaaagcttacttcctataaagagtcctcggacatgatcggggactttgctcaatggggctggaaaaacgtacggataaaactcacgggctggtttaaccgcagcgtcgatcattccgtgccggacaaaattaaattgataggcggtcttggccgtaaaaaagattttaaaaatctggtatctgttgcggaaaaaaacggctatgcgatttttcccgaagttgatttcatgtatatgagggatgtcaaaccctttggcggattcagcctgtaccgcgacgcggcccgctatgtaaatcgcaaacggatagaaaaatacccctacagctttgtctggttcggcgagcgcacccgctggggaaaactcagttaccttgcgcgcccggcctgcatgatgtccctgatagacaattttatgtgcaaagccgttgcgctgggcctgcgcagtattgcctttagaaacctgggcgcaaaacttgccggagactaccatgaaaagcggctggtcagcagagaggcctcgatgaaaatgcggcaggagaaactggctgagttaaagggcaatggggcgggcatcctgttgaataccggttacgcgtacgcggttccctgggccgattttattaccgacatggccattgacgatcaaagtttcggcatcaccgatgtctcggtgccgttttacccgatgacgcttcacggcctggttccatatacggggccggcgataaaccttgccgaggattacacgaagaacctgcttaaaaccgttgaaagcggcgccgggctgtacttcagctttatgcgtgaggaaacttccgtcctgcaggaaacgaagttccggcaattttacgccaacgagtacgataaatggtctccggacgccaacgccctgtaccagaaattttccgctgattttgccgggctgtatgatcaggcgatcgtcaatcatgtcattttggcggaagggctgacatggaccgaatacgaagacggaactgttgttatagtgaattacacggagatcgccgctgtttatgggggagttgatatcgacgctcgcagttacacggtagtgaggagggggtaa

SEQ ID NO: 49750 - protein, 387 aa, Unknown
  Obtained from environmental sample
  misc_feature (1)..(387): Xaa is any amino acid
MPIAIEIPGAVNKTRHRLGIPFDLPLKLTSYKESSDMIGDFAQWGWKNVRIKLTGWFNRSVDHSVPDKIKLIGGLGRKKDFKNLVSVAEKNGYAIFPEVDFMYMRDVKPFGGFSLYRDAARYVNRKRIEKYPYSFVWFGERTRWGKLSYLARPACMMSLIDNFMCKAVALGLRSIAFRNLGAKLAGDYHEKRLVSREASMKMRQEKLAELKGNGAGILLNTGYAYAVPWADFITDMAIDDQSFGITDVSVPFYPMTLHGLVPYTGPAINLAEDYTKNLLKTVESGAGLYFSFMREETSVLQETKFRQFYANEYDKWSPDANALYQKFSADFAGLYDQAIVNHVILAEGLTWTEYEDGTVVIVNYTEIAAVYGGVDIDARSYTVVRRG

SEQ ID NO: 49751 - DNA, 471 bp, Unknown
  Obtained from environmental sample
  misc_feature (1)..(471): n is a, c, g, or t
atgtattttattaaaaagaacaataaactctccctgacgctggaaggcaaaaacgcccttgccgggtatctgtttattctgcccttccttatcggccttttggcgtttatcttttttcccattctggagtccttacgcatggttttcagcaccgttaatattgaccttgttaaaaacggcttcacaatggagttttcaggcgccgacaatttaaaacgcgttctaatgatcgatccgcaattcaaacgcctgctggtcgaggaaatagggcgtatggttctgatagtccccgcggtaattattttcagcctgtttgttgcccttatcttaaatcaggaatttaaggcgcggggcgttgtgagggcgattttctttctgcccgttatcctttcttccggcgtcatgatagggctggaaaccaataatacccttttaagcggcatggcggaaataataaaagcggcaacctga

SEQ ID NO: 49752 - protein, 156 aa, Unknown
  Obtained from environmental sample
  misc_feature (1)..(156): Xaa is any amino acid
MYFIKKNNKLSLTLEGKNALAGYLFILPFLIGLLAFIFFPILESLRMVFSTVNIDLVKNGFTMEFSGADNLKRVLMIDPQFKRLLVEEIGRMVLIVPAVIIFSLFVALILNQEFKARGVVRAIFFLPVILSSGVMIGLETNNTLLSGMAEIIKAAT

SEQ ID NO: 49753 - DNA, 753 bp, Unknown
  Obtained from environmental sample
  misc_feature (1)..(753): n is a, c, g, or t
ttgacggcagttattaccatgttagtcgcaagaagcattgttaaaccgattctaggcgtaaccgatacgttaaaggacatatccgaaggcgagggcgacctgacgcggactatagccgtcagttccaaagatgaggtaggcgaccttgccatgtacttcaataaaacacttgaaaaaatcaaagacctggttcttctcattaaaaagcaggccggtgtgttatcagaaatcggcgctgacctgtctggcaacatgaccgaaacggcggcgacggtgaacgaaattacttccaatattcagagcatcaaaggccgagtcataaaccaaagcgccagcgttaccgaaaccaacgcgactatggaacaagttgtcgcaaacattaacaaactcaacggccatgttgaaaaccagggacgtaatatttcccaagtgtcatccgccattgaacaaatggtagccaacatcaattcggtcaccaaaacgcttgtaagcaacgcctctaatgtaagcatgttaaaagaagcctccgaagtaggacgggtagggttacagaaagtcgccgtagatattcaggaaatagcccgtgagtccgagggccttttggaaattaacgcggtaatgaaaaatattgccagccagacaaacttgctttcgatgaacgcggcgatagaagcggcgcacgccggagatgccggcaaaggcttcgccgtagtcgccgatgaaattcgcaaactggctgaaagttccggctga

SEQ ID NO: 49754 - protein, 250 aa, Unknown
  Obtained from environmental sample
  DOMAIN (1)...(62): HAMP domain
  misc_feature (1)..(250): Xaa is any amino acid
MTAVITMLVARSIVKPILGVTDTLKDISEGEGDLTRTIAVSSKDEVGDLAMYFNKTLEKIKDLVLLIKKQAGVLSEIGADLSGNMTETAATVNEITSNIQSIKGRVINQSASVTETNATMEQVVANINKLNGHVENQGRNISQVSSAIEQMVANINSVTKTLVSNASNVSMLKEASEVGRVGLQKVAVDIQEIARESEGLLEINAVMKNIASQTNLLSMNAAIEAAHAGDAGKGFAVVADEIRKLAESSG

SEQ ID NO: 49755 - DNA, 519 bp, Unknown
  Obtained from environmental sample
  misc_feature (1)..(519): n is a, c, g, or t
gtggccatctcattcatgccgttggttatttcctgggtcattttttcaaggttacggctttcattcattacttccctgctgccctcaagcatctcatgggaaccgctctttacctgcatggtaagttcgcttaaactgctggcgctttgcagaacctgtttgcttccctgtccctgttcttccatcgcgttgcgcatgttttcttcctgcaacgacaccgtctttacgcttgagtcaatcgccttgaatttggttaataccctttcggtagatttagttatattgtcgatagattcttttatcttcttcaaaacagcgccaatagtcttggactgtcagccggaactttcagccagtttgcgaatttcatcggcgactacggcgaagcctttgccggcatctccggcgtgcgccgcttctatcgccgcgttcatcgaaagcaagtttgtctggctggcaatatttttcattaccgcgttaatttccaaaaggccctcggactcacgggctatttcctga

SEQ ID NO: 49756 - protein, 172 aa, Unknown
  Obtained from environmental sample
  misc_feature (1)..(172): Xaa is any amino acid
MAISFMPLVISWVIFSRLRLSFITSLLPSSISWEPLFTCMVSSLKLLALCRTCLLPCPCSSIALRMFSSCNDTVFTLESIALNLVNTLSVDLVILSIDSFIFFKTAPIVLDCQPELSASLRISSATTAKPLPASPACAASIAAFIESKFVWLAIFFITALISKRPSDSRAIS

SEQ ID NO: 49757 - DNA, 423 bp, Unknown
  Obtained from environmental sample
  misc_feature (1)..(423): n is a, c, g, or t
ttgaagaagataaaagaatctatcgacaatataactaaatctaccgaaagggtattaaccaaattcaaggcgattgactcaagcgtaaagacggtgtcgttgcaggaagaaaacatgcgcaacgcgatggaagaacagggacagggaagcaaacaggttctgcaaagcgccagcagtttaagcgaacttaccatgcaggtaaagagcggttcccatgagatgcttgagggcagcagggaagtaatgaatgaaagccgtaaccttgaaaaaatgacccaggaaataaccaacggcatgaatgagatggccaccggggcggatcaggtgaatgtggcggtgcacaacgtcagcgagataagcgccaaaaaccgcgaaagcattgataacctgctgaaagaagtttcgcgtttcaaagtggagtaa

SEQ ID NO: 49758 - protein, 140 aa, Unknown
  Obtained from environmental sample
  misc_feature (1)..(140): Xaa is any amino acid
MKKIKESIDNITKSTERVLTKFKAIDSSVKTVSLQEENMRNAMEEQGQGSKQVLQSASSLSELTMQVKSGSHEMLEGSREVMNESRNLEKMTQEITNGMNEMATGADQVNVAVHNVSEISAKNRESIDNLLKEVSRFKVE

SEQ ID NO: 49759 - DNA, 810 bp, Unknown
  Obtained from environmental sample
  misc_feature (1)..(810): n is a, c, g, or t
atgtctcttgccgatgaactgcggactttacccaaaatcccggtgatggatcaatgggtagcggctgtggaaaaaggcaaacatataagaataaaggaaagcgattataacgaagagcaagcggctttcatgagcgtgtatggcattaaatcaatgctgctgatacccatttttacgcatagtaatttatggggcgcggtaacttttcaggatcataccaacgaccgttattttgacgacggctgcttcgatttattgcgtaccgcggcgcgcgtattctccaacgcgattatcagagcggaaactgaactcaccgccaaaaaagccattgaatcgcttaaacgccgcgaaaaaatggcggatacattgaacagggcggctgttatatttctctcgaacagtaaagaaaaatttgaggaaaccatgacgtcaggcgtaggggaaatcgccgacgtatttgatttagacagattttcaatttggcgtaactatgttaagcctgataatttgtacgtatcgcagatataccgctgggacaggaaatcaggcggtactacaataccgaccaaaggacttgaggatgtcacttataaacaatttgcgtcgcgttgggaggctcttttaaactcaggcgagacgattaacagccctgtaaaatttctgcccgaagcggatatgttgaaatcattcggctcaatttcggtgtttgtaacgccgttattttttaataactctttttggggttttgcccttcttgaagaccgtcacagcgaacgcttcttgaagaaganagcgtctcggccaatctga

SEQ ID NO: 49760 - protein, 269 aa, Unknown
  Obtained from environmental sample
  misc_feature (1)..(269): Xaa is any amino acid
MSLADELRTLPKIPVMDQWVAAVEKGKHIRIKESDYNEEQAAFMSVYGIKSMLLIPIFTHSNLWGAVTFQDHTNDRYFDDGCFDLLRTAARVFSNAIIRAETELTAKKAIESLKRREKMADTLNRAAVIFLSNSKEKFEETMTSGVGEIADVFDLDRFSIWRNYVKPDNLYVSQIYRWDRKSGGTTIPTKGLEDVTYKQFASRWEALLNSGETINSPVKFLPEADMLKSFGSISVFVTPLFFNNSFWGFALLEDRHSERFLKKXASRPI

SEQ ID NO: 49761 - DNA, 1164 bp, Unknown
  Obtained from environmental sample
  misc_feature (1)..(1164): n is a, c, g, or t
atgaaattcaatttgataaagcgtctgcacagcggccgacgccaaagcggcatccaattgctcatgcctttaatgattctgttcctgctggtgattgtcaatttaatcgttgattcgattcttatgaaaaacaatcccaatgctagcagttttttcagtataaaaatgataaaggatacttttggcaataatgttttcagcggaaatattatcagtatattaaacaacgcttcggagcttgttatcctggcgattggaatgacgcttgtaacagccgcttcgggcggacaggatatcagcgtgggcgccgcggcggccattgcgggcagtatttttcttaaggtggtcaggacaagcggcgacgtaacatggctgccgataatttttgcatttatagtgtgctgcgcggttgcgatgctgttcggcgcgtttaacggtaccctggtcgcgatttttaaaattcaaccgatgatcgcaacgctgatcctgtttaccgcaggacgctcaattgcgtacggaatcaacggcggcgcgtcccctaaactcttcgatgacataacaaaacaaatcggaacttttttctcgggcgttccaatcccgactccaatatttattgtattattgtatattatcggattttacttactgcttaaatttaccaatcttagactgtacgcggaatcggttggcatcaacgaaaaagcctcccgtttaaacggacttaaccctgtagcgattaagataatggtctatgtggttctgggagtatgcgtcgccgccgcgggactcatcaacacttgcaggatgcaaagactcgatcatcttggaattctcagcggcattgaaatggatgcgatactggcggtggcaataggcggcaacgcattaagcggcggaaagttcagtattacaggttccataatcggcgcttatacgattgaaacattgaacattactctactcaggatgagggtggatccggaaccaataaaagcttacaaggcggtatttattatattgctcatgttagccagttctcctgtagtgaaggaatttgtcagtaatctgtggaagcgccttcgaccccttcgaccccttcgacaagctcaggggccacaggggcctcagggagcgcagaaattcaaagtaaagggagaagcgtaa

SEQ ID NO: 49762 - protein, 387 aa, Unknown
  Obtained from environmental sample
  DOMAIN (69)...(346): Branched-chain amino acid transport system / permease component
  misc_feature (1)..(387): Xaa is any amino acid
MKFNLIKRLHSGRRQSGIQLLMPLMILFLLVIVNLIVDSILMKNNPNASSFFSIKMIKDTFGNNVFSGNIISILNNASELVILAIGMTLVTAASGGQDISVGAAAAIAGSIFLKVVRTSGDVTWLPIIFAFIVCCAVAMLFGAFNGTLVAIFKIQPMIATLILFTAGRSIAYGINGGASPKLFDDITKQIGTFFSGVPIPTPIFIVLLYIIGFYLLLKFTNLRLYAESVGINEKASRLNGLNPVAIKIMVYVVLGVCVAAAGLINTCRMQRLDHLGILSGIEMDAILAVAIGGNALSGGKFSITGSIIGAYTIETLNITLLRMRVDPEPIKAYKAVFIILLMLASSPVVKEFVSNLWKRLRPLRPLRQAQGPQGPQGAQKFKVKGEA

SEQ ID NO: 49763 - DNA, 357 bp, Unknown
  Obtained from environmental sample
  misc_feature (1)..(357): n is a, c, g, or t
atgctgggggataaaaccccttctgtaaatacgccgatcaaatccctttcggggggaaaccagcaaaaagtcatctttgcgcggtggcttttgacccacccggaatactttatattggacgaacctacgcgcggcatagatgtcggcacaaaggtggagatacaaaagcttgtattgaaactcgccgaagaaggtatgtgcattacttttatatcgtcagagatcgaagaaatggtacgcacttgttcgaggctcatcgtcatgcgggacaggaacattgtaggcgaactccagggcggcgaagttacacaggataacattatgcatacgattgcggggggaagcgggcgaaaatga

SEQ ID NO: 49764 - protein, 118 aa, Unknown
  Obtained from environmental sample
  DOMAIN (1)...(91): ABC transporter
  misc_feature (1)..(118): Xaa is any amino acid
MLGDKTPSVNTPIKSLSGGNQQKVIFARWLLTHPEYFILDEPTRGIDVGTKVEIQKLVLKLAEEGMCITFISSEIEEMVRTCSRLIVMRDRNIVGELQGGEVTQDNIMHTIAGGSGRK

SEQ ID NO: 49765 - DNA, 870 bp, Unknown
  Obtained from environmental sample
  misc_feature (1)..(870): n is a, c, g, or t
ttgcccaacctgaccgtggccgaaaatatgtttatcgggcggggacaatacaaattggtaaactgggacgccatggaaaaaaaatccaaaaagatacttgacagcctcggtattccggccaatccgacccgccagctttccgcctattccctggccgtgcagcaaatggttgccattgcccgcgccgtggatatggattgtaaagcccttattctggatgaaccgacatcctcgctggatgaccaggaggtcgcgaaactttttgcggtaatgcgagatttaaaaacacggggtgtcggtattatctttgttacgcattttcttgaccaggtatatgaggtgtgcgacaagatcacggttttgttcaacggcaaatatgtcggggaatataaaacagcggaattgccccccgtacagcttattgccaagatgatgggcaaggaacttgttgggctatccgagctgcacaagaaagaaataccctcagacgatgtcgcgcaagcgcctgtttacgaggcagtcgggctttccagcgcggcaggccttaagccatataactttaaaatccgcaagggcgaggtcaatggttttaccggcctgctcggttccggacgcagcgaaagcgtgcgcgctattttcggcgccgacagagttaccggcggcagggtgaaggtaaacggaaaaaaagccaggataaccaaacccatcgacgccatgaagaataaaatcggttatctgccggaagaccgcaagaacgacggcatcatagccgatttgtcggtgagggacaatatcattctcgcgctgcaggttatgaaaggctttttcaggcccttttccaaagctgaggcannaggcttttgccgatga

SEQ ID NO: 49766 - protein, 289 aa, Unknown
  Obtained from environmental sample
  DOMAIN (5)...(124): ABC transporter
  misc_feature (1)..(289): Xaa is any amino acid
MPNLTVAENMFIGRGQYKLVNWDAMEKKSKKILDSLGIPANPTRQLSAYSLAVQQMVAIARAVDMDCKALILDEPTSSLDDQEVAKLFAVMRDLKTRGVGIIFVTHFLDQVYEVCDKITVLFNGKYVGEYKTAELPPVQLIAKMMGKELVGLSELHKKEIPSDDVAQAPVYEAVGLSSAAGLKPYNFKIRKGEVNGFTGLLGSGRSESVRAIFGADRVTGGRVKVNGKKARITKPIDAMKNKIGYLPEDRKNDGIIADLSVRDNIILALQVMKGFFRPFSKAEAXGFCR

SEQ ID NO: 49767 - DNA, 756 bp, Unknown
  Obtained from environmental sample
  misc_feature (1)..(756): n is a, c, g, or t
gtgaatattccggcgaacaacgagaaacttatcgcgggtttttcagtggacgcgataaagtatatgctcggcggacgcttccgcgcttctttccgtccgttgaatgacgcaatcatagcgaacaggattcttggtatagcgggaattgtcggttgtaataatactaaacagaagaccgatgattataccaatacgcttaccctcgaactaattaaacgaaatatacttgtgcttcaaaccggctgttcggcaatcggaagcgcaaaggccgggttgttgaaaccggaagtcgcgttggagcaggcgggcgcaggtcttagggaagtttgcgaagccgtgggcataccgcctattctgcacatgggaagttgcgtagacaactcaaggattcttgaggcggcgacggaaattgtttttgagggcggtcttggcgatgatattgcgagtcttcccgccgtaggcgtagcgcctgagtggatgagcgaaaaggctgtagcaatcggttgctactttgtggcaagcggagttgacgtaatactgggaaatcctttttatgtttcaggatcgcaggctgtcagcgattacctacacaacaaggttagggatgaatacggagcaagttttcatttaattgaagacccgataaaggcggcggatcgtattgtagaactgatcaatcaggcgagagatgctcttggaattaacaaaaaggctgagcgcaaactcttcgatatgaaagacaggagggcgttgtaa

SEQ ID NO: 49768 - protein, 251 aa, Unknown
  Obtained from environmental sample
  DOMAIN (1)...(218): Prismane/CO dehydrogenase family
  misc_feature (1)..(251): Xaa is any amino acid
MNIPANNEKLIAGFSVDAIKYMLGGRFRASFRPLNDAIIANRILGIAGIVGCNNTKQKTDDYTNTLTLELIKRNILVLQTGCSAIGSAKAGLLKPEVALEQAGAGLREVCEAVGIPPILHMGSCVDNSRILEAATEIVFEGGLGDDIASLPAVGVAPEWMSEKAVAIGCYFVASGVDVILGNPFYVSGSQAVSDYLHNKVRDEYGASFHLIEDPIKAADRIVELINQARDALGINKKAERKLFDMKDRRAL

SEQ ID NO: 49769 - DNA, 624 bp, Unknown
  Obtained from environmental sample
  misc_feature (1)..(624): n is a, c, g, or t
atgatgaaaaaggaacgattcttttacactacggcggacgaccgcaggtcgcccctacgattgccgatttgcggatgtgctgacgttgtaggggcgaactgtgttcgtccgcttttgcgcaaattaaatcaatcatttacattgacggcggtcatttgcctgatcccgttgctatttgcgtcctgcaaagtctacactttcagcggctccacgctacccggccacatcaagacggtgatgattccggtgttcgtcaacaagacgctggaaccgggtatagacgacgacatcacgacggaactttccaaggaggttcttaagagccaactgcgccccgccaacagcgacgccgacgcgacaatcagcggcgtcgttacgcgatatgtcaacaggccgcatactttcggcgccgggggcgcggaggttagcgtggagcagtacatcgtgcaggtgtcggcggaggttgagttcttcgacnataggaaagaggagtctatatataaggggactgtgtcgggggaggggatttatctttttgagagtgaggatgaggcggttgggcgggataaggcggttaagaatcttgtggaaaaaattatgcagaattcggtgcaaatgtggtaa

SEQ ID NO: 49770 - protein, 207 aa, Unknown
  Obtained from environmental sample
  misc_feature (1)..(207): Xaa is any amino acid
MMKKERFFYTTADDRRSPLRLPICGCADVVGANCVRPLLRKLNQSFTLTAVICLIPLLFASCKVYTFSGSTLPGHIKTVMIPVFVNKTLEPGIDDDITTELSKEVLKSQLRPANSDADATISGVVTRYVNRPHTFGAGGAEVSVEQYIVQVSAEVEFFDXRKEESIYKGTVSGEGIYLFESEDEAVGRDKAVKNLVEKIMQNSVQMW

SEQ ID NO: 49771 - DNA, 762 bp, Unknown
  Obtained from environmental sample
  misc_feature (1)..(762): n is a, c, g, or t
atggccgtcctcttcccgggctactacagccacaggttcgaatcggacgagagcgcggcgagcgccgtcgcggctaagctcacttccatatccgttcggttgggcgagcgtctgcacatggccttcaactaccactgccgcttcgacgccgacggatgcggcgggtgcgactgcgaggagagggcggcccacgcgctgatcgagatgatcgagtcgctgccggagatcagggcgatgctggtggacgacatctccgccgcgctcgacggcgaccccgccgcgaagttcttcgacgaggtcgtcctcagctacccctgcgtggtagccatagccgcgcaccgcgtggcccaccgcctatactcaatgggcgtcccgataatcccgcgcatactgtccgaacgcgcccactcccaaacgggcatagacatccacccaggagcccgaataggcccgcgcttcttcatagaccacggaaccggcgtggtcataggcgagacatgcaggataggcggcaacgtgaagatataccagggcgtaaccctcggcgcgacatcgccgttcgacaaagacggccgcccgaagacggggcagaaacgtcacccggacatagaagacgacgtgataatctacgccaatgccacaatcctcggcggcgataccgtaataggaaagggcgcgataataggcgggaatacgtggataacgaagtccgtgccccctggggtacatgtttataatggatcanaagaggatttattttga

SEQ ID NO: 49772 - protein, 253 aa, Unknown
  Obtained from environmental sample
  misc_feature (1)..(253): Xaa is any amino acid
MAVLFPGYYSHRFESDESAASAVAAKLTSISVRLGERLHMAFNYHCRFDADGCGGCDCEERAAHALIEMIESLPEIRAMLVDDISAALDGDPAAKFFDEVVLSYPCVVAIAAHRVAHRLYSMGVPIIPRILSERAHSQTGIDIHPGARIGPRFFIDHGTGVVIGETCRIGGNVKIYQGVTLGATSPFDKDGRPKTGQKRHPDIEDDVIIYANATILGGDTVIGKGAIIGGNTWITKSVPPGVHVYNGSXEDLF

SEQ ID NO: 49773 - DNA, 582 bp, Unknown
  Obtained from environmental sample
  misc_feature (1)..(582): n is a, c, g, or t
atgcggcgggtgcgactgcgaggagagggcggcccacgcgctgatcgagatgatcgagtcgctgccggagatcagggcgatgctggtggacgacatctccgccgcgctcgacggcgaccccgccgcgaagttcttcgacgaggtcgtcctcagctacccctgcgtggtagccatagccgcgcaccgcgtggcccaccgcctatactcaatgggcgtcccgataatcccgcgcatactgtccgaacgcgcccactcccaaacgggcatagacatccacccaggagcccgaataggcccgcgcttcttcatagaccacggaaccggcgtggtcataggcgagacatgcaggataggcggcaacgtgaagatataccagggcgtaaccctcggcgcgacatcgccgttcgacaaagacggccgcccgaagacggggcagaaacgtcacccggacatagaagacgacgtgataatctacgccaatgccacaatcctcggcggcgataccgtaataggaaagggcgcgataataggcgggaatacgtggataacgaagtccgtgccccctggggtacatgtttataa

SEQ ID NO: 49774 - protein, 193 aa, Unknown
  Obtained from environmental sample
  misc_feature (1)..(193): Xaa is any amino acid
MRRVRLRGEGGPRADRDDRVAAGDQGDAGGRHLRRARRRPRREVLRRGRPQLPLRGSHSRAPRGPPPILNGRPDNPAHTVRTRPLPNGHRHPPRSPNRPALLHRPRNRRGHRRDMQDRRQREDIPGRNPRRDIAVRQRRPPEDGAETSPGHRRRRDNLRQCHNPRRRYRNRKGRDNRREYVDNEVRAPWGTCL

SEQ ID NO: 49775 - DNA, 537 bp, Unknown
  Obtained from environmental sample
  misc_feature (1)..(537): n is a, c, g, or t
ttggacttgaagttccacgacatcccgaacaccgttgaaaaggctgtttcggcggcctgcgggtacggtgtcgattacctgacgatacatacgcagggcggggtggagatgatgcgggccgccgccgcggcggccttggcggcggcgcatcgtcccaaaatattgggcgttaccctcctaaccagtatagatcaatcaatgctgaataatgacctcgccgttcccctgcccgccggcaagtatgtcttccatctggcgcaaaaagcggcggaggccgggatagacgggttagtctgctcggcggcggacctggaaacggtaaaaccggccataccgaacggcttcgagatcgttacccccggaatacgtccggcggggacggacgcaaacgaccaaaagcgggtggccacgccggagctggctatcggaaacggggcgacgctattggtgataggaaggccgataacgggagccgcgaacccggggaaagcggcggaagagatcgcgaaatgcgttgaaaaggttaaggcgacataa

SEQ ID NO: 49776 - protein, 178 aa, Unknown
  Obtained from environmental sample
  DOMAIN (1)...(168): Orotidine 5'-phosphate decarboxylase / HUMPS family
  misc_feature (1)..(178): Xaa is any amino acid
MDLKFHDIPNTVEKAVSAACGYGVDYLTIHTQGGVEMMRAAAAAALAAAHRPKILGVTLLTSIDQSMLNNDLAVPLPAGKYVFHLAQKAAEAGIDGLVCSAADLETVKPAIPNGFEIVTPGIRPAGTDANDQKRVATPELAIGNGATLLVIGRPITGAANPGKAAEEIAKCVEKVKAT

SEQ ID NO: 49777 - DNA, 813 bp, Unknown
  Obtained from environmental sample
  misc_feature (1)..(813): n is a, c, g, or t
atgccgaacaaaaacccgaacatattggtaaccggcgcgaccggtttcataggccagcatctgactagaaaactacttgacgttaacggcgtccgctccgtacgcgccgtctctaaagacgattcaggttcaaaactatattttttccgcgacgacgaggtcgattcaagaaaagcggatataagcgatcgcgaatcaatatccgggataatggacgggatagacgtcgtctaccatctcgcggcgatttccagaaacgatttaagcaagacttgggaggatttttacgcggtaaacgtccaaggcacagtaaaccttctcgaggaagcgaagtccgccggcgtcaaacggttcgtttttgcaagcaccgtcgaggccgccggtttcggggacggggtatcgccgagagtagagaccgacgcgccgaatcccgtgaacaactacggcaaaagcaaactctcggcggaacggcaggttttgtccggggcgtggccgatggagtgtaccgtactgcggctgcctatgatctacggccccggcacgtttcttatcgtcccgaaactgttcggcatggtccgccggggattctacccgatgataggcggcggcaaggcgttgatggaattttgctacgtggataacgccgtcaacgggattattctggccggagaaaagaaagaggccgccggggaactcttttatatatccgatgaacggtcttactcaataagggaagtcgtgtcgaccattgccgaaagtccggaaaacgggttctgtttatcagtatccccgttttcgcggcctaatttttag

SEQ ID NO: 49778 - protein, 270 aa, Unknown
  Obtained from environmental sample
  DOMAIN (6)...(133): short chain dehydrogenase
  misc_feature (1)..(270): Xaa is any amino acid
MPNKNPNILVTGATGFIGQHLTRKLLDVNGVRSVRAVSKDDSGSKLYFFRDDEVDSRKADISDRESISGIMDGIDVVYHLAAISRNDLSKTWEDFYAVNVQGTVNLLEEAKSAGVKRFVFASTVEAAGFGDGVSPRVETDAPNPVNNYGKSKLSAERQVLSGAWPMECTVLRLPMIYGPGTFLIVPKLFGMVRRGFYPMIGGGKALMEFCYVDNAVNGIILAGEKKEAAGELFYISDERSYSIREVVSTIAESPENGFCLSVSPFSRPNF

SEQ ID NO: 49779 - DNA, 819 bp, Unknown
  Obtained from environmental sample
  misc_feature (1)..(819): n is a, c, g, or t
ttgatgatggcgaaccagttcatatcaacgggcggtatcgactacgcaagagagcttttggaaaaatcactcggaagccagaaagcaattgatattatcaaccgcttaacgtcaagtttgcaggtgcgtcctttcgactttatccgcagaacagaccccgcgcaccttttaaactttattcagcaggaacacccgcagacaatcgcccttattttggcgtacttggaaccgaacaaggcttccattattctgcaaaacctgccgcatgaagttcagagcgacgtagcgcggcgtatcgcgacaatggacagaacgagtcctgaagtattgcgcgaagttgaacgcgttcttgaaaagaaactgtcatcgttgtccagtgaagactacactgcggcgggcggcgttgaaagcattgtagaaatattgaaccttgtagaccgcgcttctgagaagcagattatcgaggctttggaagacgaagatccggaacttgcggaagagatcaagaaaagaatgttcgtattcgaagatatcgttatgctggacgatcgcgctattcagaaagttatgcgcgaagtcgactcacaggagcttgcgaaagcgctcaagtcggtcgactcggaagttcaggacaagatattcaagaatatgtcaaagcgcgcggcaagtatgctcaaggaagatatggagtatatgggacctgtacgcttgaaagacgttgaagaagcgcagcagaagatagtatccattatccgtcaccttgaggataccggtgaaatcgttgtcgcccgcgccggtgaagacgagcttgtcgtataa

SEQ ID NO: 49780 - protein, 272 aa, Unknown
  Obtained from environmental sample
  DOMAIN (154)...(263): FliG C-terminal domain
  misc_feature (1)..(272): Xaa is any amino acid
MMMANQFISTGGIDYARELLEKSLGSQKAIDIINRLTSSLQVRPFDFIRRTDPAHLLNFIQQEHPQTIALILAYLEPNKASIILQNLPHEVQSDVARRIATMDRTSPEVLREVERVLEKKLSSLSSEDYTAAGGVESIVEILNLVDRASEKQIIEALEDEDPELAEEIKKRMFVFEDIVMLDDRAIQKVMREVDSQELAKALKSVDSEVQDKIFKNMSKRAASMLKEDMEYMGPVRLKDVEEAQQKIVSIIRHLEDTGEIVVARAGEDELVV

SEQ ID NO: 49781 - DNA, 789 bp, Unknown
  Obtained from environmental sample
  misc_feature (1)..(789): n is a, c, g, or t
atgttaaaggctgttttcagaccgaatgaactggtaacgcttcaggaaaagatcgttattgattctcctacttcctatcctgaaattactcatttgtccgccaaagaggataacgcggacgacattgaagctatagaagagtattcagggcctaccgcggacgagcttcggcgcgaagctgaaatgttcaaaacaagatgggaagaagaaaaagaacgaatgatttcttcggcaaaagaagaagcagataacattgtacaggacgcgcagaaagcggcctttgcggaagttaaaaggcagactgacgaggctcaggttttaaaacagcaggctgaagaagaagcgcagcgtataatagcggaagcaaaagaaaaggcaaacgatattgaggccgaggtaaggaagtctctggagaatgagcgcagggaagcgaaggaacaaggaaagactgagggcaaggaagacggatatgccgaagggaaagcggaagtagaccgccttattgaaagaacccaggtagtgcttgaacgcgcccaggacaagagagcggatattttaagcgataccgaaaaagaaattatttatctggtgcttcttattacgcgaaaagttatcaaagttatctcggagaatcagcgtgatgtgataatttccaatgttgttgaagccctgcgtaaagttaaggcgaagggaaatatcacaattaangttaanccttgcggatncttaacttgccacagaacancagcagaattttatcgctcttatggaangcgtaaaaacaattaa

SEQ ID NO: 49782 - protein, 262 aa, Unknown
  Obtained from environmental sample
  misc_feature (1)..(262): Xaa is any amino acid
MLKAVFRPNELVTLQEKIVIDSPTSYPEITHLSAKEDNADDIEAIEEYSGPTADELRREAEMFKTRWEEEKERMISSAKEEADNIVQDAQKAAFAEVKRQTDEAQVLKQQAEEEAQRIIAEAKEKANDIEAEVRKSLENERREAKEQGKTEGKEDGYAEGKAEVDRLIERTQVVLERAQDKRADILSDTEKEIIYLVLLITRKVIKVISENQRDVIISNVVEALRKVKAKGNITIXVXPCGXLTCHRTXAEFYRSYGXRKNN

SEQ ID NO: 49783 - DNA, 1563 bp, Unknown
  Obtained from environmental sample
  misc_feature (1)..(1563): n is a, c, g, or t
atggggcattttaaggaagatgaaaaagtttacctggattatcttcctatggcggctccctattccatgatgtccgaacctgatgttctgcttgtaaacttaagcggcggaataaacgcgaatgtcgccctgtacaacggggcgcgatccattgacatcacggaaccttctccggaaataatccgtcttttacgggacgatcctgctgtttcccgctttacgggaaatcttctggatacaagcagaataaatgtaatcaggggcgagggccggtcgcattgcgtaactaacaaagattcttatgacttaatcgaaataagtttggttgattctgtcggccttacggattccggaggatacgcggtacatgaagattttaaatacacggtagaggcctttaagaattatttcagcggccttaaagacgggggtatcctttccgtaactgtctgggacaggctgaatccgcccaggaacgtaccgcgccttattaatacaataatccgcgcgatgaatgaagccggttttgaagaacccgaaaaatgcctgtattcattcgggcttttgcggtccacttcgactatccttgtaagaaaaggagcgtttacaacgcgcgatcttgacgaccttgataaatttatcaaaaaatgttcttttgagcttttttacgctcccgaagccgatttgccgttacgcgattttgacatacttatggcaaattaccgcaatcagtttgttgataatgcctcangagattccggagactccggaacggaaaaggaaaagacggaaaccattacaaacgccgatatgtacagaactgtaattcctcttttcttcgcgggaaaagcgaaaaaaatagaagatgcctatatttntgatatccggcctgtttcagatccccgtccttattacacagggtatttaaaaatgggcgaactatcaatgtatctggatcagttacgtgatatttcggaagaatggggataccttcttctctttgcaatgttgattcaggcgtgtatattcggtcttattgtaattttaatccctgttatcggcaaaagaaaaacccttttcacaagaagaaggggtactgttggaataattttgtattttgccggacttggactgggttatatgctgatagaaatttaccttatccagcgtcttgcggtatttctttccaacccgacatattcaacaagcatggtgattaccgtaatgttaatttcttccgctcttggaaacattacaagcgggcttttaaaacgttataggatttttgtcgttccggcggcgtgcgttttgattgcgggaggatttatgttttatattttcggcttagatgatttccttgcgattttccattcttcttccatgctgacgcggtttttggtttcggcgttaataatcgctcctccggctttttttatgggtatcccgtatccaaacggcctggacaaccttcatgaaataaaacctcatctattgccttgggcatggggaatgaacggcggcctttcacttgtggaagcgcgatggcccggcttctttccatag

SEQ ID NO: 49784 - protein, 520 aa, Unknown
  Obtained from environmental sample
  misc_feature (1)..(520): Xaa is any amino acid
MGHFKEDEKVYLDYLPMAAPYSMMSEPDVLLVNLSGGINANVALYNGARSIDITEPSPEIIRLLRDDPAVSRFTGNLLDTSRINVIRGEGRSHCVTNKDSYDLIEISLVDSVGLTDSGGYAVHEDFKYTVEAFKNYFSGLKDGGILSVTVWDRLNPPRNVPRLINTIIRAMNEAGFEEPEKCLYSFGLLRSTSTILVRKGAFTTRDLDDLDKFIKKCSFELFYAPEADLPLRDFDILMANYRNQFVDNASXDSGDSGTEKEKTETITNADMYRTVIPLFFAGKAKKIEDAYIXDIRPVSDPRPYYTGYLKMGELSMYLDQLRDISEEWGYLLLFAMLIQACIFGLIVILIPVIGKRKTLFTRRRGTVGIILYFAGLGLGYMLIEIYLIQRLAVFLSNPTYSTSMVITVMLISSALGNITSGLLKRYRIFVVPAACVLIAGGFMFYIFGLDDFLAIFHSSSMLTRFLVSALIIAPPAFFMGIPYPNGLDNLHEIKPHLLPWAWGMNGGLSLVEARWPGFFP

SEQ ID NO: 49785 - DNA, 567 bp, Unknown
  Obtained from environmental sample
  misc_feature (1)..(567): n is a, c, g, or t
atgaccgccgctaacccaatagtctccgttgagaatctgatcgtccgctacggcgagcgcgttgtgctcgacggggtcaacgcctcggtcagcccgtcggagatacgggtgattttgggggggagcgggtgcggcaagacgacgcttttgcggtcgattgtcgggcttatcaagccctattctgggcgggtgaggcttttcgggcggcagattttagatatggagagcgacgccgattcggagattttgaggcgtataggggtgctgtttcagaacggggcactcttggggtcgctcaccgtggcgcagaacgtggcgttgccgctggaattgcacacagacttgccgccgtcccttgtggacgagatagtgcggtacaagctgtcgcaggtggagatgccgcacgcctacggcctttttccgggggagctctccggcggtatgcgcaagcgggcggctttggcgcgcgccctggccctagacccgccgctgctcttctgcgacgaacccagcgccggccttgaccccgtgaccagcgccggtttggactcattattgctccgttaa

SEQ ID NO: 49786 - protein, 188 aa, Unknown
  Obtained from environmental sample
  DOMAIN (33)...(188): ABC transporter
  misc_feature (1)..(188): Xaa is any amino acid
MTAANPIVSVENLIVRYGERVVLDGVNASVSPSEIRVILGGSGCGKTTLLRSIVGLIKPYSGRVRLFGRQILDMESDADSEILRRIGVLFQNGALLGSLTVAQNVALPLELHTDLPPSLVDEIVRYKLSQVEMPHAYGLFPGELSGGMRKRAALARALALDPPLLFCDEPSAGLDPVTSAGLDSLLLR

SEQ ID NO: 49787 - DNA, 501 bp, Unknown
  Obtained from environmental sample
  misc_feature (1)..(501): n is a, c, g, or t
atggcgggaagttttcaaaacgagattccggcggcgcgaatcaacctgaagctggacgtcggcaaaggcgacgcccgcaggaatatcgagctgccgctcaagctgcttgtgatgggggatttcaccggtagcaagaaggagagccgtatcgcggatagggacaagatcgcgatagataagaacaactttcagcaagtaatggcaaagttcggcctgacgctctcctttaatgtggagaacaagctgaaaggcgacggcagcgatatgccggttacaattccggtgacgggtatggactctttcaggccggagtctgtggcctcggcggtgccgtcgctgtgccggttgctcgcggcgcggaatttgctcaaggacctgaagtcgaatctgcttgacaatagagagttcaggcggcggttggaggagttgatcaagaatccggaggcggcgcagaacctgcgggcggagttgcggaagatcgttcccgaactggaagggtag

SEQ ID NO: 49788 - protein, 166 aa, Unknown
  Obtained from environmental sample
  DOMAIN (3)...(160): Protein of unknown function (DUF770)
  misc_feature (1)..(166): Xaa is any amino acid
MAGSFQNEIPAARINLKLDVGKGDARRNIELPLKLLVMGDFTGSKKESRIADRDKIAIDKNNFQQVMAKFGLTLSFNVENKLKGDGSDMPVTIPVTGMDSFRPESVASAVPSLCRLLAARNLLKDLKSNLLDNREFRRRLEELIKNPEAAQNLRAELRKIVPELEG

SEQ ID NO: 49789 - DNA, 864 bp, Unknown
  Obtained from environmental sample
  misc_feature (1)..(864): n is a, c, g, or t
atgctggatttcaagcaagacatagccttggccatgtcaaaattggacttcaaaaatgaccctttggcgtccgccaagcgcgaaagcctgaaaagtttcgattttgcctgcgacgccgccatccgatttgcccagcgccacgcagggctcgccgagtcgctggcaaaagatgccgccaacgagcagaggcgggaagaattgcttaaaatcgcagaaatctgccgccgagtgccggcccgagcgccacgcactttccacgaggcactgcagtcctactggttctgccatttaggagtggtcaccgagctgaatggctgggatgcctactgccctggccacctagaccagcacctttggccattctataaaaaagaaatcgaagcagggacgctgacaagggaatccgcaaaggaactgttgggatgcttcttcgtcaagttcaacaaccaccccgccccgccaaaagttggcgtgaccgcagctgaatcaggcacgtacacagattttgcaaacatcaaccttgcgggcctgttggccgatggaagcgacgggagcaacgaagtcacgctgctgctgctggaagtgattgacgaaatgcaactgctgcagcccagcaacaacatacagataagccgaaaaacgccggacaatgtattaaatgccgccctgaaagtcatacgcaagggctatggtttcccatcggtctttaacgccgacagcgtggtagaggaacaactgcggatgggcaagacgctggaggacgctagagctggcggctgctctgggtgcgtggaagtcggggcctttggcaaagaggcgtatattttgactgggtatttcaaccttccaaaagtatggaactag

SEQ ID NO: 49790 - protein, 287 aa, Unknown
  Obtained from environmental sample
  misc_feature (1)..(287): Xaa is any amino acid
MLDFKQDIALAMSKLDFKNDPLASAKRESLKSFDFACDAAIRFAQRHAGLAESLAKDAANEQRREELLKIAEICRRVPARAPRTFHEALQSYWFCHLGVVTELNGWDAYCPGHLDQHLWPFYKKEIEAGTLTRESAKELLGCFFVKFNNHPAPPKVGVTAAESGTYTDFANINLAGLLADGSDGSNEVTLLLLEVIDEMQLLQPSNNIQISRKTPDNVLNAALKVIRKGYGFPSVFNADSVVEEQLRMGKTLEDARAGGCSGCVEVGAFGKEAYILTGYFNLPKVWN

SEQ ID NO: 49791 - DNA, 2310 bp, Unknown
  Obtained from environmental sample
  misc_feature (1)..(2310): n is a, c, g, or t
ttggccttggtttgtccctgggcggaaacaacaaacatcaaaaatcaggaaaatttttttgaattcgccccagtgctgcccacaaagatccttgatattgacgggaacctcataaccgagttttccgcagatgaaaaacgggctttggtttcactgaatgaattgcccaagcatcttatttacgcggtacttgccagagaagattatgatttttacaaccacaagggattcagcgtcaggggcattgccagagcagtggtcggcaagctgctcagaaaagacctgggcgggggttcaacaataacccaacagatagccggaactctatacacagatcgcagggaaataaccctaacccgcaagataaaggaactctggtgggccttccaaatggaacggcgctttacgaaaaacgaaatccttgaaatttaccttaaccagataattatggggcccggagtctacggggtggaagcggcaagccagtatttcttcgggcacagcgcaagggaaattaccctcgcggaatcggcgctcctggtgattcagttttcaagcccgacacactataatccccttaacaaccccaaccaggcgatgaaccgccaaagagtggtgctggataaaatggtggagatgggttacacaaccaccgaagaagcggaagcgtctttcaacgagtattgggacaattacgactacaccagggcatccaccgcggcttactacaaccgcacagacgccgcgccatggttcagtgaatatgtgcgccgggagctggatcaaagaatgtacggcagcatggattattaccgggatgggtacactgtctatactacgctgaacatgaaacaccaggaagcggcaaacaaatacatggaagaagggattaaaagggcaaatgtggaatatgccagatcctcaggaacccggcttgttgacgcggaaagaacctggcttccggtaattgatcttctttccctctatttcaaccttgatcagattcattccacttccgacgcccagaacgagcaaaaggccctgaaccgttacaccaaaacaataaatcctttgctggacatggcggccctggcctttgggattccggaaataaggactttgaccggcgtaggcttcgcgaacttaaaaacttccaccgagcaaaatgttgtagaaggcgcactgatttccatagaaaatgacacgggcttcattaccgccattgtaggcggttccaaatatgatgagtcaaatcagcttatcagggctgtgcaggggaacctccagccggggagcgcctttaagcccctttactactcggcggccatagacagcaggaaattcaccccggcaaccgttataaacgaccttcccattgtcttttacaacgaggacggaactgcctatatgccgctgaatttcctcggaaaatggaacggctcagtgctggtttttgacgctttggctcagtcgatgaacgtggcgagtatcagggtactngacgggattggttttgacgcagcaatcgacagggcttccagccttcttggctacacagacccggacgacataaggcggcgcttccccagggtgtacccgcttggcctgggcataatttcaacttcccccctcagaatggcgagggctttttctatctttgccaacttaggccgcgaagtgacccccattgcgattcgctcggtggaggacaggaacggaagaatcattctggacattgaaagggaagtccggcaggaacagcggcgaaagggaaacgcgattcaggtggtaagccctcagaacgcctacgtcatgatatcaatgctaaaaaagactgtagaaaggccggggggcaccctttacaatccctcaggctggggctcaaagtttacattcaaagatgcaaacggaaagacctttaagatgccgatggcaggcaaaaccggaacgcctcagaactggtctgacgcgtggactataggtttttccgcttactacactacggcgatatggttcggctttgacaaaccaggaaattcgctgggcttaacccttaccggttctaccctggccggccccgtatgggcggattatatgagggaaatccaccagggcctcccttacagggattttttacgtccagccacggggctggttgacgcaactgtgtgcataaagtccgggcttttaaaaactccttcctgtaccgagggtgaagtaacccttaccttccttgaaggcacccagcctatgcttttctgcgaagagtgcggatacaacagagggtttgaaaccttcaggggtgtatga

SEQ ID NO: 49792 - protein, 769 aa, Unknown
  Obtained from environmental sample
  DOMAIN (393)...(700): Penicillin binding protein transpeptidase domain
  misc_feature (1)..(769): Xaa is any amino acid
MALVCPWAETTNIKNQENFFEFAPVLPTKILDIDGNLITEFSADEKRALVSLNELPKHLIYAVLAREDYDFYNHKGFSVRGIARAVVGKLLRKDLGGGSTITQQIAGTLYTDRREITLTRKIKELWWAFQMERRFTKNEILEIYLNQIIMGPGVYGVEAASQYFFGHSAREITLAESALLVIQFSSPTHYNPLNNPNQAMNRQRVVLDKMVEMGYTTTEEAEASFNEYWDNYDYTRASTAAYYNRTDAAPWFSEYVRRELDQRMYGSMDYYRDGYTVYTTLNMKHQEAANKYMEEGIKRANVEYARSSGTRLVDAERTWLPVIDLLSLYFNLDQIHSTSDAQNEQKALNRYTKTINPLLDMAALAFGIPEIRTLTGVGFANLKTSTEQNVVEGALISIENDTGFITAIVGGSKYDESNQLIRAVQGNLQPGSAFKPLYYSAAIDSRKFTPATVINDLPIVFYNEDGTAYMPLNFLGKWNGSVLVFDALAQSMNVASIRVLDGIGFDAAIDRASSLLGYTDPDDIRRRFPRVYPLGLGIISTSPLRMARAFSIFANLGREVTPIAIRSVEDRNGRIILDIEREVRQEQRRKGNAIQVVSPQNAYVMISMLKKTVERPGGTLYNPSGWGSKFTFKDANGKTFKMPMAGKTGTPQNWSDAWTIGFSAYYTTAIWFGFDKPGNSLGLTLTGSTLAGPVWADYMREIHQGLPYRDFLRPATGLVDATVCIKSGLLKTPSCTEGEVTLTFLEGTQPMLFCEECGYNRGFETFRGV

SEQ ID NO: 49793 - DNA, 1758 bp, Unknown
  Obtained from environmental sample
  misc_feature (1)..(1758): n is a, c, g, or t
gtgctggacggcgcaatagcgatttttgacgcggtccacggggttgagccccaaaccgaaacagtctggcggcaggcgcgcaggtacaatgtcccatgcataggttatgtgaacaaaatggacaggctgggggcggattttttctttgttatcgaagatgtaaaaaacaaattgaaaataaatacggttcctcttcaaattccaataggcagagaaggttcgtttgagggcgttattgacttaatcgaaatgaaagaaattcgctggaaggactcgggcgatgaaatggaatactcccctatcgcggtgcagcgtgaggatgacgcgaaaaaatggcgcgagaaactgatagattcgctttccggtgtttccgacattattaccgaaaaatacctcgccggcgaagatattgacgcggcccttatccgcgcggagcttcgcaaggcggtcattaagcgcgaactgctccccatgttcgcgggcgcgtcaagacgcaatataggcgtccagcctgtcattgatgctgttgttgatttcttacccgcgcctgacgagataaaaccggcggttggacatcatattaaaaaagaggaagatatatctattccctgcgatccaaagggacagcccataggccttgtttttaagattcaaaatgaccgcgaggcgggaagcctttgttatgtaagaatgtactcaggctccattccgtcggggagcgcggtctttaatcagggaaagaaaaaacgcgaaagggcgaacagaattttacgtatgcactcgaataaatcagacccgatagacagccttaacgcgggagacatcggcgtaattatcggaatgaagcttgcccagacaggcgacacaataggaagcgaaggcttgcctgtagtgcttgaaaaaatgcagttcccggagcctgtaatttccatttccatagaacctaaaacaatttctgatcaggataaattaaaagatatactggcaattctttccaaagaagacccgacttttaccacaagagaaaatgaagaaacagggcaactgataatttccggcatgggagagttacaccttgacgttcttgttacgcgcatattaagagaatacaaacttggagcgaaagtaggaaatccgcaggtaacttaccgcgaatcaatcagcgcggtaaaagaacacagcgaaagtttttccaaagttgtcgccggaaaagaaaatacggcgggtattaccctgcgcgtagaacccgcgcaaagaggcagcggcaacaaatatgtttacgcggcaagaacttccggcagaagcgaagtcccgcaggaaattaccgacgctattgagagcggaattaacgcggcgttttcttccggcatagtaatgggatatccctgtatcgatataaccgcgacagttacaaacgttcagtattcggaacagacaagcaccgccttcgcgtttgaagcctgcgccagcatggcatttgacgaagcgtgcagaaacgccgctcccattctccttgagcctattatggccgtcaaccttaacactccccatgaatttgtgggagaagttatgagccttgtaacacagcgcggcgggcaaatccttaacatgaacgctaagtctgacgcggacgaaataaaggctcaggcgcctatggaaaaaatgttcggatttatgacaagccttcgcagtgtgtcacagggacgcgccagttttagtttggaattttcacattttgagaagaagtcggaaagataa

SEQ ID NO: 49794 - protein, 585 aa, Unknown
  Obtained from environmental sample
  DOMAIN (224)...(291): Elongation factor Tu domain 2
  misc_feature (1)..(585): Xaa is any amino acid
MLDGAIAIFDAVHGVEPQTETVWRQARRYNVPCIGYVNKMDRLGADFFFVIEDVKNKLKINTVPLQIPIGREGSFEGVIDLIEMKEIRWKDSGDEMEYSPIAVQREDDAKKWREKLIDSLSGVSDIITEKYLAGEDIDAALIRAELRKAVIKRELLPMFAGASRRNIGVQPVIDAVVDFLPAPDEIKPAVGHHIKKEEDISIPCDPKGQPIGLVFKIQNDREAGSLCYVRMYSGSIPSGSAVFNQGKKKRERANRILRMHSNKSDPIDSLNAGDIGVIIGMKLAQTGDTIGSEGLPVVLEKMQFPEPVISISIEPKTISDQDKLKDILAILSKEDPTFTTRENEETGQLIISGMGELHLDVLVTRILREYKLGAKVGNPQVTYRESISAVKEHSESFSKVVAGKENTAGITLRVEPAQRGSGNKYVYAARTSGRSEVPQEITDAIESGINAAFSSGIVMGYPCIDITATVTNVQYSEQTSTAFAFEACASMAFDEACRNAAPILLEPIMAVNLNTPHEFVGEVMSLVTQRGGQILNMNAKSDADEIKAQAPMEKMFGFMTSLRSVSQGRASFSLEFSHFEKKSER

SEQ ID NO: 49795 - DNA, 597 bp, Unknown
  Obtained from environmental sample
  misc_feature (1)..(597): n is a, c, g, or t
atgcttggacccgtcgtaaacgccgccgcagtcgtaattttttcgcttatagggacatttcttgtaaagggcatacccgaccgcgtcgaagaaatcatcaaaaaagccataggcctttccatcatcttcctggggataaagggtgcgtttgaaaatgaaaagctgctcctgctgattatgagcatggtctttggggggataataggcgaactaatcgacatagacaaatggatgaacaaattcggcaagtgggcggaaagcaaacttgttaaaaacaacattgaaggctcaaagcacgatttcgccaagggctttgtctccgctactatcctctactgcacaggctcaatggcgattttaggctctatgcaaagcgggcttgcgggtaaccatcagatactttttactaaaaccgtcatggacggttccatgtctattgtcttcggcgcggcattcggaataggcgcggccttctcggctataccgcttttgctctatcagggtggaatcgcgcttgcctcctcctatatccgcgattttcttaacccggaagttatccgcgaaatgtccgcaggggaagcctgtcanacggcatag

SEQ ID NO: 49796 - protein, 198 aa, Unknown
  Obtained from environmental sample
  DOMAIN (1)...(198): Protein of unknown function (DUF554)
  misc_feature (1)..(198): Xaa is any amino acid
MLGPVVNAAAVVIFSLIGTFLVKGIPDRVEEIIKKAIGLSIIFLGIKGAFENEKLLLLIMSMVFGGIIGELIDIDKWMNKFGKWAESKLVKNNIEGSKHDFAKGFVSATILYCTGSMAILGSMQSGLAGNHQILFTKTVMDGSMSIVFGAAFGIGAAFSAIPLLLYQGGIALASSYIRDFLNPEVIREMSAGEACXTA

SEQ ID NO: 49797 - DNA, 1608 bp, Unknown
  Obtained from environmental sample
  misc_feature (1)..(1608): n is a, c, g, or t
gtgtctttaagcaagagggctatggagaatcttgccgttcaacgcgccgcgtactggcagggaagagaggacggcctttttcggattgcccgtacgctggctaatatttttggtgattttgaagacgatccggcggagcgaaggcgggacatgtatgacagtatgatgcaatccattacaagggcggaaactaccatatttcaagtctacactgtttggaagccaaacgctgttgacggaatggactcacgctacattggccgtcccggttccaccgaaacaggacagtatgccgccgcgtttcgcatggaaaacgggctggctaatatcacgactaccaccgatgtagcggacgctatggcgtatttaacaggccccgacgcgaggaaggaccggtatgtacatcccgttccaaggaatatagacgggaaagatacctggtatttcaggataatggttcccatcgtaaacagacgtaccagcgaaatagtgggaggcgtgggccttctttgtgtcatagacgcgatacagccaacgatagtgaataccataagaaccagggaagaaatttccgcggcggtaatttattccagcaacggatttattattggacactatacgccggagcgcgtaggcnagatgatgaaagacacagaggttgtctacggcaattatctggatgaagcctttaaggctgttcaaaacggcgattctttttcttgctcagttattctccggcttttgaaaacagacgtagaaattactatacagtctttcccaatgggcagttcgggccaatcatggagcgtaatgatcgccgcgacaaaatcttacattttaagagaagtagatgagatgaccaaatttaccatcatcatcgcggcgatagccattcttatagcggcggtaattgtgtactttacccttcaaagcactaccaagccaatcgttacggtagccgacaccctcaaggatatttccgaaggcgaaggcgatctgactcggagcatttccgtcagttccagggacgagattggcgaccttgccctgttcttcaataaaacgctgggtaaaattaaagaccttgtgcttatcattaaaagacaggccggcgtgctgtcggatatcggcgccgccctgtccagcaacatgaccgaaaccgccgcggcgataaaccaaattaccgccaacatccaaagcatcaagggcagggtcataagccagagcgccagcgtaaccgaaaccaacgccaccatggaacaggttatcgtcaacattaacaaactcaacggtcatgtggaaaaccagagcagaaatgtttcccaggcctcatccgctattgaggaaatggtagccaacataagttccgtaaccagcacgctggtcaacaacgccgccaatgtaaaaaccttacaggaagcatccgaagtgggaaaagccggattgcaggaagtggcgtccgacattcangaaatatcccgcgagtccgaaggcctgctggagattaacgcggtaatggaaaacatagcaagccagaccaacctgctttcgatgaacgcggcgatgaagccgcccacgccggggaatcgggcaagggcttcgccgtag

SEQ ID NO: 49798 - protein, 535 aa, Unknown
  Obtained from environmental sample
  DOMAIN (290)...(361): HAMP domain
  misc_feature (1)..(535): Xaa is any amino acid
MSLSKRAMENLAVQRAAYWQGREDGLFRIARTLANIFGDFEDDPAERRRDMYDSMMQSITRAETTIFQVYTVWKPNAVDGMDSRYIGRPGSTETGQYAAAFRMENGLANITTTTDVADAMAYLTGPDARKDRYVHPVPRNIDGKDTWYFRIMVPIVNRRTSEIVGGVGLLCVIDAIQPTIVNTIRTREEISAAVIYSSNGFIIGHYTPERVGXMMKDTEVVYGNYLDEAFKAVQNGDSFSCSVILRLLKTDVEITIQSFPMGSSGQSWSVMIAATKSYILREVDEMTKFTIIIAAIAILIAAVIVYFTLQSTTKPIVTVADTLKDISEGEGDLTRSISVSSRDEIGDLALFFNKTLGKIKDLVLIIKRQAGVLSDIGAALSSNMTETAAAINQITANIQSIKGRVISQSASVTETNATMEQVIVNINKLNGHVENQSRNVSQASSAIEEMVANISSVTSTLVNNAANVKTLQEASEVGKAGLQEVASDIXEISRESEGLLEINAVMENIASQTNLLSMNAAMKPPTPGNRARASP

SEQ ID NO: 49799 - DNA, 426 bp, Unknown
  Obtained from environmental sample
  misc_feature (1)..(426): n is a, c, g, or t
gtgttgaaaaaaatagccgagtcgataaaaaagattacaagctccaccgagaacgtacttaagagattcgaggcgattgattcgggagtaaagacggtagcggagcaggaggagataatccgtcacgcgatggaggaacaagccgaggggagccatcagctccttcagggaaccagcaatttgaacggaattacccagcaggtaaaagccggttccgaagagatgcttgaaggcagcaaggaagtgatgaaggaaagccggaaccttgaaaaggtaacgcaagagatcacgggcggcatgaacgaaatggcatccggcgctgagcaggtaaacatcgcggtaaacaacgtcaacgggataagcgccaggaaccgtgaaggcattgacactctaatacgcgaagtatcgcgcttcaaggtggagtaa

SEQ ID NO: 49800 - protein, 141 aa, Unknown
  Obtained from environmental sample
  misc_feature (1)..(141): Xaa is any amino acid
MLKKIAESIKKITSSTENVLKRFEAIDSGVKTVAEQEEIIRHAMEEQAEGSHQLLQGTSNLNGITQQVKAGSEEMLEGSKEVMKESRNLEKVTQEITGGMNEMASGAEQVNIAVNNVNGISARNREGIDTLIREVSRFKVE

SEQ ID NO: 49801 - DNA, 717 bp, Unknown
  Obtained from environmental sample
  misc_feature (1)..(717): n is a, c, g, or t
ttgtgtttcaatagcttggcgcacatcataggcgtaagcgtaagcgagacgaaggcagaaaccaaaatcgtgatgctgagggtgatggcaaactctctaaacagccgccccaccacgtcacccatgaacagcaacggtatcagcacggctatcagtgaaacggttaggctgatgatagtaaaggctatttgctcagaacccttgagcgcagcccgcagcgggttttcaccctcctcgatgtacctcatgatgttttcgatcatcactatggcatcgtccaccacgaagccagtgcttatggtcaaggccatcaaggtcaggttgttaaggctgaatccgagggcgtacatggccgcaaaggtacccacgatggacagtggaactgcgatacttgggatcactgtcgccgaaagggttctcaaaaacacgaaaataaccattaccactagcgcgatgcagagcatcaattcaaattcgacatcccttacggaggcgcgtatggtagtcgttctgtcggttaggatttcgacctccaccgatgatggcagagaggccgtcaattgcggcagaagccgtttgacgcggtcaaccacggctattatgtttgcaccaggctgccgctggatattgagtatcaccgctggggtgtcattcatccaagcggcctgctttacgttttctgcgccgtctattattgtggccacgtcggacaaatag

SEQ ID NO: 49802 - protein, 238 aa, Unknown
  Obtained from environmental sample
  misc_feature (1)..(238): Xaa is any amino acid
MCFNSLAHIIGVSVSETKAETKIVMLRVMANSLNSRPTTSPMNSNGISTAISETVRLMIVKAICSEPLSAARSGFSPSSMYLMMFSIITMASSTTKPVLMVKAIKVRLLRLNPRAYMAAKVPTMDSGTAILGITVAERVLKNTKITITTSAMQSINSNSTSLTEARMVVVLSVRISTSTDDGREAVNCGRSRLTRSTTAIMFAPGCRWILSITAGVSFIQAACFTFSAPSIIVATSDK

SEQ ID NO: 49803 - DNA, 672 bp, Unknown
  Obtained from environmental sample
  misc_feature (1)..(672): n is a, c, g, or t
atgaacgcagcggccaaaccacaacgtaaaatacatagtgttttccagtcccgcagcggttttcggccaccccaaaatactacccgatggacgaaaagcaccccacggagccctgagaactattacggctacacaaaactcgccatagagcagtattggaagtggtacagaaaattaaggggaataaactacgctgccttgcgctatttcaatgcggcgggctatgacattaagggcaggattagcgttttggagcaaaaccccgcgaatttgctccccatagtcatggaagctgccataggcaaaagagcatttgtggaggtgttcgggaacgattacgaaacccctgacggcacaggggtcagggattatattcacgtgagcgacctagctagggcgcacaggacggcttttgacaagctgcaaagctatggcaaaagtttcacggttaatttgggggttagcagcggaactagcgttttagaggttataaaagcggcagaacgcgtatccggcagaaaaattgaatacaaaatagcaccccgccgcgcaggggatgcgcccactgttctggcaaacccagcttatgcaaaggagtttttaggctggcaagcggaatattcggacttgaacacgctccttgaaagcacctgggttgtttataaaaagtaa

SEQ ID NO: 49804 - protein, 223 aa, Unknown
  Obtained from environmental sample
  DOMAIN (1)...(153): NAD dependent epimerase/dehydratase family
  misc_feature (1)..(223): Xaa is any amino acid
MNAAAKPQRKIHSVFQSRSGFRPPQNTTRWTKSTPRSPENYYGYTKLAIEQYWKWYRKLRGINYAALRYFNAAGYDIKGRISVLEQNPANLLPIVMEAAIGKRAFVEVFGNDYETPDGTGVRDYIHVSDLARAHRTAFDKLQSYGKSFTVNLGVSSGTSVLEVIKAAERVSGRKIEYKIAPRRAGDAPTVLANPAYAKEFLGWQAEYSDLNTLLESTWVVYKK

SEQ ID NO: 49805 - DNA, 1050 bp, Unknown
  Obtained from environmental sample
  misc_feature (1)..(1050): n is a, c, g, or t
atggcttccgagaagaaagacgttcaattaaaaattcaggaaaacgaaaattctgaggattgcgtatgctcctgggtacagacggatgacggggtgcagttatttctccgccgctggaaaacgccttccaccccaaaggcggtattgcatatagttcacggtatggccgagcattccggcaggtatggcatattggcgcgacgccttgtaaaggaaggcattgaagtctgggctgcagatcagcgaggccacggcgaaactgcaagcaacgaaaaaaacaatccgggcaaaggcgggaaattgggacattgcgccgatggcgacggtttcgcaagggttactgttgatataggcattcttaataaagccattagggaaaagtatccgaagattccgatttttcttttgggccattcatggggttcattcattgcccaaaactacattgaaaattacgacggccttgccgacagcaatttaagcggcgatagttcttctacccgtcattccggtctttcaggctgcatcctctcgggaacacggggacctgacggcataaaaattgccatgggcgctccttttatgtcttttcttgcttttcttcttggagaaaggcattcttcccgtattgccagagccatggccgacggtccttacagcaaggctttcagacccaaccggacaaactttgactggatttcgcgtgatgaaaaggaagtggacgcctacgtagcagacagtttttgcggcaaactctgttcggtcgggttttacagggatatggcaaaggctctgaagcgtaatcatagaccggaggagatggccaaaatccgaaaggagctttccgtttatatattttccggaagcgcagacccagttggggacatgggtaaaagtccggcggatttggcggtcgcctacaaacatcttggaataaaggatttggaaaccgttctttaccccgatgcgagacacgaaactttaaatgaaacaaaccgcgatgaagttcaggagagtctcctttcatggctgctccgtcattgcgtctga

SEQ ID NO: 49806 - protein, 349 aa, Unknown
  Obtained from environmental sample
  misc_feature (1)..(349): Xaa is any amino acid
MASEKKDVQLKIQENENSEDCVCSWVQTDDGVQLFLRRWKTPSTPKAVLHIVHGMAEHSGRYGILARRLVKEGIEVWAADQRGHGETASNEKNNPGKGGKLGHCADGDGFARVTVDIGILNKAIREKYPKIPIFLLGHSWGSFIAQNYIENYDGLADSNLSGDSSSTRHSGLSGCILSGTRGPDGIKIAMGAPFMSFLAFLLGERHSSRIARAMADGPYSKAFRPNRTNFDWISRDEKEVDAYVADSFCGKLCSVGFYRDMAKALKRNHRPEEMAKIRKELSVYIFSGSADPVGDMGKSPADLAVAYKHLGIKDLETVLYPDARHETLNETNRDEVQESLLSWLLRHCV

SEQ ID NO: 49807 - DNA, 1137 bp, Unknown
  Obtained from environmental sample
  misc_feature (1)..(1137): n is a, c, g, or t
ttgccggcagcgcgtaggcgtcgtctgcccgcggcctctatcgactcggcctatcggcacgtgatagacattctcgcggacggctctaaagagcccgcccgccggccgatactgtcagcgatcttcggcccgcagcacgggctgttcggtcagacgcaggacaatatgatagagtgggagggcagcctccatcccgtcctcaaaatccccgtctacagcctctacggcgagcaccgcaagcccgcgccgagcatgctcgacgctcttgaggcgatgattttcgacgttcaggacgtcggagcgcgcccctacacctacgtgtggacgctcaagcactgcatggaggcctgcgccgagagcggcatccccgtatgggtgctcgacaggccgaacccgataggcaggataggcgcggacgggcctatgctctccgagaacttcttttctttcgtgggcggggcggcgattcctctgtgccaccggatgacgatgggggagatggcgctcctcatcaaaaaactgtacgtgacaaacgccgaagtcaacgtcgtgtggatggacgggtggcggcgcgactcgctttggagcgacacggggctgccgtgggtgctgccgtcgccgaacatgcctacgctcgacacggcggtcgtctatcccgggcaggtgctgcttgaggcgaccaacctctccgagggccgcgggacgacgcgccccttcgaactcttcggcgcgcctttcatcaacgcaacggaactcgccgccgcgttgaacgcgaagaagctgccgggctgcctgttccgcgagcacggcttcatccccacgtttcaaaagtggaagggcgagttctgcggcggggtgcagatacacgttaccgacccgaaggcgtacagacccgtggagacgacggcggctatcctgggcgcggtgataaagcagtgcggggatcagttcaagtacaaagacccgccctacgagtacgagcgcgagaagatgcctttcgacatcctcgcgggcgacacggagttgcgcggcgcgctgactttgggcgagagcgcggaggagataagggcgtcgtgggagagggactacgcggcgtggtatgaactgttcaaatcggtctcttactacaaggaatag

SEQ ID NO: 49808 - protein, 378 aa, Unknown
  Obtained from environmental sample
  DOMAIN (8)...(376): Protein of unknown function (DUF1343)
  misc_feature (1)..(378): Xaa is any amino acid
MPAARRRRLPAASIDSAYRHVIDILADGSKEPARRPILSAIFGPQHGLFGQTQDNMIEWEGSLHPVLKIPVYSLYGEHRKPAPSMLDALEAMIFDVQDVGARPYTYVWTLKHCMEACAESGIPVWVLDRPNPIGRIGADGPMLSENFFSFVGGAAIPLCHRMTMGEMALLIKKLYVTNAEVNVVWMDGWRRDSLWSDTGLPWVLPSPNMPTLDTAVVYPGQVLLEATNLSEGRGTTRPFELFGAPFINATELAAALNAKKLPGCLFREHGFIPTFQKWKGEFCGGVQIHVTDPKAYRPVETTAAILGAVIKQCGDQFKYKDPPYEYEREKMPFDILAGDTELRGALTLGESAEEIRASWERDYAAWYELFKSVSYYKE

SEQ ID NO: 49809 - DNA, 753 bp, Unknown
  Obtained from environmental sample
  misc_feature (1)..(753): n is a, c, g, or t
gtgtatctgcaccccgccgcagaactcgcccttccacttttgaaacgtggggatgaagccgtgctcgcggaacaggcagcccggcagcttcttcgcgttcaacgcggcggcgagttccgttgcgttgatgaaaggcgcgccgaagagttcgaaggggcgcgtcgtcccgcggccctcggagaggttggtcgcctcaagcagcacctgcccgggatagacgaccgccgtgtcgagcgtaggcatgttcggcgacggcagcacccacggcagccccgtgtcgctccaaagcgagtcgcgccgccacccgtccatccacacgacgttgacttcggcgtttgtcacgtacagttttttgatgaggagcgccatctcccccatcgtcatccggtggcacagaggaatcgccgccccgcccacgaaagaaaagaagttctcggagagcataggcccgtccgcgcctatcctgcctatcgggttcggcctgtcgagcacccatacggggatgccgctctcggcgcaggcctccatgcagtgcttgagcgtccacacgtaggtgtaggggcgcgctccgacgtcctgaacgtcgaaaatcatcgcctcaagagcgtcgagcatgctcggcgcgggcttgcggtgctcgccgtagaggctgtagacggggattttgaggacgggatggaggctgccctcccactctatcatattgtcctgcgtctgaccgaacagcccgtgctgcgggccgaagatcgctga

SEQ ID NO: 49810 - protein, 250 aa, Unknown
  Obtained from environmental sample
  misc_feature (1)..(250): Xaa is any amino acid
MYLHPAAELALPLLKRGDEAVLAEQAARQLLRVQRGGEFRCVDERRAEEFEGARRPAALGEVGRLKQHLPGIDDRRVERRHVRRRQHPRQPRVAPKRVAPPPVHPHDVDFGVCHVQFFDEERHLPHRHPVAQRNRRPAHERKEVLGEHRPVRAYPAYRVRPVEHPYGDAALGAGLHAVLERPHVGVGARSDVLNVENHRLKSVEHARRGLAVLAVEAVDGDFEDGMEAALPLYHIVLRLTEQPVLRAEDR

SEQ ID NO: 49811 - DNA, 603 bp, Unknown
  Obtained from environmental sample
  misc_feature (1)..(603): n is a, c, g, or t
atgcgcggattcatactagccgccggtttcggcactcgcctaaggcccattacggacaaagttccgaaggctttggtgcccgtttgcggagagccgttgttggcgcacaatttacgcgtattgcataaatcgggcgtgttctcggcgataggggtcaactcgcattatctgcacgagcagatggagcgatttcaacgtgagtcgtccataccgtttgagttgttttttgagagcgacaaaataagggggacgggcggggcgcttgatttcgcgcgggattttttaatgggggatgatacttttctcatcgccaatgttgatatcatccataagtttgacatcgcggagctggcgtcgcggtttgttgatgagggaaggatttgttcgcaggtgtcaatccccacggatggtttggggacggtgctgtatgacggcgctacgggcgactatttgggcgtttctgacgatagggaagaattaaaatcgactggattgcctaacggcgagataaacaagttgcttcgcttcgctcgcgatgaccgtcattgcgaggagcgaagcgacgaagcaatccagaaactaggattagaaaacagattatag

SEQ ID NO: 49812 - protein, 200 aa, Unknown
  Obtained from environmental sample
  DOMAIN (2)...(197): Nucleotidyl transferase
  misc_feature (1)..(200): Xaa is any amino acid
MRGFILAAGFGTRLRPITDKVPKALVPVCGEPLLAHNLRVLHKSGVFSAIGVNSHYLHEQMERFQRESSIPFELFFESDKIRGTGGALDFARDFLMGDDTFLIANVDIIHKFDIAELASRFVDEGRICSQVSIPTDGLGTVLYDGATGDYLGVSDDREELKSTGLPNGEINKLLRFARDDRHCEERSDEAIQKLGLENRL

SEQ ID NO: 49813 - DNA, 642 bp, Unknown
  Obtained from environmental sample
  misc_feature (1)..(642): n is a, c, g, or t
atggaaaaaagaaacatcctggtagtagacgacaaggatttcatgagagaatccatctccgaagtcctgcgccgtaggggctatgacgttaagaccgcgtcgaacgggcctgaggctatggaagcgtttatgcgcgagctcttcgatctcgtcatatccgattacaagatgccgcagatgaccggcgttgaactcctgcagaacataaaggccgtcaatcccgatgtgccgttcctgatattcacgggcttcggcgagatcaagatcgccgttgaggctatggagaagggcgcctttaccttccttgagaaggacgactcccttctgcaaaagattgaggtgacggttgacaaggcgctccagcaccgctcgctcattgtcgagaacaaggtgctcaacaccgagaacgagacgctcaaaaacgagttgcgcgacaggtgggattacgtgggctgcgcccctaagctcatggagatacgncagttcacgcagagcgtggcgggtagccgggccacggtgcttattacgggggagtcggggaacggtaaggaactcatagcccggtggatccactaccacagccccaggcagataggcccgtttgtcaagataaactgcgcggcgcttccggagaactcatag

SEQ ID NO: 49814 - protein, 213 aa, Unknown
  Obtained from environmental sample
  DOMAIN (149)...(213): Sigma-54 interaction domain
  misc_feature (1)..(213): Xaa is any amino acid
MEKRNILVVDDKDFMRESISEVLRRRGYDVKTASNGPEAMEAFMRELFDLVISDYKMPQMTGVELLQNIKAVNPDVPFLIFTGFGEIKIAVEAMEKGAFTFLEKDDSLLQKIEVTVDKALQHRSLIVENKVLNTENETLKNELRDRWDYVGCAPKLMEIRQFTQSVAGSRATVLITGESGNGKELIARWIHYHSPRQIGPFVKINCAALPENS

SEQ ID NO: 49815 - DNA, 1101 bp, Unknown
  Obtained from environmental sample
  misc_feature (1)..(1101): n is a, c, g, or t
gtggtggatggacataggcacgcacgaggcgcttgccgaaatagaagccgaagttggcggcgggaggatcgatttatggaattgacggaagcggaattgaccggaacgaattctttgggtgtcgcggcggaagaggtggaattgactccggcgcaactcgcctttttagaggcgtctataaaggatttcgacatcgcggagtggaaaaccacgctggccggtcaagccgcctccacgcgccgttttttcagggtgtcgaaagcgggccgctcctacatactcgtagagtgggacagcaatgacgacgattggccgcgcttcttggggatagaggcgtacctctcgccgtccgtcccgttcctgcccaagatatacgcgagcgacaaagtccacggcctcatcctcgaggaagacttgggcgacgtcaccctgaaacgcttctgcgttgaccacgccgggcaagacgacgtaatcgaaaaaacctaccgcgaagtaatcgacgcccttatcgtgtggcacgcacaagacgtcgcgaactgcccgtttatcgtgccgcggtcgatggacgttgagacattcttttgggagacgagttacttcgcgcgtcactgcgtggtggaattcttcgccgaagagcgtctgctcacggaagaatgggagaaagagcggcgcaaaatggccgtccgcgccgccgccatgccgaccgtctgcatacaccgcgatttccagtccgagaacgtcctcatcgccaacggtcaagtcaggttcgtagactaccagggcgcgcgcttaggcccgtcgcactacgacgccgcgtcgctgatttttgacccttatgtcaatctcgggcgaagcgtgatggagcgtttagttgattattacctgaccaaaacggactccgcctcccaaaagaacgatttttacatctgcgccgcccaaaggttaatgcaggcgctgggggcatacgccaacctctccctccacaaggacaaaccgcgctaccgcgaattcataccgacggcgctggagaggctgtattacatacttgagttccttcccgattaccgcgcggtaaagggggtcgttcatgggtgtcagtag

SEQ ID NO: 49816 - protein, 366 aa, Unknown
  Obtained from environmental sample
  DOMAIN (69)...(308): Phosphotransferase enzyme family
  misc_feature (1)..(366): Xaa is any amino acid
MVDGHRHARGACRNRSRSWRREDRFMELTEAELTGTNSLGVAAEEVELTPAQLAFLEASIKDFDIAEWKTTLAGQAASTRRFFRVSKAGRSYILVEWDSNDDDWPRFLGIEAYLSPSVPFLPKIYASDKVHGLILEEDLGDVTLKRFCVDHAGQDDVIEKTYREVIDALIVWHAQDVANCPFIVPRSMDVETFFWETSYFARHCVVEFFAEERLLTEEWEKERRKMAVRAAAMPTVCIHRDFQSENVLIANGQVRFVDYQGARLGPSHYDAASLIFDPYVNLGRSVMERLVDYYLTKTDSASQKNDFYICAAQRLMQALGAYANLSLHKDKPRYREFIPTALERLYYILEFLPDYRAVKGVVHGCQ

SEQ ID NO: 49817 - DNA, 669 bp, Unknown
  Obtained from environmental sample
  misc_feature (1)..(669): n is a, c, g, or t
ttggtgcctgtctgcggggagccgctgttggctcacaatttgcgcgtgttgcataaatccggtgtgttttcggctataggcgtcaactcgcattatttacatgaattgatggagcaatttcaacgcgagtcgtccataccgtttgatttattttatgagagcgaccaaataagggggacgggcggggcgcttgattttgctagggattttttgagtggggacgatacttttctcattgctaatgttgatataattcacaagttcgatattgcggaattggcgtcgcggtttgttgatagcggacgtatttgttcccaagtgtcaatccccacggatggtttggggacggtattgtatgacaacgctacgggcgattacctaggcgcatcggatgatagagcggcattggtatccacgggaacgcacggcaaaattttagaggcggaatttaccggcgttgccttttaccggcgggaattcttggacttcgtcaaaggcgacgatttttccgtcgtccctatatggaaaagggcggcattggcaggacaagcccccggtattatcactccgaataaagacgcttcgtggtggatggacataggcacgcacgaggcgcttgccgaaatagaagccgaagttggcggcgggaggatcgatttatggaattga

SEQ ID NO: 49818 - protein, 222 aa, Unknown
  Obtained from environmental sample
  DOMAIN (1)...(216): Nucleotidyl transferase
  misc_feature (1)..(222): Xaa is any amino acid
MVPVCGEPLLAHNLRVLHKSGVFSAIGVNSHYLHELMEQFQRESSIPFDLFYESDQIRGTGGALDFARDFLSGDDTFLIANVDIIHKFDIAELASRFVDSGRICSQVSIPTDGLGTVLYDNATGDYLGASDDRAALVSTGTHGKILEAEFTGVAFYRREFLDFVKGDDFSVVPIWKRAALAGQAPGIITPNKDASWWMDIGTHEALAEIEAEVGGGRIDLWN

SEQ ID NO: 49819 - DNA, 522 bp, Unknown
  Obtained from environmental sample
  misc_feature (1)..(522): n is a, c, g, or t
atgataaaaaaagcgctgcttggggctctggaaagcggagttatcgccgccgaggagctatacaacctggacgatcagggccttttcactctggcgggccagcggaattaccctctttttgcccttgtggattcggtaagggacggacggcttttttcaaccactgcggagatcccttttgaggaaaaaatccacgggaagctgcttaagctctctgagcgtatgttgatggaagaaagcctggctcaggaattttcagcctttttgggcaaaccgctgaaaggcgacgccctcataattgacctgcctgagcccgtctcttttgattgcggcctttttgttaccgacgaaaactgctttttttccgagggatcaagcgcttttaaaagtggccttgtggacgccttcgttaagtccctaaggataatacgtgtctttattaatcctgtatttgatgatataataaagcataatcgggatgtcatattgcaaataacccaaaaatggttacagtataagtag

SEQ ID NO: 49820 - protein, 173 aa, Unknown
  Obtained from environmental sample
  SIGNAL (1)...(17)
  misc_feature (1)..(173): Xaa is any amino acid
MIKKALLGALESGVIAAEELYNLDDQGLFTLAGQRNYPLFALVDSVRDGRLFSTTAEIPFEEKIHGKLLKLSERMLMEESLAQEFSAFLGKPLKGDALIIDLPEPVSFDCGLFVTDENCFFSEGSSAFKSGLVDAFVKSLRIIRVFINPVFDDIIKHNRDVILQITQKWLQYK

SEQ ID NO: 49821 - DNA, 438 bp, Unknown
  Obtained from environmental sample
  misc_feature (1)..(438): n is a, c, g, or t
atggaattacacaacacaataaaaggtaaggttgtttccaaggttgaagatatttttgaagctcttgaaaaaggtgaaaatcccgagaaatactgtacctgtgatcagtgcaggatggacgttacctgttatgtcctgaatcgaactccgccccgctatatcgtttcgggccgcggcgcatccaaatccattgaggcgggtattggatggcagcagcagacagcagatatgactgctctgatatatgaaggtattaagaaagtcaaccataatttgcggcccaattttgcccattccaaagagaaaagcgcggtcactgatgatgncgcggttccnaaaagttcatatcctacgaatataggccgcgtttttacgggaataattttgcgcccctttcagaagccactgtggagcttttgtgggcaggagagctcgtga

SEQ ID NO: 49822 - protein, 145 aa, Unknown
  Obtained from environmental sample
  misc_feature (1)..(145): Xaa is any amino acid
MELHNTIKGKVVSKVEDIFEALEKGENPEKYCTCDQCRMDVTCYVLNRTPPRYIVSGRGASKSIEAGIGWQQQTADMTALIYEGIKKVNHNLRPNFAHSKEKSAVTDDXAVPKSSYPTNIGRVFTGIILRPFQKPLWSFCGQESS

SEQ ID NO: 49823 - DNA, 1455 bp, Unknown
  Obtained from environmental sample
  misc_feature (1)..(1455): n is a, c, g, or t
atggcagaaagcggtagtttcaacaagttggcctctggcctgcccatagaagagcggcaaaacctccttgagagattaaaggcccaatccaatttttccggcaagatactctacgaggaggaaacaggcgattcttcttccgaagacatagataccgagttttccaaacttcccctgatttaccacctttggtattactttctgagtttctttaagtccaagcctcccctgcaaatctttggagaaagtaaactagcggcattggggaacaaaatagaggaaaaagccccggggttatacgaccatcagaaaggcatgcttctgccgcttttttaccggcaactgacaaagttaaaagaagcggcacattttttctactctgccctggatgcgagcgttaaccgcgacaaggcgtctttttttgcctttcttggctcacttgagatgcccgatgttcacagagttttgcagaacgagacaaaccccgcggttattgccgagaaaaatccgggtatgcctgaaaacgaacttcgccagatagccttaaaaggaatggatgacgcctttgcgatgatatcagaagaaagaaggaacgccatgtattctgatgcccgtgcgctgtactgccttaaagagctgtcttcatttttatacgacagggtgctaatggcctttgacagcaagacagaaaacggggagacctgttccgccggcattgtaagggatctccttttaaatttaagcaacattttgatgtctttaaaggcagttccgccgatggcgcttttggaatcgctttttattttcatactgcaagagagagtttcagaaactggatttgaaataaaccgtgagattcgcatgcttttatcaaaggcggaagaagctttgggcgtaatcaaggaattcaacagccatgtccctcttacattggtgcttcgctgctgtacgcggaatatgtcgcttacaccccatgaattaggcggcggtgaagactggtatattgtatacagggaatattggaaaaggcgcattgattctgtttttgccgaataccttaaagaacgccgcctaaaagaactgatggaatccttcaacgtaattttaaaaggtaatgaacttaaacaaatcggaaatgttcagacagattcaaatcctgacggaatgcccctaaaaagcgctttttgtctttcgttcctttacactttttaccctgttgttttcatgcctgatatcaactgggttcttaagcccattcttattgaaggggattttcagaaaaaagaaaatcgcgcggagtttgccgaaggatacaataaccttataaaacttgaggacgaaataaagaaattagaatataatatttccacttcgggagattactatagcgactacaccctggcgaggcaggatatgtctgcgtactctgtaaacgccgaaaaatctcggccataa

SEQ ID NO: 49824 - protein, 484 aa, Unknown
  Obtained from environmental sample
  misc_feature (1)..(484): Xaa is any amino acid
MAESGSFNKLASGLPIEERQNLLERLKAQSNFSGKILYEEETGDSSSEDIDTEFSKLPLIYHLWYYFLSFFKSKPPLQIFGESKLAALGNKIEEKAPGLYDHQKGMLLPLFYRQLTKLKEAAHFFYSALDASVNRDKASFFAFLGSLEMPDVHRVLQNETNPAVIAEKNPGMPENELRQIALKGMDDAFAMISEERRNAMYSDARALYCLKELSSFLYDRVLMAFDSKTENGETCSAGIVRDLLLNLSNILMSLKAVPPMALLESLFIFILQERVSETGFEINREIRMLLSKAEEALGVIKEFNSHVPLTLVLRCCTRNMSLTPHELGGGEDWYIVYREYWKRRIDSVFAEYLKERRLKELMESFNVILKGNELKQIGNVQTDSNPDGMPLKSAFCLSFLYTFYPVVFMPDINWVLKPILIEGDFQKKENRAEFAEGYNNLIKLEDEIKKLEYNISTSGDYYSDYTLARQDMSAYSVNAEKSRP

SEQ ID NO: 49825 - DNA, 1542 bp, Unknown
  Obtained from environmental sample
  misc_feature (1)..(1542): n is a, c, g, or t
atgaacgataacggtttccccgataaaaatatgccctcagagcggagaattcccttctcctggctatggtttgcgtcaacattgctgctttgcgcggtgttcgcgtttgcctcggtgccgggcgtgctcgcgcaggtacgtgaaggcggaacccagaccacgggacaagccgactctgtccagagaaaccgcagatacacagagactatacagcaggtattcaacttcatacagcgccactatgtggaagaggtggattccaaggtcatctttgaaggcgctatgacaggaatcttcaacgccctgggagacccctattccgcgttcctgcccgagtctgaaatgaaagacctgaacgacaccacatcgggccagtttggcggggtgggactttatataaccaagcctgccgggaacaggtcggacggcaaacccccgtatgtggaagtcgcctcgcctatcgaagatactcccggctggcgggcgggcataaaccccggcgatctcattatttccataaacggcgaattaactgataaacttacaacagatgaggttgtcgggcgccttagagggccgcccgggattgttatcaatctggttatacagcgcgaggaaaaactggaattccccgtcagcctgacacgcgctattattgaggtgcccaccgccaaacacgcgatgattggcgatattggctaccttaaacttttaacctttacccccatgacagtggaacgcgccgccaatgccatcagcgattttaaggcacaaaattataaaggcgtgatcctcgacctccggaacaactacggcgggcttttaaactcggcgattgacgtttccagcctgtttctggaaagcggagtcgtggttagcaccaagtcgcggattgaaacggaaaaccatgtgttcaatacacggcgccctgttcaagtgccatcctccattcccgttattgtgctgataaacaagggttccgcctccgcgtcagagattgtcgccggagcgttgaaggacaggggaagggccttccttgtcggggaaaaatcctacggcaaaggttccgtgcagcaggtgtatcccctggataccgcgggtttcaagatcaccaccgcccgctactatacgcccagtgatgtaaatatcgacaagatcggcataccgccggatcgtctggtcaagttccccgagttcaccgacgcggacgcggagaaactcaatacgctgataaaagacagtaagataccgtcctttgtcaaagacaatcccaaggcaacgcctgcccagttcgaagattttgccaagtcccttgaaaaagattataaacttgatttctcgttgctcaaacgccttatacgcaacgagcaaaaccgcactaccattgccccggttttcgatcttgagtacgacgtgcagctacaggaagcggtgaacatccttaaaagcggcgaataccggacccttatgcagactactaaaacgttacgggctttacaggaagaagcgtccaaggatggggatctggctcacgcatcttag

SEQ ID NO: 49826 - protein, 513 aa, Unknown
  Obtained from environmental sample
  DOMAIN (117)...(203): PDZ domain (Also known as DHR or GLGF)
  misc_feature (1)..(513): Xaa is any amino acid
MNDNGFPDKNMPSERRIPFSWLWFASTLLLCAVFAFASVPGVLAQVREGGTQTTGQADSVQRNRRYTETIQQVFNFIQRHYVEEVDSKVIFEGAMTGIFNALGDPYSAFLPESEMKDLNDTTSGQFGGVGLYITKPAGNRSDGKPPYVEVASPIEDTPGWRAGINPGDLIISINGELTDKLTTDEVVGRLRGPPGIVINLVIQREEKLEFPVSLTRAIIEVPTAKHAMIGDIGYLKLLTFTPMTVERAANAISDFKAQNYKGVILDLRNNYGGLLNSAIDVSSLFLESGVVVSTKSRIETENHVFNTRRPVQVPSSIPVIVLINKGSASASEIVAGALKDRGRAFLVGEKSYGKGSVQQVYPLDTAGFKITTARYYTPSDVNIDKIGIPPDRLVKFPEFTDADAEKLNTLIKDSKIPSFVKDNPKATPAQFEDFAKSLEKDYKLDFSLLKRLIRNEQNRTTIAPVFDLEYDVQLQEAVNILKSGEYRTLMQTTKTLRALQEEASKDGDLAHAS

SEQ ID NO: 49827 - DNA, 870 bp, Unknown
  Obtained from environmental sample
  misc_feature (1)..(870): n is a, c, g, or t
gtgtacggcgacaaatatatgaaaaaggggctgaggataggcgatttgcaggataccaaaaccctgaaacaaaagctgaccgacatcatcgaatggaaaaatattacgcttaacggatactccggcgccgcgggggtgaatgttaataatatttttaactggctggacgaattcggcacgccgctttatccgtttatcacggatacgacggattatctgtactcggccataaaagcaaaaaaggatatcctgttcgaggcgcagctcggcgcgttacgcgacattgattacggcatatacccatacaccacctcgtcccagactatcgccgcctacgcgaccgcgggcgcggggattccgggcatgaaactggacagcgtaatcggcataatgaaggcgtattcaagctgcgtgggagaggggcccttcaccgttgaaatgtccggcgaagaggccgccgctttacgcgaggcgggggccgaatacggcgcggcgaccggaagaccgcgcagagtcggcgcgtttgacgtacccgcgagccattacggggtgaagattcagggggcggacgaactcgcgcttacaaaactggacgttctttcatacctagaaaaaattcccgtctgcacagaatacgaaattgacggggtaaaaactactcgtttcccgtcaggcagtgcgcttgcaagagcaaagcctgtgtatcaatatatggaaggttttaaaacagacgtatccaaatgccgtaaagcggaagatttaccggatgcggctatcaagtatattcggtttattgagaaagcggttggctgcccaattagatatgtctccgttggcgctgggcgcgatgattatttggtattaagatag

SEQ ID NO: 49828 - protein, 289 aa, Unknown
  Obtained from environmental sample
  DOMAIN (2)...(287): Adenylosuccinate synthetase
  misc_feature (1)..(289): Xaa is any amino acid
MYGDKYMKKGLRIGDLQDTKTLKQKLTDIIEWKNITLNGYSGAAGVNVNNIFNWLDEFGTPLYPFITDTTDYLYSAIKAKKDILFEAQLGALRDIDYGIYPYTTSSQTIAAYATAGAGIPGMKLDSVIGIMKAYSSCVGEGPFTVEMSGEEAAALREAGAEYGAATGRPRRVGAFDVPASHYGVKIQGADELALTKLDVLSYLEKIPVCTEYEIDGVKTTRFPSGSALARAKPVYQYMEGFKTDVSKCRKAEDLPDAAIKYIRFIEKAVGCPIRYVSVGAGRDDYLVLR

SEQ ID NO: 49829 - DNA, 660 bp, Unknown
  Obtained from environmental sample
  misc_feature (1)..(660): n is a, c, g, or t
ttgagcattcgaaaaatagacaaggtatgcctaattcaattggaaatgtcaataaattggataaaantattatacggttttgatccaatagctgtgttgcaagaatttaaaaattgggaattattatttgactatataaatgaaaattataaaacacctggaagaatggaaaaaaataacagtcataattattgggttatattttgcaaatcaattatatcaatcgcaaattatttatcaaaattcaataatatagatgattttaataaatatgtatttcaatttataaatagtaactcggatataaggttatctttaccattaattttaaaagaggaaatatttggttatcaatttgcattatcttgtgatttcattaaagaaaatatatctcctgaatttattaaacctgatgttcatataagagatatttttgttggaattggaatttcatatgataatacaacagactatcaattgtttagagatgtaataaatttttctgaatcaatttcagaaataccttatactgtagataaattattttggctaattggaagtggtaatttttacaattataatattaaaataaataccaataagaagttatttatagaacaaattagaagtaaaatgggaacagcacataacaaacggtaa

SEQ ID NO: 49830 - protein, 219 aa, Unknown
  Obtained from environmental sample
  misc_feature (1)..(219): Xaa is any amino acid
MSIRKIDKVCLIQLEMSINWIKXLYGFDPIAVLQEFKNWELLFDYINENYKTPGRMEKNNSHNYWVIFCKSIISIANYLSKFNNIDDFNKYVFQFINSNSDIRLSLPLILKEEIFGYQFALSCDFIKENISPEFIKPDVHIRDIFVGIGISYDNTTDYQLFRDVINFSESISEIPYTVDKLFWLIGSGNFYNYNIKINTNKKLFIEQIRSKMGTAHNKR

SEQ ID NO: 49831 - DNA, 357 bp, Unknown
  Obtained from environmental sample
  misc_feature (1)..(357): n is a, c, g, or t
atgcagaataatcgcaccgaacgtctgggcggcctgattcaggaaattatcagcggtcttattcttgaaagcagaatcaaagacccgagaatctcgcagtttgtctcgataacaagggtaaatgtcacgcgcgatctttcatacgccgacgtatatgtctccaacatccgggaaacggcgaaccttgaacgcaacgcgcaggggcttcaaagcgccgccggttttatccaggcccatcttggcagtgccttaaaaatacggaaaatcccccatctgcgcttccacgccgacaccagcatccgggatggttttaacatggtacagaagcttgaacaattggcaaataacatccaataa

SEQ ID NO: 49832 - protein, 118 aa, Unknown
  Obtained from environmental sample
  DOMAIN (5)...(110): Ribosome-binding factor A
  misc_feature (1)..(118): Xaa is any amino acid
MQNNRTERLGGLIQEIISGLILESRIKDPRISQFVSITRVNVTRDLSYADVYVSNIRETANLERNAQGLQSAAGFIQAHLGSALKIRKIPHLRFHADTSIRDGFNMVQKLEQLANNIQ

SEQ ID NO: 49833 - DNA, 369 bp, Unknown
  Obtained from environmental sample
  misc_feature (1)..(369): n is a, c, g, or t
atgagaaggatatcaagcgacatgccgaattcagactcgcagttttatttgaggcgtcaggaagaaagagtaaataacatcgagaatcaaatcggtacgaataacaggattcacaggttaagagacgatcctcttgccgcgtcccacgccgtaaggtatgaatcgtatcttgcgcgtcttaaccgctttgaggaaaacacaaaaaaagcaaaagaacatcttgataccgctcatgactatttatacgaaactacaaatattctgcatagagtaagagacctcgcccttcaaggcgctaacggaagtaattctcctgatgaacttaaaataatggcgatggaagtaaacgagcttttaaaagaactgtaa

SEQ ID NO: 49834 - protein, 122 aa, Unknown
  Obtained from environmental sample
  misc_feature (1)..(122): Xaa is any amino acid
MRRISSDMPNSDSQFYLRRQEERVNNIENQIGTNNRIHRLRDDPLAASHAVRYESYLARLNRFEENTKKAKEHLDTAHDYLYETTNILHRVRDLALQGANGSNSPDELKIMAMEVNELLKEL

SEQ ID NO: 49835 - DNA, 1875 bp, Unknown
  Obtained from environmental sample
  misc_feature (1)..(1875): n is a, c, g, or t
atgggattggaaatcggtaaaaggggtatgtttgcccatcagcaggcgcaggctgtaatagggcataaccttgataacatggctacggaaggatattcacgccagaggattgagatagttcagtctgaaccgatttacatgccgggtcttaaccgggcccttactccgggtcagataggccagggcgcatctgtagagcgtattgaacgcatccgcgatgagcttttggacaaaagaattgtcgcggaagcatcgagcgaaggttactggactgtgcgggaacgatatgttaaagagatggggcaattctaccttgagaccgggccgaattccgtaagaagtaaaatggacagtttctgggtaggttgggacgagctttcgcagaatgccgcggatatggaagccagaaccgccgttcttcagcgcggaaaaaccttaatcgacggtattcataaccattttaacaatttaaaaagacttcaaactcaggctgatgaagacatacagataaatgtagaaagagtaaacgatatatcccgtcagatagctcttcttaacaaggatataacccgaattaaagcgctcggagacaatcccaatgatcttatggacagacgcgatctgttagttgataaactttcttcaataattgaagtaaccgtaagccagttggatcatgacgagtttatggtacatacttcagggcatatactgatacaggggcagcaagcgcgccagtttgatatgcgtaaagatatggacacagaaggttacgcgcatatcttctggcatgatacaaaagatgaaatggtttttgcaagaggaagtcttggcgctctcatggaattgcgcgacgtaacaatccagaatgaaatccaaactcttgataacgtggtaatgaattttacagaccttgtaaatgaaattcaccgaggcgcttacggcgcgaacggctctacaggcattaatttcttttccgaatatccgtttgttaccaatgttaacggaaattatgaccgttcaggcgacggagttttcgattcaagttatgtataccgtattaacgggcagaatacccttgagccgaacgctcagcccggttttgagggaacaataactctctcaggagccgacagacaggtagaagtgccgtattatacaacagataccgtaaacgacattataacccgcattaacaattcaggcgcggaagttgtagcccgtcttaacagagaaggtaaaatttcgttaaaaggcacaactgcggaattaattaacggacagagagttaaccccgattttgttatacgtcatgttgaagattccggtctcttccttgctgggtacgccggtttgcttaatcaatcgggagcggaaggtgcttatgactggggtcgcgcggacgcggtaacaagtcttagaggtgatacaaccgattacgcgcttgccccaatcgcgcatccgtccggctggatagaagttaatcctatgttgctcagagattcgacaaatgtcgccgcaggtttcggcgagaacggaagggtcgcgaatcccggaaacggagaagcggcggcagctatcgcttccatacgaaacaatccggtaatggtgggacgatttgcgacatttgacgattacttcgcgaactcggtgggaaaaatcgcgttaatgggcgaagaatcggaaagagcgctggctacggaaaaccagataatgaaatatttacgcgattggagacagtcaatttccggcgtaaatatggacgaagaacttgccaatatgcttagatttcagcacggttacaacgccgcggcaagatatatcacaacagtcaattcaatgttggatacattaatcaaccgcatgggcgtatag

SEQ ID NO: 49836 - protein, 624 aa, Unknown
  Obtained from environmental sample
  DOMAIN (3)...(33): Flagella basal body rod protein
  misc_feature (1)..(624): Xaa is any amino acid
MGLEIGKRGMFAHQQAQAVIGHNLDNMATEGYSRQRIEIVQSEPIYMPGLNRALTPGQIGQGASVERIERIRDELLDKRIVAEASSEGYWTVRERYVKEMGQFYLETGPNSVRSKMDSFWVGWDELSQNAADMEARTAVLQRGKTLIDGIHNHFNNLKRLQTQADEDIQINVERVNDISRQIALLNKDITRIKALGDNPNDLMDRRDLLVDKLSSIIEVTVSQLDHDEFMVHTSGHILIQGQQARQFDMRKDMDTEGYAHIFWHDTKDEMVFARGSLGALMELRDVTIQNEIQTLDNVVMNFTDLVNEIHRGAYGANGSTGINFFSEYPFVTNVNGNYDRSGDGVFDSSYVYRINGQNTLEPNAQPGFEGTITLSGADRQVEVPYYTTDTVNDIITRINNSGAEVVARLNREGKISLKGTTAELINGQRVNPDFVIRHVEDSGLFLAGYAGLLNQSGAEGAYDWGRADAVTSLRGDTTDYALAPIAHPSGWIEVNPMLLRDSTNVAAGFGENGRVANPGNGEAAAAIASIRNNPVMVGRFATFDDYFANSVGKIALMGEESERALATENQIMKYLRDWRQSISGVNMDEELANMLRFQHGYNAAARYITTVNSMLDTLINRMGV

SEQ ID NO: 49837 - DNA, 714 bp, Unknown
  Obtained from environmental sample
  misc_feature (1)..(714): n is a, c, g, or t
ttgctgcccggcatcgccaaactgccaagccccataaaaccggcgcgaaacgacattattatttttgaaaacccctcatacatttcaagagggccggtgttcgacgtggcccagcggataatttttatgcttaccatttcgctcgtggacatagacagggacgaggcgggacagccccgcgcccactttttaatcaaacgggcggtcgggatgcccggcgaccgttttatcatggaaaaaggcgagatgaaaatccgctttacgggggatgaccgctggacggacgagagggagtacgcggcggcgcgggggtggaagcacaatatcagccgcctgatggaaaaagataaataccggacgctggaagctgcgggaagggccgccgcctggcaggatctcggcctgtcagttccggaacgcatgcggaacgccatgtctctcgcgggcaacatccattatcccgattacctcgcccatgaaagggccaggcttgaaaccctgcgctgcgccatgcccaatgaccgccgttatgcgacactgttggcgagacattcgctcggctggtatgtgccggagggcaggctgcttccccttggcgacaatcgggacaattcgcgcgacgggcggtacttcggccccgtgcggctttcaaaagtgctgggcaaaggctccgcgattttctggcccctcggacggatagggtttatccgctag

SEQ ID NO: 49838 - protein, 237 aa, Unknown
  Obtained from environmental sample
  misc_feature (1)..(237): Xaa is any amino acid
MLPGIAKLPSPIKPARNDIIIFENPSYISRGPVFDVAQRIIFMLTISLVDIDRDEAGQPRAHFLIKRAVGMPGDRFIMEKGEMKIRFTGDDRWTDEREYAAARGWKHNISRLMEKDKYRTLEAAGRAAAWQDLGLSVPERMRNAMSLAGNIHYPDYLAHERARLETLRCAMPNDRRYATLLARHSLGWYVPEGRLLPLGDNRDNSRDGRYFGPVRLSKVLGKGSAIFWPLGRIGFIR

SEQ ID NO: 49839 - DNA, 1347 bp, Unknown
  Obtained from environmental sample
  misc_feature (1)..(1347): n is a, c, g, or t
atgtcaatgtttgacaaagcgttgaaatattcatacgccgaacaaaaaagggaacgccacaggctgctgcgcgttatcatgacatttctgttcttgttcctgctgtataacgtaataaacgcttttttcgtctcggtctgggtcctggataacgacacaatggagcccggactgcgcgccggagaccgctttattgtgtactcgtctttcctgcctttcgttatttccaggatcaataaaaccggcggggcgggcaggtttgggtcccctttcaagcgcggatccatagtattgattgatacaaggcgcggcgagaaccggaactggcctttaataacggccgacagctttgtccggttcgtcacggcccaacagaaagaaatcctgaacccggatgagcacctgtatgtaaaacggatcatcgccattcccggcgacgagatcagcatgaacaattttgtcttcagggtgaagccggcgggcaatatgtacgtttttaccgaatttgaactttccgaccgcccctattaccccaacataccccaggtgcccgccctttgggatgagacgcttcccttttcgggatacatggacagcataacgctcggccccggcgagtattttgttgtctcggatgacagaagcaattcgggcgactcgcgcacatgggggccggttaacgcgaaaaaattactgggaaagcccgtattcncggttttggcccatccagcgaatcggccggccatgacagcttcactgtacgtccacgttcctttctgcccgaaaaaatgcgattactgcgatttctattcggttccggttacgcctaatcaaggcgctcagcccctgatggatccgtatatcgacgccgtgtcagtcgacattgcggaccagataaaatttttcaacgtaaacaacataccgagcgtctacataggcggcgggaccccttccgtactcggcgcgaagcgcataacgcgtctgctggcctcgattaaaacgctgttatcaaacatgagcgcgccgccggtcgaatttaccgtggaagcaaaccccgaatcagccgacgaggctttcctgcaggcctgcgttgaaggcggcgtcggcagaataagcctcggcgtacagagcttctgtgaagcgtcacgaaaagccgcgcgcaggcagggaagcattacgcggctcgaagacgatcttgcccttgtcgcgcggtattatccggactctttttccgccgaacttatcaccggccctccccttccagacaaggacgttattacgcaagacatcaagcgtctgctgtcttttcgtccggcccatgtttccctgtacagccttatcctttga

SEQ ID NO: 49840 - protein, 448 aa, Unknown
  Obtained from environmental sample
  DOMAIN (254)...(430): Radical SAM superfamily
  misc_feature (1)..(448): Xaa is any amino acid
MSMFDKALKYSYAEQKRERHRLLRVIMTFLFLFLLYNVINAFFVSVWVLDNDTMEPGLRAGDRFIVYSSFLPFVISRINKTGGAGRFGSPFKRGSIVLIDTRRGENRNWPLITADSFVRFVTAQQKEILNPDEHLYVKRIIAIPGDEISMNNFVFRVKPAGNMYVFTEFELSDRPYYPNIPQVPALWDETLPFSGYMDSITLGPGEYFVVSDDRSNSGDSRTWGPVNAKKLLGKPVFXVLAHPANRPAMTASLYVHVPFCPKKCDYCDFYSVPVTPNQGAQPLMDPYIDAVSVDIADQIKFFNVNNIPSVYIGGGTPSVLGAKRITRLLASIKTLLSNMSAPPVEFTVEANPESADEAFLQACVEGGVGRISLGVQSFCEASRKAARRQGSITRLEDDLALVARYYPDSFSAELITGPPLPDKDVITQDIKRLLSFRPAHVSLYSLIL

SEQ ID NO: 49841 - DNA, 558 bp, Unknown
  Obtained from environmental sample
  misc_feature (1)..(558): n is a, c, g, or t
gtgttctgcaacaaactcagcattaaggaaaatttaaagcccgtgtatagcataaatggcagcgttaatcctgatgattggggagatccccccgaaagaagaagaaattcggcatgggacgcggtgagaatggacagggaagccaacggttaccgcctgcctacagaggctgaatgggaatacgcggcgcggggcggagcggaatccagaaattttatttacgcgggaagcaatgtcgctgctgaagtggcctggtatgaacccagcaaggatggcaagattaacggcaatgtccacggagtcgggaacaaacaacccaacgaacttggcctgtacgacatgagcggcaacgtaatggaatggtgctgggactggctggacaaatatccttcaaccgcgcagaacaatcctgtggggccggctacgggcaatctcaagataataaggggcggcagttggtcgaccagggaagctttctgcgtggttcaagcccgctataaaaacgatccccagacccatgccattaacctcggtttcagggtagccaggaataaatag

SEQ ID NO: 49842 - protein, 185 aa, Unknown
  Obtained from environmental sample
  DOMAIN (11)...(183): Domain of unknown function (DUF323)
  misc_feature (1)..(185): Xaa is any amino acid
MFCNKLSIKENLKPVYSINGSVNPDDWGDPPERRRNSAWDAVRMDREANGYRLPTEAEWEYAARGGAESRNFIYAGSNVAAEVAWYEPSKDGKINGNVHGVGNKQPNELGLYDMSGNVMEWCWDWLDKYPSTAQNNPVGPATGNLKIIRGGSWSTREAFCVVQARYKNDPQTHAINLGFRVARNK

SEQ ID NO: 49843 - DNA, 1320 bp, Unknown
  Obtained from environmental sample
  misc_feature (1)..(1320): n is a, c, g, or t
ttgacgcccgccgcattcatacgcggatacccatggaaaacaccgactggttcaactacggcggtatctaccgcgacgtttaccttgtccgcgttccgccnggtttttataaaagactggtttgtcaggcttgcgcctgacggaacctattcgacaattttggcggacgttaccgttgcaagcgcagttaatgatcgagcgcaagcgaatggcacagcgtgtcttcaaattcctgggctttcaataaagcaggaaattgctatcagggacggaaagggcgaggcaaaaattcccgccaagccggaactctggagtacggataaccccaaactctacgatgtctccatttcttttggctcaggcggtgctactgacacggtaaatgaccgtatcggcttcagggaaataaaagccaatgggcatgaaattacccttaacggcaaaaaaatattcctgagcggcgtttgcgttcacgaagaccatttcatcctgggaaaaacaaccacagaggaaatcatccggcagaccatccgtgaccttaaagcgatgaacggaatatatctcaggcttgcgcattatccccatgacgcgcgctttgccaggatagcggacgaagagggtgttctgctctgggaagaagtgccggtttattggtctgttgcctttgataatcccgatacctacgcagacgcggagaatcaactgagcgagctggtactgagggatcgcaaccgggcaagcgttataatttggtcggtaggcaacgaaaacgcggatatcgattcaaggcttgcctttatgtcgaagttggcgcaaaaggcgaaagccctggacagttcgcggcttgtttcggcggcctgccttatcaaccacgagaagcttctaattcaggatcgccttgctgattttcttgacgtgattggaatcaacgaatattacggctggtatagtccgaattttgatcacctgccgaagatactcgcgaattccaatcccggaaaacccgtgcttgtctgcgaattcggcgcggacgcccgcctgggacagcggggaagcgtggacgagctttggactgaagacaaacaaaaacggctttatgaacagcaagtagaaactttcaggaagtgcccctacatagccggcacgactccctggatactgtacgatttccgctgccccaggcgccctcaccgttaccaggaggggctttaccgaaagggccttatcgacgccgagcggaaaaccaaaaaagcccgcgttttatgtaatgcagaaattctacgaggagatgaatcaataaaccatgggattttcaattaa

SEQ ID NO: 49844 - protein, 439 aa, Unknown
  Obtained from environmental sample
  DOMAIN (136)...(431): Glycosyl hydrolases family 2, TIM barrel domain
  misc_feature (1)..(439): Xaa is any amino acid
MTPAAFIRGYPWKTPTGSTTAVSTATFTLSAFRXVFIKDWFVRLAPDGTYSTILADVTVASAVNDRAQANGTACLQIPGLSIKQEIAIRDGKGEAKIPAKPELWSTDNPKLYDVSISFGSGGATDTVNDRIGFREIKANGHEITLNGKKIFLSGVCVHEDHFILGKTTTEEIIRQTIRDLKAMNGIYLRLAHYPHDARFARIADEEGVLLWEEVPVYWSVAFDNPDTYADAENQLSELVLRDRNRASVIIWSVGNENADIDSRLAFMSKLAQKAKALDSSRLVSAACLINHEKLLIQDRLADFLDVIGINEYYGWYSPNFDHLPKILANSNPGKPVLVCEFGADARLGQRGSVDELWTEDKQKRLYEQQVETFRKCPYIAGTTPWILYDFRCPRRPHRYQEGLYRKGLIDAERKTKKARVLCNAEILRGDESINHGIFN

SEQ ID NO: 49845 - DNA, 687 bp, Unknown
  Obtained from environmental sample
  misc_feature (1)..(687): n is a, c, g, or t
ttgtccggtgaagatattaactggtggactaacggtttttggccggggatgctttggcagatgtaccatgctacgaaagatgttatgtaccaaaaaaacgccgaggctgtggaaaaacggctggataaagcgctggagggctttgaagggctgcatcacgatgtgggctttatgtggctccacacggcggcagcgaactaccgtctttctggcggcgcagattcccgccgccgggctctcctcgccgctaacattcttgcgggccgctacaacccggccggcaaatttatccgcgcctggaacggcgaaggccgggccggatggatcattatcgatacattgatgaacctccctttgctttattgggcctcaaaagaaaccggcgatccccgttattcgcaaatagcccagtgtcacgccgataccgcgatgaacctcattgcccgtccggacggaagctgcaatcacatcgccatactttcgcctgaaacaggcgagcgccttgaaacccccggagggcaaggctacgcgcccggttcttcatggagccgcggtcagagctgggctgtatatggttttgccctaagctttcgccacaccgggcaggttaagtatctggacgccgccnagcgaacggcacactatgttattccaatttggctgttaacaactggcttccgctggtga

SEQ ID NO: 49846 - protein, 228 aa, Unknown
  Obtained from environmental sample
  DOMAIN (1)...(228): Glycosyl Hydrolase Family 88
  misc_feature (1)..(228): Xaa is any amino acid
MSGEDINWWTNGFWPGMLWQMYHATKDVMYQKNAEAVEKRLDKALEGFEGLHHDVGFMWLHTAAANYRLSGGADSRRRALLAANILAGRYNPAGKFIRAWNGEGRAGWIIIDTLMNLPLLYWASKETGDPRYSQIAQCHADTAMNLIARPDGSCNHIAILSPETGERLETPGGQGYAPGSSWSRGQSWAVYGFALSFRHTGQVKYLDAAXRTAHYVIPIWLLTTGFRW

SEQ ID NO: 49847 - DNA, 384 bp, Unknown
  Obtained from environmental sample
  misc_feature (1)..(384): n is a, c, g, or t
atgcgctttaacccgcaagacggtatcgtaagcacggctatcgacctattcctacaaattaagagggcatttatggccgcagtacggatggattcgcttatcaagtctatagccacggcgttagatatcgtggagggcgaccttttgggggccagcaccaatcatggtaagcgaattgccgttctttgcgccaagatgggaaacgtcttgcaaaaaagtccggaggagatcaccgccctcgcggtttgcgccatgttgcatgatagcgcgctcaccgagtatattctttccgagcagataggcggataccgcgatccggccatgaagaaacactgcgagttcggccagcggaatgtggacgccctgcatttaaaacgaacgtaa

SEQ ID NO: 49848 - protein, 127 aa, Unknown
  Obtained from environmental sample
  misc_feature (1)..(127): Xaa is any amino acid
MRFNPQDGIVSTAIDLFLQIKRAFMAAVRMDSLIKSIATALDIVEGDLLGASTNHGKRIAVLCAKMGNVLQKSPEEITALAVCAMLHDSALTEYILSEQIGGYRDPAMKKHCEFGQRNVDALHLKRT

SEQ ID NO: 49849 - DNA, 777 bp, Unknown
  Obtained from environmental sample
  misc_feature (1)..(777): n is a, c, g, or t
ttggaacctgaagatctgcccgccatccgagagataatcgtcaaagaatcaggaaagcgctacggccggaaagcggcggaggtgatgttggagatccttgattggcctacggtcatatccctaaacgaccgagtcatcaaacaaaccgcgtcggaggtcttgtccccttggaccgtcgacatagaaacagacacgatattcggattagccggattcgccgccaagatcatcgactacaagtcggtcttcacccaaaagcactcgacccagatagccaataaagcgtggtttatgggtaaacactacaaacacgatccgcaaacattggcggaactgtatttagcggcgtccctgcatgatctcggcaaattggcggttccctccgatattctggaaaagcccggcaaacttaccggcgaagaattcgacatcatcaaggagcacgtccgcctgacatgggaacttcttaaagatatcgaggggttcgaaacgatatgccgatgggcctgcaatcaccatgagaaattggacggcagcggctacccgttcgggagaaaagccgatgaactggacttcaattccagactattggcctgcttagacctatatcaggcgataagcgaggaaagaccctaccacccggggcgtaatcacgccgacaccatgaagatactctatgaaatggccgatgcggggaagatagacagggatatcgccaatgacctaaacgtcgtccttgccccatacgacgggaaggatctgccgccgccggattga

SEQ ID NO: 49850 - protein, 258 aa, Unknown
  Obtained from environmental sample
  DOMAIN (84)...(206): HD domain
  misc_feature (1)..(258): Xaa is any amino acid
MEPEDLPAIREIIVKESGKRYGRKAAEVMLEILDWPTVISLNDRVIKQTASEVLSPWTVDIETDTIFGLAGFAAKIIDYKSVFTQKHSTQIANKAWFMGKHYKHDPQTLAELYLAASLHDLGKLAVPSDILEKPGKLTGEEFDIIKEHVRLTWELLKDIEGFETICRWACNHHEKLDGSGYPFGRKADELDFNSRLLACLDLYQAISEERPYHPGRNHADTMKILYEMADAGKIDRDIANDLNVVLAPYDGKDLPPPD

SEQ ID NO: 49851 - DNA, 1218 bp, Unknown
  Obtained from environmental sample
  misc_feature (1)..(1218): n is a, c, g, or t
ttgtccgtaatcgaagcggtgttagtatccacgtcanncttacgaaccaaaacccncaaggcggnntgccgcccccctttactccctacttcctactccctattccctttgctctttgctctctgctctctgctctctgttaacgcttcccccctccattccacaacctggggcttcaggctcgatctgccggaaggctatgaatatgtggaagggaacaatcaggaccgttattcgttccaggggccgaacaaggccatgttcgatctcgtcgtgtacaacgggacttatcaggatgtcgagcagatggcaaacgacatcaagcgccggctgggcagttcgggcgaaacggctttatttgaatatgaaggcaagacggcggccttattggatctgcatttcagggatttttcgggatggggcctctgcatggaactcgcgaaaaacgctgcgggttcaaaaactcctttcctgtgcgcgctggcctattcgccctcctccggggcggacatggatctgttccatatatcggcccttgattccatcgcgccttccgatctggaagcgcgccgtcccgggcctgtcatggaattcggctatcctcgcggggagacggtagaaacccccattaagggcacaactataagcgcgttgctccgggaaaacgacgccgaggcggcccaggcgctggtggacagggaattcgctctgctgcgccagtatgaagccgcccccaactggcagcaggcatggatacgcttttaccgggcaatttaccgggattcatgggacaggatagccaacgcgcttttccggcttgaacgcgaatggaacacggacgcggggctggacggaaggacgttcgccgggaaagcccttgcctttgtgcagggcttcagttacgagcgggaccttgaaggcagcgactttgtcaatctggtgacagccgtcagcgagggcaggggagactgcgacagccgctcaatgctctgggccatgatcctggagcaggcggacatccccgcaggcattatggtatcccgcaaccacagccacgcgatgggcctcgcggacgttcccggcgcgggcgcgcgctttgaggcgggggggaagaaatggctggtggccgaaaccaccgacaaggtgggcatcgggcttatagactcaggcaagagcgatatcgcgtcatggctgggagtgattttcaatgtcccataa

SEQ ID NO: 49852 - protein, 405 aa, Unknown
  Obtained from environmental sample
  misc_feature (1)..(405): Xaa is any amino acid
MSVIEAVLVSTSXLRTKTXKAXCRPPLLPTSYSLFPLLFALCSLLSVNASPLHSTTWGFRLDLPEGYEYVEGNNQDRYSFQGPNKAMFDLVVYNGTYQDVEQMANDIKRRLGSSGETALFEYEGKTAALLDLHFRDFSGWGLCMELAKNAAGSKTPFLCALAYSPSSGADMDLFHISALDSIAPSDLEARRPGPVMEFGYPRGETVETPIKGTTISALLRENDAEAAQALVDREFALLRQYEAAPNWQQAWIRFYRAIYRDSWDRIANALFRLEREWNTDAGLDGRTFAGKALAFVQGFSYERDLEGSDFVNLVTAVSEGRGDCDSRSMLWAMILEQADIPAGIMVSRNHSHAMGLADVPGAGARFEAGGKKWLVAETTDKVGIGLIDSGKSDIASWLGVIFNVP

SEQ ID NO: 49853 - DNA, 516 bp, Unknown
  Obtained from environmental sample
  misc_feature (1)..(516): n is a, c, g, or t
atgaataaggcacagcaggcaagaaccgccgagctgaagctcgtaatcgccacacaaccggctttcctctattggcggcaagaaccgcaggcttatttggatgatattttgggtaaggcgcgctcacattccgtcatgccgctgaaaagctgggtggataagggtatcatcgttacggccggttccgatgccccctgtacaatccccgacccaatccgtgggattcactatgcctgcaaccaccccaacccggatgaaagcctttccccgctggatgcgctgcgcatgcatactgcctgggcggcgtacagttccttcgatgaaaacaaccggggtaccttgcgcgagggcctgttatgcgatttcgtggcgcttagtgacaatccccttgccataccggttgaaaagctggatacgctggtgattgacgcggtgtacttccggggcaagcggtatgaaccaaagaagcggggtttggcggcgcttctttggaaagcaattgcagggcggagataa

SEQ ID NO: 49854 - protein, 171 aa, Unknown
  Obtained from environmental sample
  misc_feature (1)..(171): Xaa is any amino acid
MNKAQQARTAELKLVIATQPAFLYWRQEPQAYLDDILGKARSHSVMPLKSWVDKGIIVTAGSDAPCTIPDPIRGIHYACNHPNPDESLSPLDALRMHTAWAAYSSFDENNRGTLREGLLCDFVALSDNPLAIPVEKLDTLVIDAVYFRGKRYEPKKRGLAALLWKAIAGRR

SEQ ID NO: 49855 - DNA, 420 bp, Unknown
  Obtained from environmental sample
  misc_feature (1)..(420): n is a, c, g, or t
atgtccgctttatttaactttgaggttcatacgctaaggcgtattttttattccggcaaagtgcaggcaatcataatcagtcttgaagacggcgaaatcggaatatacgcaaaccattccccctttaccgcgcactccgttacaggcatactccgcattaaagacgagagcggcaactggcgctcagcatttgtctgcggcggcgttctggaagtgaaagaacacaaaaacgtactaatggcagataacgccgaatggccggaagaaatcgacaaggagaaggttcttgagatcaaaaagcaggccgaggaaacattgaaaaactcgcagttaaaatttgagattgacaaagcgaaaaagaaactgcaccacgccgaatgcagattgaaagttttggaacaggaaaaaaagaaaaaataa

SEQ ID NO: 49856 - protein, 139 aa, Unknown
  Obtained from environmental sample
  DOMAIN (4)...(86): ATP synthase, Delta/Epsilon chain, beta-sandwich domain
  misc_feature (1)..(139): Xaa is any amino acid
MSALFNFEVHTLRRIFYSGKVQAIIISLEDGEIGIYANHSPFTAHSVTGILRIKDESGNWRSAFVCGGVLEVKEHKNVLMADNAEWPEEIDKEKVLEIKKQAEETLKNSQLKFEIDKAKKKLHHAECRLKVLEQEKKKK

SEQ ID NO: 49857 - DNA, 666 bp, Unknown
  Obtained from environmental sample
  misc_feature (1)..(666): n is a, c, g, or t
gtgcttctttttatcgacaatatcttccgttttattcaggcgggcgcggaagtttccgctcttcttggacgtatcccgagcgcggtcggttatcagccgactcttgctaacgagatgggcagtcttcaggagcgcatcgccagtacatcaaaaggatcaattaccagtattcaggcggtatatgttcccgccgacgaccttaccgatcccgctccggcgacaacattcgcccatttggatgcgaccatcacgctttcacgtaaaattgtagagttgggaatatacccgtctgttgatcctcttacttcaagctcccggattcttgatgcggcgatagtaggcgaagatcactacaacacagcccgcagagcgcagcagattttacagcgttacaaagaattgcaggatataatcgctattttgggcatggacgagctttccgaagaagacaaacttacggtctcaagagcaagaaagattcaacgattcttcagccagcccttctttgtcggagaaaaatttacaggcattcccggacgttatgtgccggttaaggagaccgttcgcggctttaaaatgatacttgacggcgaatgcgactcaatccccgaacagtctttctacatggcaggcaccattgatgacgttcttgaaaaggtaaaataa

SEQ ID NO: 49858 - protein, 221 aa, Unknown
  Obtained from environmental sample
  DOMAIN (1)...(105): ATP synthase alpha/beta family, nucleotide-binding domain
  misc_feature (1)..(221): Xaa is any amino acid
MLLFIDNIFRFIQAGAEVSALLGRIPSAVGYQPTLANEMGSLQERIASTSKGSITSIQAVYVPADDLTDPAPATTFAHLDATITLSRKIVELGIYPSVDPLTSSSRILDAAIVGEDHYNTARRAQQILQRYKELQDIIAILGMDELSEEDKLTVSRARKIQRFFSQPFFVGEKFTGIPGRYVPVKETVRGFKMILDGECDSIPEQSFYMAGTIDDVLEKVK

SEQ ID NO: 49859 - DNA, 1857 bp, Unknown
  Obtained from environmental sample
  misc_feature (1)..(1857): n is a, c, g, or t
atgtacggccgcctgtattcctgcctgatggatgaaatttttccgggccttgccaagaacggccttaaacttgtcagcccggatacctacaccgtcccgcaaatggactatctggaatctttttttatcagggagatatacccggttctcacccccctgcgtattgaagatgacaagcctctgcctttttttgaaagccgctgcataaacgcagctttccttttaataccggatgacgcttcagccatggatcaggaacgcattgtcatggtgcagctcccctcttcgctcagccggatcgtctggctgcccgccgaagaaggcacgctccgctgggctctgctggacgatataatgcttacatgggggggatacctgttccccggttacaatgtcaaagaaagcatgttattcaaggtgaaccgtgacgctgatttttccgttgacgaacgcagggacgaggatttcattgaggcaatggcggaagtaattgaaggcagggaaaaatcggcgcccgttaacatgatcttttctccgggctcaggcagattaagggacgagttggcaaaacggttttctctggaaaaagatgacctgtacgagcttgaaggccccttccatcccggcggtctggctgaattggcgggtgtcgctggtttcgagcagctgcatgaaaaagcctggaaaatacatccggcccccggctttagcgacgaagtttcgatttgggaccgtttaagtcagggcgacgttctgctccatttcccctaccagtcatttgatcctgtagtccgttttttccaggaagccgcggcggatccccaggttatatcaattaaaaccgcgctttatcgcacgggcggcggcgccggcgcgacccagccggtttcactcattgtgcgggcgcttgaacaggcggcgctcaacggcaagcatgtgacggcgcttgtggagcttaaggcccgctttgacgaggaacgcaacatatcctgggcaaaccgcctggaaaaggccggagtgatagtggtgtacgggctttcacagcttaaagtacacgcgaaggtgacaatggtgctgcgtcgcgaacatgaacgcgtcaggcgttatgtgcatctttccaccggcaattacaatgacaagaccgctaaattgtacgaagacatctgcctttttacctgccgtgaggaaatagcgtatgacgccggattgctgtttaacatgatcacaggctattcgctgaggcaggccatgcggcaccttgtaatcgccccctacagcctgaaaccaaaacttatagaactggtggagcgcgaggcgacgcgtaccaatcaccagtattccggcaagataatgataaagtgcaattccattacagataacaatatgattgacgccctgtaccgcgcttcccgcgcgggggtgaagatattgatatgcgtcagggggatatgcgccctggttccgggcgttcccgggctttccgaaaacatcagggttatcagcgttatagactattaccttgaacactcaagaatctactactttgcaaacggcggagcggaggaactgtatctttccagcgccgaccttatgcaccgcaaccttgaacgccgcgttgaaattatgtttcccgttcaggatgaaaagatacgggctgagcttcttgacatattaaacgcgtatttcctggacaactgtcaggcgagggttcttgattccacgggaacatggaaacaactcagcccggccgagggggaaaagccgttccgcgtccagaaagacatgctttcccgagccgccagagattccgacagccccgtgccggttaagcaggaatttacggtcagaagggcctag

SEQ ID NO: 49860 - protein, 618 aa, Unknown
  Obtained from environmental sample
  DOMAIN (1)...(601): Polyphosphate kinase
  misc_feature (1)..(618): Xaa is any amino acid
MYGRLYSCLMDEIFPGLAKNGLKLVSPDTYTVPQMDYLESFFIREIYPVLTPLRIEDDKPLPFFESRCINAAFLLIPDDASAMDQERIVMVQLPSSLSRIVWLPAEEGTLRWALLDDIMLTWGGYLFPGYNVKESMLFKVNRDADFSVDERRDEDFIEAMAEVIEGREKSAPVNMIFSPGSGRLRDELAKRFSLEKDDLYELEGPFHPGGLAELAGVAGFEQLHEKAWKIHPAPGFSDEVSIWDRLSQGDVLLHFPYQSFDPVVRFFQEAAADPQVISIKTALYRTGGGAGATQPVSLIVRALEQAALNGKHVTALVELKARFDEERNISWANRLEKAGVIVVYGLSQLKVHAKVTMVLRREHERVRRYVHLSTGNYNDKTAKLYEDICLFTCREEIAYDAGLLFNMITGYSLRQAMRHLVIAPYSLKPKLIELVEREATRTNHQYSGKIMIKCNSITDNNMIDALYRASRAGVKILICVRGICALVPGVPGLSENIRVISVIDYYLEHSRIYYFANGGAEELYLSSADLMHRNLERRVEIMFPVQDEKIRAELLDILNAYFLDNCQARVLDSTGTWKQLSPAEGEKPFRVQKDMLSRAARDSDSPVPVKQEFTVRRA

SEQ ID NO: 49861 - DNA, 1005 bp, Unknown
  Obtained from environmental sample
  misc_feature (1)..(1005): n is a, c, g, or t
ttgaaggtcgcttataggctgcttgggctctacggcatcgccgcggacatggtctcgtcgggtcaggaggccattatcgccgttcaaaagaccgcgtacgatttggtgttcatggaccacatgatgcccgaaatgaacggcatacaagccaccgccaagatcagggggttgggcggcaagtatttcaaactccccgtaatcgccctaacggcaaacgcgacgcgcggcgtgcaggagatattcttatcaagcggctttgacgactacatgcccaagcctatagagctgaacaagctctcggagatgctcaggaggtggatacccatagaaaagataggcggcgcgttgaaagacgcgctgtgcctgatagcggaaccggccgacaccggcgtcagcggtttctgggaagagctcggcaaagtcggccccataaacgcggaggtcggcaagaaccgcgtggccggcatggaggagatgtaccgcgagacgttggagattttctacggcaaaacgccgagggagagcaaggcgctgtcggaatatttggaatcaggcgatatgcagaacttcgctatattggcgcacgggatgaagtcgtccctcttgaccataggcgctatgggtttggcggagacagccttggagcttgaaaaggccggaaaggcgggggacaaggagcgttgcgctgaaattacccccggtttcatagaacaactcggcgatttgcacgctaaactgtcgcctatctgccgtcaggaaaataacgacgcgtcggcaaaagcgaagcctaaaggcgacgacgcgctattgaaagagaagctcaaagccgctgaggagttcgcggaggcttacgacggggacaacggggtgaaggctgtggaggctgtgatggggtacgattacggcgaggagacgaacgggaggttgaaggatgttcggacggcgttcaagtgctatgattttgaggaggtgaagaggttgttggggttgatgttgtctatttga

SEQ ID NO: 49862 - protein, 334 aa, Unknown
  Obtained from environmental sample
  DOMAIN (162)...(245): Hpt domain
  misc_feature (1)..(334): Xaa is any amino acid
MKVAYRLLGLYGIAADMVSSGQEAIIAVQKTAYDLVFMDHMMPEMNGIQATAKIRGLGGKYFKLPVIALTANATRGVQEIFLSSGFDDYMPKPIELNKLSEMLRRWIPIEKIGGALKDALCLIAEPADTGVSGFWEELGKVGPINAEVGKNRVAGMEEMYRETLEIFYGKTPRESKALSEYLESGDMQNFAILAHGMKSSLLTIGAMGLAETALELEKAGKAGDKERCAEITPGFIEQLGDLHAKLSPICRQENNDASAKAKPKGDDALLKEKLKAAEEFAEAYDGDNGVKAVEAVMGYDYGEETNGRLKDVRTAFKCYDFEEVKRLLGLMLSI

SEQ ID NO: 49863 - DNA, 387 bp, Unknown
  Obtained from environmental sample
  misc_feature (1)..(387): n is a, c, g, or t
atgcgctcctctattgagactctgtccgcggaaagtgaaaaagcaaataacgctctggaaaaaatctccgttcttgacgattctttggcgcaaattgaggaacgcatcgagaaaatgaacgtcgcgcgcgaatggcttgggcgcgttgaaacggaattaaatactttggacaagagtatccgcgaccaattaaaactgaccaaagccctggttgataaagaaggcaaaaaaacacaaacggaaagcaagggcagtccgcctccgcagatacgcgaaaatgttttaaggctaaagagacaaggctggacaaccgatcaaatcgcaaaaacattggaactttcaaaaggcgaagttgagctgatactggaagttactccccgcgaataa

SEQ ID NO: 49864 - protein, 128 aa, Unknown
  Obtained from environmental sample
  misc_feature (1)..(128): Xaa is any amino acid
MRSSIETLSAESEKANNALEKISVLDDSLAQIEERIEKMNVAREWLGRVETELNTLDKSIRDQLKLTKALVDKEGKKTQTESKGSPPPQIRENVLRLKRQGWTTDQIAKTLELSKGEVELILEVTPRE

SEQ ID NO: 49865 - DNA, 909 bp, Unknown
  Obtained from environmental sample
  misc_feature (1)..(909): n is a, c, g, or t
atgagacagcagatggcgtatatctcccggtggccggccttcggcatcaccgccgagatcgcggaaaaactcaccaagataagccccgcgtccatagaccggtatctcaaaaaagacaaggtcgctttgaggctgaaagggaaaagcctcaccaaaccattggattcccttataagccgtatccctatccgcaccttctacaccagtgaggagcgtaagaaacccggtttttggcaaattgataccgtccatcattgcggacaggccacccaaggccagtatctgcacacgttaaccgccaccgacgttgcgtcaggctggatagaactgtgctccctcctcaataacgcccaaaagtggacgttcgaagctttgtccctcatcaaaacatccgcccttttgcccgtccttgagtttcacagcgataacggctctgagtttatcaacaacgctacggagttaaggtgtaaagataaccgtatcccttttaccagaagccgcgaccancagaaaaatgacaactgtttcgtcgagcagaaaaacggcgatgtggtgcggaaaaccgtcggatatgggcgttttgagggccaaaacgcctttaatgcccttgccgatgtctaccgtttcttgaaccctcttttgaattattggtatcctaccatccgcctggctgccaaagaaaaactcccttcaggcaggtataaaaaaatctacgagaaggatcccaaaacgccataccaaaggctgcttgaatccccttgcatcagcgaggaatgcaaagctgagcttcgtcggagggcggcgcttttgaatcctgttgctttgaaacgcggcttggacgaggcccgtgaccggctcttgaaactttccgtgatagagtccagtatcccttccagcagggtttcttga

SEQ ID NO: 49866 - protein, 302 aa, Unknown
  Obtained from environmental sample
  DOMAIN (70)...(250): Integrase core domain
  misc_feature (1)..(302): Xaa is any amino acid
MRQQMAYISRWPAFGITAEIAEKLTKISPASIDRYLKKDKVALRLKGKSLTKPLDSLISRIPIRTFYTSEERKKPGFWQIDTVHHCGQATQGQYLHTLTATDVASGWIELCSLLNNAQKWTFEALSLIKTSALLPVLEFHSDNGSEFINNATELRCKDNRIPFTRSRDXQKNDNCFVEQKNGDVVRKTVGYGRFEGQNAFNALADVYRFLNPLLNYWYPTIRLAAKEKLPSGRYKKIYEKDPKTPYQRLLESPCISEECKAELRRRAALLNPVALKRGLDEARDRLLKLSVIESSIPSSRVS

SEQ ID NO: 49867 - DNA, 363 bp, Unknown
  Obtained from environmental sample
  misc_feature (1)..(363): n is a, c, g, or t
atgctccaatataggttaaaaacagatcaggcccagatgccaaaagggggaattttaccaattgcgacaaaccgtgttgacaatgatataagaatattattcagcgatacaggagtgggaataagcgtggaaaacctgtcaaaaatatttgagccttattttacaacaaacgaagcgggaacggggttggggcttactcaggtttttaaaataatcaaggaacataagggagaaatttcggtaagctccaaagaaggagaaggaacagattttgaaatattattgcctgtatatcaaaaagtaattaatatgatagagtataacggagtatcccatgacgaagaagagggagtaaaaaaatga

SEQ ID NO: 49868 - protein, 120 aa, Unknown
  Obtained from environmental sample
  DOMAIN (8)...(98): Histidine kinase-, DNA gyrase B-, and HSP90-like ATPase
  misc_feature (1)..(120): Xaa is any amino acid
MLQYRLKTDQAQMPKGGILPIATNRVDNDIRILFSDTGVGISVENLSKIFEPYFTTNEAGTGLGLTQVFKIIKEHKGEISVSSKEGEGTDFEILLPVYQKVINMIEYNGVSHDEEEGVKK

SEQ ID NO: 49869 - DNA, 633 bp, Unknown
  Obtained from environmental sample
  misc_feature (1)..(633): n is a, c, g, or t
atggttaaattttaccgcagggcgcttaacaaaatcgacaaactcgacacgggacagcggaaagagcttttagtttccgctataggcgaaattaaccttttggaaacggtgatggattccatggacgtgggcattcttgtctgcggtgcgaaaaataatcttgttatggcgaataaattcgcccaacggctttttcctatgaccttaaacgagggggtagagctgtgggaggcgttaaaggacgaagaaattgccggcttttttaaaaatattcttcttaacagggaaaaaataaacggctatgaaatgaatatagagcagaacgaaagaaggaaactgctttcgattaacgtagtcccgctggttcaggaaaagcgcgtaacaggctcccttatttatattgaggacattaccgaaaagcgaaagggagaagcgcgccttagaagggcggaaaatctcgccagccttatgactctatccgccggcgtcgcgcatgaaattaaaaatcctttgggttctatttccattcatcttcagcttatgcaaaaggcgtttgctaaaaaaattaaaacttttgacgctaaaatagaaatatattttaacgtgttaaaagaggaagtgaaagaggcttaa

SEQ ID NO: 49870 - protein, 210 aa, Unknown
  Obtained from environmental sample
  misc_feature (1)..(210): Xaa is any amino acid
MVKFYRRALNKIDKLDTGQRKELLVSAIGEINLLETVMDSMDVGILVCGAKNNLVMANKFAQRLFPMTLNEGVELWEALKDEEIAGFFKNILLNREKINGYEMNIEQNERRKLLSINVVPLVQEKRVTGSLIYIEDITEKRKGEARLRRAENLASLMTLSAGVAHEIKNPLGSISIHLQLMQKAFAKKIKTFDAKIEIYFNVLKEEVKEA

SEQ ID NO: 49871 - DNA, 825 bp, Unknown
  Obtained from environmental sample
  misc_feature (1)..(825): n is a, c, g, or t
gtggcgagcaacataagctcaatgaaagccgcaatggaaaaaactggtgaaataacaattaaatccattttgaaaatacacaaaattctatgctcaaaattcatgcccgaacaagcaggaaaatttagggaagaacaagtttggataggaacaagggggaacatacctcatacggcagatttcgtgccacctcaccattcaaggataaagcagtatatgaatgatttaattaaatttacgaagcgaaacgatattcatccaattatcttatctgcaatagcccatgctcaatttgaaaccattcacccatttgcagatggaaacggcagggttggcagaattttaattcaaactctccttgcaaataaaggattgataagaacggcaactattccattgtcggcagggcttttggctagtaaaagcgaatattatcaagcattggatgattacagggcagggaattatttgcctataatcaagcaaatttgcatttctgcttcacaagccataaacgcaagctgggaaaccgcaggcaagattgaaaaattgcgagacgagtggtttggcaatttgaaagcgaggcgtgattctgttgtttggaaagtagtgaattatctatttgagcagcctgttatcaatgcccaaacagtgtctctaaaatttggtgtagccgatatttcggcaagagcggctatagaaactttgttgaaagctgggataataaaacaagttaaggaacaaaaacgaaatgttttgtattttgcaaatgaaataaccgatattatggacaatttctcaaaaagcatagcgattcgcaggtaa

SEQ ID NO: 49872 - protein, 274 aa, Unknown
  Obtained from environmental sample
  DOMAIN (23)...(154): Fic protein family
  misc_feature (1)..(274): Xaa is any amino acid
MASNISSMKAAMEKTGEITIKSILKIHKILCSKFMPEQAGKFREEQVWIGTRGNIPHTADFVPPHHSRIKQYMNDLIKFTKRNDIHPIILSAIAHAQFETIHPFADGNGRVGRILIQTLLANKGLIRTATIPLSAGLLASKSEYYQALDDYRAGNYLPIIKQICISASQAINASWETAGKIEKLRDEWFGNLKARRDSVVWKVVNYLFEQPVINAQTVSLKFGVADISARAAIETLLKAGIIKQVKEQKRNVLYFANEITDIMDNFSKSIAIRR

SEQ ID NO: 49873 - DNA, 690 bp, Unknown
  Obtained from environmental sample
  misc_feature (1)..(690): n is a, c, g, or t
ttggccgagcgttcttttggttttgataccgccgtagaaaaagcgaccggagtggttgcgtcggcccacatggaggcgtcgtccgcgattaacggcattggtctggtaaaactgatgggccgggagtcggggtatatcgccgcctgtaccgcgctggcaagccacgatgtcaattttgtgcttattcccgaagtgcctttcaaccttgaaggctataacggattcctgcaccaccttgaggaacggcttaaaagaagcaaccatgcggtagtcgttgtggcggaaggggccatgcaggaacagcttctgaccgaacataaaaccgacgcggggggtaacctgaaaatggccgacgtgggaacctatctgcgggaccggatcgtcaaatattttgaagagaaaaaaatcgagatcaatcttaaatacatcgatcccagttatgtgatacgctcatctcccgccaatccgggggattcaatttactgcgaacggctgggcaacgcggcggtccacgcggcgatggcgggaaaaaccaagttgataatcggcctggtcaacaatgaatttgttcatctgccgattaaggcggcaatttcccaccgcagccatgttgatcctgaaggaaacctctggcgtgacacgttagacgctactcatcaaccggcgcttatggtaaataaatttggttga

SEQ ID NO: 49874 - protein, 229 aa, Unknown
  Obtained from environmental sample
  misc_feature (1)..(229): Xaa is any amino acid
MAERSFGFDTAVEKATGVVASAHMEASSAINGIGLVKLMGRESGYIAACTALASHDVNFVLIPEVPFNLEGYNGFLHHLEERLKRSNHAVVVVAEGAMQEQLLTEHKTDAGGNLKMADVGTYLRDRIVKYFEEKKIEINLKYIDPSYVIRSSPANPGDSIYCERLGNAAVHAAMAGKTKLIIGLVNNEFVHLPIKAAISHRSHVDPEGNLWRDTLDATHQPALMVNKFG

SEQ ID NO: 49875 - DNA, 1329 bp, Unknown
  Obtained from environmental sample
  misc_feature (1)..(1329): n is a, c, g, or t
ttggttgatcgcaaagcgaatgatgcgggacagttagataaaactcttctggatatttctgataatgaagttgacacattattttcgcgggctctcgctgaggcgatcgctaaagcgggtccggtttcctcggcattgctccttccccccgacattacccgttttcattcacgggcgggcctgcttaccggcatcgcttaccgcgaattgaacagggcgggaatcgccgttacagtactgcccgctctgggaacccacattccccttaccgccgccgaacgcgagcgtatgtttcccggcgtaccggaatcgctgttccgtgttcacgactggcgcaatgacgtagtagagctgggccgcattgagcgggactgggtggaaaaagccaccgggggtgcggtcagttacgactggccggtgcaggtaaacaaactgctgcgcgacggcggctttgacctgattgtctcgttggggcaggtagttccccatgaagtaataggcatggcaaaccacgcaaaaaatcttctggtgggaacgggcggcaaagaagctatcgacaaaagccattttgccggagccgctttcggcatggaaaaaatgatgggccgcgccgatacgccggtgcgggccatgttcgacgagggtctgcgccgctatggtaacaaactgccccccgtgttatacgctctgaccgttttaagcgcccgcggtgaaactgaagccgccgcgacaggtacgcagcgaggcagcctcgcattgcgcggactttactgcggctttggccgtgattgttttgaacaggccgccgcccttgcccgccgggtaaatgttgaccttctggacgaaccgatacacaaagccgtagtgtaccttgatccggaagagttccgcactacctggctgggaaacaaggccgtgtaccgcacccgcatggcaatggccgacggcggagagttgttgattatcgcgccggggctggagcgttttggcgaggataaaggcattgatgctctgatccgcaaacacggctaccgccccagcagagaaataatcgccaaagcggcaaccgacccggagcttggaagcaatttaagcgccgccgcccacttaatacacggctcaagcgaaaaccgctttacaatccgctattgtccgggaagcaaggttacaaggcaggaaattgagtctgtgggcttccaatggggcgatttaaaagaagtgcaggaaaaatacgacattaacaaactttcttcaggctggaataatgtcgatggggagaaggttttctttgtccccaaccccgcgcttggattgtgggcggagaaatag

SEQ ID NO: 49876 - protein, 442 aa, Unknown
  Obtained from environmental sample
  misc_feature (1)..(442): Xaa is any amino acid
MVDRKANDAGQLDKTLLDISDNEVDTLFSRALAEAIAKAGPVSSALLLPPDITRFHSRAGLLTGIAYRELNRAGIAVTVLPALGTHIPLTAAERERMFPGVPESLFRVHDWRNDVVELGRIERDWVEKATGGAVSYDWPVQVNKLLRDGGFDLIVSLGQVVPHEVIGMANHAKNLLVGTGGKEAIDKSHFAGAAFGMEKMMGRADTPVRAMFDEGLRRYGNKLPPVLYALTVLSARGETEAAATGTQRGSLALRGLYCGFGRDCFEQAAALARRVNVDLLDEPIHKAVVYLDPEEFRTTWLGNKAVYRTRMAMADGGELLIIAPGLERFGEDKGIDALIRKHGYRPSREIIAKAATDPELGSNLSAAAHLIHGSSENRFTIRYCPGSKVTRQEIESVGFQWGDLKEVQEKYDINKLSSGWNNVDGEKVFFVPNPALGLWAEK

SEQ ID NO: 49877 - DNA, 1332 bp, Unknown
  Obtained from environmental sample
  misc_feature (1)..(1332): n is a, c, g, or t
atgagcaaggtaatcaccagcgccggggttgacggcgtctgtaagtcattggcaaagcagacggagtacattgcccgtgaacacggaatagaccttggcggagagacgataccgggattgatgttggggatgatactcgtcgaaatctctcaaaaatacggcaagccggcggttgtgatcgttgacgagtacgacaagccgtttttagacttctacaacaaacccccgatggcgcaggaagtccgcagtgttatgagagattattacactcaattgaaagcgaacgagccgcaaatacggtttttgtttatgacaggaatctccaagttcactaaagccggagtcttttcgacgctcaacaatttgaacgatatttcgctcaataaacatttcggtacgttgctcggatacaccgagagtgagttggtcgaaaacttcagcgagtatcttgcggccggagctaaggaattaaattgtccggttgacgaattaattgaaaagatgagacagtattacaacggcttttgctttgacggggtgcaaaaagtgtactgcccgttctctgtgctcaatttctttgacgactacggctttgcgaattattggatggagagcgcaagccccaagataatcgccgattacatgaaagaccgcaacttgacggtcgagcagttcatcgggatgcaggtatctaaggatttcgcgaggaatccgggagagatagaaaccgcgtcgccggagagttttctctatcaatcaggctacctgacgcttcgagagggtgttaccgaagaattttcgcttgattatcccaatgtcgaggtgctcaattccatgtcgaggctggtctataccaatataatgcgccatagggacgacggcggagattggaatataagcgccccgtttatggcggcgcttatggatggaaacagcgatcttatgattgaaatgctgaaccaccttttggcaagcattccatacgatgactacgccaaatcggcgcaacttgctataaagttgtccggcataccggctcaagagtggctataccgctcaaccatcttggcattcctgcgcggttgcggcgtgctgaccgtcggggagatgcacacaaacaaagggcgccccgacctgctattgtgccatagaggcgccgcgtgggtggtagagataaaggtcgcctacaacgacgactgcgccgcgaaagcggccgaggcgctgaaacagataaacgacaaccaatacgccgacccgtacaaaaacgctaagaaactggggattgcgatagacgacaagactaggcgcatcggggagtgggttgaggggtag

SEQ ID NO: 49878 - protein, 443 aa, Unknown
  Obtained from environmental sample
  DOMAIN (1)...(440): Protein of unknown function (DUF1703)
  misc_feature (1)..(443): Xaa is any amino acid
MSKVITSAGVDGVCKSLAKQTEYIAREHGIDLGGETIPGLMLGMILVEISQKYGKPAVVIVDEYDKPFLDFYNKPPMAQEVRSVMRDYYTQLKANEPQIRFLFMTGISKFTKAGVFSTLNNLNDISLNKHFGTLLGYTESELVENFSEYLAAGAKELNCPVDELIEKMRQYYNGFCFDGVQKVYCPFSVLNFFDDYGFANYWMESASPKIIADYMKDRNLTVEQFIGMQVSKDFARNPGEIETASPESFLYQSGYLTLREGVTEEFSLDYPNVEVLNSMSRLVYTNIMRHRDDGGDWNISAPFMAALMDGNSDLMIEMLNHLLASIPYDDYAKSAQLAIKLSGIPAQEWLYRSTILAFLRGCGVLTVGEMHTNKGRPDLLLCHRGAAWVVEIKVAYNDDCAAKAAEALKQINDNQYADPYKNAKKLGIAIDDKTRRIGEWVEG

SEQ ID NO: 49879 - DNA, 822 bp, Unknown
  Obtained from environmental sample
  misc_feature (1)..(822): n is a, c, g, or t
ttgttccggggctcactcgtttcggatgatctttcggcaacgcagattctgattaccctggacgcggttaccgcggattttacccgcccggaagtaacgcgtagtatcgaaaaaatccgtaaaatagcgggggaaatatttacaggcgaagcggaggtgtattttaccggacagccgattatcaacgcgattatcaacgagtcaataattacagataaccttctgctgatacccctggttgtcatcgtggtgttgtcgatgctgttcttttctttcaggcgttttacttatgtcgtcctgccgttcctgaccgttataatagctgttgtctgggctatagggatggcggcgctgttagggataaaactctcggttattactaccattctgccagtaattctcgtcgcggttggcagcgcttacggtattcatatagttacccactatatggaagatatgcggggaaaaacattgaatgttacagagcaccgcgaattggttatagggctggtaaaaaaattaatcaagccggtatttctggcggcgcttaccactatggcgggttttgtatcgttctgttttacgccgattgtcccaatgagggaattcgggtactgcgcaagcttcggggtgctcgccgcctttgccgtggccgtgctgtttatcccctcaatgttcctgctccgcggcccccgcgttctgaaagagaggcaaaaagaaaaaaacagcagtgggtttaacaataccatcgccgtattttttacccgcatcgcgggaaaaaaaaagacttgtacttgccccttgccgcgctggccgtggtaa

SEQ ID NO: 49880 - protein, 273 aa, Unknown
  Obtained from environmental sample
  DOMAIN (6)...(119): MMPL family
  misc_feature (1)..(273): Xaa is any amino acid
MFRGSLVSDDLSATQILITLDAVTADFTRPEVTRSIEKIRKIAGEIFTGEAEVYFTGQPIINAIINESIITDNLLLIPLVVIVVLSMLFFSFRRFTYVVLPFLTVIIAVVWAIGMAALLGIKLSVITTILPVILVAVGSAYGIHIVTHYMEDMRGKTLNVTEHRELVIGLVKKLIKPVFLAALTTMAGFVSFCFTPIVPMREFGYCASFGVLAAFAVAVLFIPSMFLLRGPRVLKERQKEKNSSGFNNTIAVFFTRIAGKKKTCTCPLPRWPW

SEQ ID NO: 49881 - DNA, 528 bp, Unknown
  Obtained from environmental sample
  misc_feature (1)..(528): n is a, c, g, or t
atggcaaacgccgctacaatagccggaatggcttttgccaacgcgttcctgggagtgtgtcactcgatggcgcataaactcggcgcgttccaccacctgccgcacggagtcgccaacgcgctgatgatcagcgaagttatccgttacaacgcctgcgaagttccgcccaaaatgggaacctttccccaatacgatcacccaaaaacactttcccgttacgcggaaattgtagatgctcttgattttggcggttcaagcgatgaggaaaaacttgaaaatctgatcgctgccgttgaatggttgaaagaacagataggaatcaagaaaactataagggattacggtattgatgaaaaagattttcttgcccgtcttgacgagatgagtgaacaggcgtttgatgatcaatgcaccggcgctaatccgcggtatccattaatcgaggaaatcaaacagatgtatctcaacgcttactacggaaagaatattcatctgggtagttccaacggaaaaaaggagcgggcgtaa

SEQ ID NO: 49882 - protein, 175 aa, Unknown
  Obtained from environmental sample
  SIGNAL (1)...(24)
  DOMAIN (1)...(150): Iron-containing alcohol dehydrogenase
  misc_feature (1)..(175): Xaa is any amino acid
MANAATIAGMAFANAFLGVCHSMAHKLGAFHHLPHGVANALMISEVIRYNACEVPPKMGTFPQYDHPKTLSRYAEIVDALDFGGSSDEEKLENLIAAVEWLKEQIGIKKTIRDYGIDEKDFLARLDEMSEQAFDDQCTGANPRYPLIEEIKQMYLNAYYGKNIHLGSSNGKKERA

SEQ ID NO: 49883 - DNA, 774 bp, Unknown
  Obtained from environmental sample
  misc_feature (1)..(774): n is a, c, g, or t
gtggagcttaaggcaaggtttgacgaaggcaggaatatttcctgggctaacaggctggaaaaagccggcgttatagtggtgtacggccttgcgcggctcaagattcatgctaaaataacgctggtaatgcgccgggaatacaacaggataaagcgttatgtgcatctttccacggggaattacaacgacaagaccgcaaagctctacgaggacatttcactttttaccgcaagggaagacatcgcttttgacgccgggctcctcttcaacatgatcaccggctattcgtcggtgcaggcaatgaacaggcttgtaatcgcccctaccgccttaaagcgcaagctccttgagcttataacgcgcgagataaaccgttccagcatggaagcgccaggcaggattatggccaagatgaacgcgttggcggatccggaaataataaacgcgctttacagggcatcccaggccggtgtaaaggttcttctgaacgtaagggggatttgcacgctcgttcctggcattaagggcttgtcggaaaatatacgggtagtcagcatcatagaccactatcttgaacattccaggatttattatttttccaacgggggtgcggaagagttataccttgccagcgccgacttaatgacgcgcaaccttgatcgcagggtggaactaatgtttccggttctgtcagaggatctgcgaaggacaataatcgagggactctcttcttactttaaggataacacccaggccctggcttttggattctaa

SEQ ID NO: 49884 - protein, 257 aa, Unknown
  Obtained from environmental sample
  DOMAIN (1)...(254): Polyphosphate kinase
  misc_feature (1)..(257): Xaa is any amino acid
MELKARFDEGRNISWANRLEKAGVIVVYGLARLKIHAKITLVMRREYNRIKRYVHLSTGNYNDKTAKLYEDISLFTAREDIAFDAGLLFNMITGYSSVQAMNRLVIAPTALKRKLLELITREINRSSMEAPGRIMAKMNALADPEIINALYRASQAGVKVLLNVRGICTLVPGIKGLSENIRVVSIIDHYLEHSRIYYFSNGGAEELYLASADLMTRNLDRRVELMFPVLSEDLRRTIIEGLSSYFKDNTQALAFGF

SEQ ID NO: 49885 - DNA, 717 bp, Unknown
  Obtained from environmental sample
  misc_feature (1)..(717): n is a, c, g, or t
atgatggccgagctgtcgggtctggtccaggcggttgataccggcatcaccgtaccctcgccctcgccctcctcctctcccgtttccggctcatcagcgagccaggattcaactccgcagtcttcttctccggacccggttgagctggtaaatgctactcccggtctccagcaagctcctggaggggcggctcgacagggcgaagatttttatatcaatggaaataacggggggacaggcaaaaccacggaaactgtaatcaacgtacctaaacccagtagggcggccgtcccggacacgcccccgaccgggacagccgcagctgccacgaatgttgagaaagccgtatccgccccggctcaaaccgctctcaaacctgcctctacaaccattactgccgctgtaaccgctcctgccgctaaagccacacaaacccaggcaaagcctgtgtcaacgcaaaccaaagtttacaatgattactgggtccaaaccggcgcattttcaaccatggccagggccgaagtggttaaaaatactctctcatccaagggaattacatcgattattgaaaaccgggaagttgaaggcaaatcagtcttcagggtgagggtcggcccctacacatccgaaaatgaagctaattactggctttccctaatcaagtcgataaacggttttgaagacagccaggtaagacaaagtcaatcccgccgctaa

SEQ ID NO: 49886 - protein, 238 aa, Unknown
  Obtained from environmental sample
  DOMAIN (156)...(233): Sporulation related domain
  misc_feature (1)..(238): Xaa is any amino acid
MMAELSGLVQAVDTGITVPSPSPSSSPVSGSSASQDSTPQSSSPDPVELVNATPGLQQAPGGAARQGEDFYINGNNGGTGKTTETVINVPKPSRAAVPDTPPTGTAAAATNVEKAVSAPAQTALKPASTTITAAVTAPAAKATQTQAKPVSTQTKVYNDYWVQTGAFSTMARAEVVKNTLSSKGITSIIENREVEGKSVFRVRVGPYTSENEANYWLSLIKSINGFEDSQVRQSQSRR

SEQ ID NO: 49887 - DNA, 678 bp, Unknown
  Obtained from environmental sample
  misc_feature (1)..(678): n is a, c, g, or t
atgataataataaccgacctggacaatagtttactaaacgacaatctccaaataaccgaatacactaaaaacatatttaaacaatgcaaagaaaaaggcagcattatagttttcgcgactgcaaggccttacaggaaaacgcgtattttatttgattccataaaacccgacgcgataatatgtcactgcggcggtattgtctatgtaaatgataaaataatttatcaaaacggaataaaaccaactgttgcgcagaacattcttaaaaatattgttaaagattattcaaacataaatatcgccgttgaatgtaatgatgaaatatacacaaattttgacacgtcaatatactggaaagaagtgccgtataaaaatattgatttggaaaacttgccttctgaaaatcttaataaaataatcataggattggaacttattagtaatatagataaagtaaaaaaatatctcccggatgatttatatattgaaagaatggaagaaaaaatagggcttataatgaataaaaaagccacaaaatggaacgggataacagaaatgttaaaatattacggcgcanaacaggaagacancatatcatttcgcgatgatgacgtagatatagaaatgattgaaaaatgncgaattgnaatagcangtggaaacggaaacgaagaataa

SEQ ID NO: 49888 - protein, 225 aa, Unknown
  Obtained from environmental sample
  DOMAIN (3)...(225): haloacid dehalogenase-like hydrolase
  misc_feature (1)..(225): Xaa is any amino acid
MIIITDLDNSLLNDNLQITEYTKNIFKQCKEKGSIIVFATARPYRKTRILFDSIKPDAIICHCGGIVYVNDKIIYQNGIKPTVAQNILKNIVKDYSNINIAVECNDEIYTNFDTSIYWKEVPYKNIDLENLPSENLNKIIIGLELISNIDKVKKYLPDDLYIERMEEKIGLIMNKKATKWNGITEMLKYYGAXQEDXISFRDDDVDIEMIEKXRIXIAXGNGNEE

SEQ ID NO: 49889 - DNA, 1518 bp, Unknown
  Obtained from environmental sample
  misc_feature (1)..(1518): n is a, c, g, or t
atgaaacggctcctgatgggcaatgaagccattgcccttggcgctctgcgggccggggttcgcgttgttacgggctaccccggtactccctcgacagaggcgctggaaacggccgccaaatacaacgacggcagtgtttacgtggagtggtcagtcaacgagaaagccgcgcttgaagtcgcggcgggcgcagcgtactccggggcgcgggccatggtgacaatgaagcaggtagggcttaatgtggcgtccgacccgcttgtaaatttaaactatatcggcgttaagggcggcatggttgttgttgttgccgatgaccccgggccaatctcctcgcaaaacgagcaggacacgcgctgtttttcaaaatttgccaaagtcgcgctgttcgatccctccacgccggaagaagcgtataccatgattgccgacgctttttcattctcgacacaatacggcaagcccgtcctcttccgtcccacaacgcgcgtttgccatagctacgcgtcagtggaaatactggatcccctgccaaaaaacgaaccttgcggttttgtaaaagacagcaaatgggttatctttccaaaactcgcgtatgcgaacaaattcaaaatagaagataatttgaaagcgatgaaagaggaattttcttcctatgaaaaaaatatacttgccggaaaagggaaaaaaggaatagcatcaggcggcgtaagttatgcctacacacgcgaagcattggcacagcttaattgcgatataaaaaccttaaaaatttctacatatccctttcctgaaaaactcgctcttacgtttctggaagggcttgatgaagttcttgttatagaagaactggacccggtaatagagaatgagcttgtttgtctttgcggattgtataatcttcccgtaaagatacttggcaagcgaagcggccatgttcaaattgccggagaaaactcgccggacagcgccataaaagtaattgggaaattccttaacttaatgccagacaaaacagaaaataaagtacagcaggtgccattaccgccgctgccggttcgtccgccggtattgtgcgccggctgcccccaccgcgcttctttctttgcggttaaagaagccgcaaaaggtaagaagactgtttttaccggagatattggctgttatacgctgggaaacgccatgccacttgacatggtagacacctgtttgtgcatgggcgcgggtatcactatagcccaagggttgaagcgaattgcgcctgacgcggttcacttcgcttttatcggggattcaactttttttcacgccggaattaccggagtaataaatgccgtgtacaaccaaaccgacattattgtcgttgtactggataactcaacaacggcaatgacgggaaaccagccgcatcccggaacccggcgttacaatgatgaaaactcaaacagaaaagatggacatagaanaaatcgtaaaggcgttaaatgtttcaagcgtagcaaggataaatccctttga

SEQ ID NO: 49890 - protein, 505 aa, Unknown
  Obtained from environmental sample
  DOMAIN (13)...(225): Pyruvate flavodoxin/ferredoxin oxidoreductase, thiamine diP-binding domain
  misc_feature (1)..(505): Xaa is any amino acid
MKRLLMGNEAIALGALRAGVRVVTGYPGTPSTEALETAAKYNDGSVYVEWSVNEKAALEVAAGAAYSGARAMVTMKQVGLNVASDPLVNLNYIGVKGGMVVVVADDPGPISSQNEQDTRCFSKFAKVALFDPSTPEEAYTMIADAFSFSTQYGKPVLFRPTTRVCHSYASVEILDPLPKNEPCGFVKDSKWVIFPKLAYANKFKIEDNLKAMKEEFSSYEKNILAGKGKKGIASGGVSYAYTREALAQLNCDIKTLKISTYPFPEKLALTFLEGLDEVLVIEELDPVIENELVCLCGLYNLPVKILGKRSGHVQIAGENSPDSAIKVIGKFLNLMPDKTENKVQQVPLPPLPVRPPVLCAGCPHRASFFAVKEAAKGKKTVFTGDIGCYTLGNAMPLDMVDTCLCMGAGITIAQGLKRIAPDAVHFAFIGDSTFFHAGITGVINAVYNQTDIIVVVLDNSTTAMTGNQPHPGTRRYNDENSNRKDGHRXNRKGVKCFKRSKDKSL

SEQ ID NO: 49891 - DNA, 414 bp, Unknown
  Obtained from environmental sample
  misc_feature (1)..(414): n is a, c, g, or t
atgaaaaacgtaaacagggcatggagaaaagggaaagccgcccttgtcgctcttggtttacccgaagacgaaagcgaaagattagcaaacgaaacaaaacgaccctgccccaggtggatgttaggaaataacagcgcggaaatccgcagagtaaaagaaaaaatggagacgctgaaaaaactcgataccatgaccgttgaaaatatcaaattcaatggcggtgaaatggtaataaaccttgaaataaacagggtacaaattatttttgacgctattcccgcgccggaaaaaagggcattgctcaaatccaacggtttcaaatggtcaccaaaggaaatggcatggcaaaggcaaagaacgataaacggtatcaatgccgccaaacgcctaattgagcaacatttttccagttaa

SEQ ID NO: 49892 - protein, 137 aa, Unknown
  Obtained from environmental sample
  misc_feature (1)..(137): Xaa is any amino acid
MKNVNRAWRKGKAALVALGLPEDESERLANETKRPCPRWMLGNNSAEIRRVKEKMETLKKLDTMTVENIKFNGGEMVINLEINRVQIIFDAIPAPEKRALLKSNGFKWSPKEMAWQRQRTINGINAAKRLIEQHFSS

SEQ ID NO: 49893 - DNA, 531 bp, Unknown
  Obtained from environmental sample
  misc_feature (1)..(531): n is a, c, g, or t
atgataaaccttgagcaagttaaactgctggaaacaaaggttgcaaaagctgttgattatgttgagcgtctggccaaagaaaatgccgccctgcatcgacatgaaatagaattgcaaacaagactggaatcctatcaaaagcggatcgatgaacttgaagttctggtcatgggtttcaaggaagatcaaaaccggatagaagaaagtatcctttccgcgctcgacaggctcaatcagtttgaaaaagcgatggaaaaaagcctgcgggataaacccactgctgcaaaacctgccgccaaagaaccggcagcagcgccgcgttcggcgaagcccacgcaagctgcggctgcttcagcagccgacagctccggcaacgggcaaacctgttttgaaataccggaagcctccgctgaagcattgccggattccgcagattccccttcgcaagacggggacgatatttccgatcccctggaaaacacgccggacaaaaatccatcggcagaaggcggggagctggatatattttag

SEQ ID NO: 49894 - protein, 176 aa, Unknown
  Obtained from environmental sample
  misc_feature (1)..(176): Xaa is any amino acid
MINLEQVKLLETKVAKAVDYVERLAKENAALHRHEIELQTRLESYQKRIDELEVLVMGFKEDQNRIEESILSALDRLNQFEKAMEKSLRDKPTAAKPAAKEPAAAPRSAKPTQAAAASAADSSGNGQTCFEIPEASAEALPDSADSPSQDGDDISDPLENTPDKNPSAEGGELDIF

SEQ ID NO: 49895 - DNA, 393 bp, Unknown
  Obtained from environmental sample
  misc_feature (1)..(393): n is a, c, g, or t
atggcggtgaatatgcccctgccggaaacagagtttgaagtctccccgtccgaatctcgggtggagcaaaaaaccgggccgcatgatctgttgattaatgtacttggagccagtttttccattacagccagcgaagactcggcatatctggatgaggttttggctcagtatcaggttgccatcgcaaatacccagggcatttccggcatgaaggacccgcttaaagtggcgattcttaccgggtttttactctgcgatgaaatcaacaaaataaaactacagatcgaagaaaaacaggcacaagacgatcaacagcgggcagccgaagcgcaggagttgaaccgcgtcatgcaggatattatggcccgtattgatcaagcatttcatgactaa

SEQ ID NO: 49896 - protein, 130 aa, Unknown
  Obtained from environmental sample
  misc_feature (1)..(130): Xaa is any amino acid
MAVNMPLPETEFEVSPSESRVEQKTGPHDLLINVLGASFSITASEDSAYLDEVLAQYQVAIANTQGISGMKDPLKVAILTGFLLCDEINKIKLQIEEKQAQDDQQRAAEAQELNRVMQDIMARIDQAFHD

SEQ ID NO: 49897 - DNA, 396 bp, Unknown
  Obtained from environmental sample
  misc_feature (1)..(396): n is a, c, g, or t
ttgatcaagcatttcatgactaatttttataaactccgcaatcaaattaagcattatgactggggttcgccggattttattccacagttaatggggttcgcaagtaatgacccatgcgcggaactgtggatgggcagtcatgccggttctccttcgctggtcaacctgccgtcaggtgaaattggtctgggagaacttatcgcccgtgatccccgccgttatctgggagaaaaaacagcggaacgatacggcgctcttccctttctgttcaagctgatcgccgcagaaaagccgctctcaattcaggtgcacccgaatctgattcaggcccgtgaaggtttgaacggaaaacagggccgcactggcgcaagacgcccctatcgcgtctcgcgataa

SEQ ID NO: 49898 - protein, 131 aa, Unknown
  Obtained from environmental sample
  misc_feature (1)..(131): Xaa is any amino acid
MIKHFMTNFYKLRNQIKHYDWGSPDFIPQLMGFASNDPCAELWMGSHAGSPSLVNLPSGEIGLGELIARDPRRYLGEKTAERYGALPFLFKLIAAEKPLSIQVHPNLIQAREGLNGKQGRTGARRPYRVSR

SEQ ID NO: 49899 - DNA, 627 bp, Unknown
  Obtained from environmental sample
  misc_feature (1)..(627): n is a, c, g, or t
atggcccttaaagaatttaaatccagggccatggatgtttttgatgaagacgaacaattagaacttgcctattaccttgggttgtgttacacgaaattaaaacaatatgacgaagcccttaattaccttgaacaggttgttaccacaggcagcgacgtactgcgtatttatcaatgcaggatgacgcttgcgtatatctatgttattaccaagcggataagaatggcggaatttgagttaaaaaggcttcaaacttccgggcttgaatcgcccctgctttacaacacgctcgcttacgccgcgtggtgccagaagaaaaacaagaacgcggttgatctttatgaaaaaacccttgaaatagacataaataacgcgacggcaatgaacagcatgggatacatccttgcggattcgggcctggatataatgaggggccttcgtctttgcagaaaggcggtagacgcaaagcccaacagcgcggcgtatcttgattcgcttggctgggcgtattacaaaagcggcgaagtcgccgaagcaagaacatggttaagaagggcgcttgatttggctcccgaagaaaaagaaatagaaaagcattttaagattgttaccggagagaaactatga

SEQ ID NO: 49900 - protein, 208 aa, Unknown
  Obtained from environmental sample
  DOMAIN (20)...(53): Tetratricopeptide repeat
  misc_feature (1)..(208): Xaa is any amino acid
MALKEFKSRAMDVFDEDEQLELAYYLGLCYTKLKQYDEALNYLEQVVTTGSDVLRIYQCRMTLAYIYVITKRIRMAEFELKRLQTSGLESPLLYNTLAYAAWCQKKNKNAVDLYEKTLEIDINNATAMNSMGYILADSGLDIMRGLRLCRKAVDAKPNSAAYLDSLGWAYYKSGEVAEARTWLRRALDLAPEEKEIEKHFKIVTGEKL

SEQ ID NO: 49901 - DNA, 303 bp, Unknown
  Obtained from environmental sample
  misc_feature (1)..(303): n is a, c, g, or t
atgaagaaaaatttctctttttgtgtaatttttatttttgtatctatttttatttacgctcagggagatcaattgcatcccgccccgccgtggggaacaggagccgacgctcttgtcgccgctgaggagttcaggcttggcgttcaggcttataaccgtttttcgtataacgaggcgattttttcttttgaaagagcgctttctttacgtcccggcattgctatagttcttgactggcttgcaaggcttactaccgtaccggatcggaagaaaacgcctttaagacatggagggcggccttaa

SEQ ID NO: 49902 - protein, 100 aa, Unknown
  Obtained from environmental sample
  SIGNAL (1)...(20)
  misc_feature (1)..(100): Xaa is any amino acid
MKKNFSFCVIFIFVSIFIYAQGDQLHPAPPWGTGADALVAAEEFRLGVQAYNRFSYNEAIFSFERALSLRPGIAIVLDWLARLTTVPDRKKTPLRHGGRP

SEQ ID NO: 49903 - DNA, 741 bp, Unknown
  Obtained from environmental sample
  misc_feature (1)..(741): n is a, c, g, or t
ttgtttcctgttgcggacgacggagtgcgttatgttgaatccggccgttatccgggaaggaagcaggatatagtctattaccgccagccttcatcgattttgccgaataacgacggctcggtatgggtagtcgcttacggcagtaatgaattggttaaaattgacgtaaacggatttgtcagggacaggaagaggggaccccttaacgggtttgaccgtccttatgatttggttcgcggaattgacggcaggctctatgtttcggaaaaccgaggcggcagggtaagcatccttgataaaaacggaaattggctgagttatattggttcaaaaggcattggaaaaggccagtttataggtccgcaaaatcttactattgatgaagacggttatctttatgtagtcgattacgggctcaggcgcattttaaaatttgatcctgacggagcgtttattctttcgtttgccgaaaaaagtccggtttttcccggcatgctttcccctacaggaatcgcggcaggcggcggcaaaatctacgcggcggacaatctatcaaaagcaatctttatgtttgatacaaacggcagttacctaggaaggcttgccgtacatggtttaaagtcgccggaatccatgagatttttgtcaaacgacaagcttcttatcgccgacgctaacaggattctgcttgttgaaccggaagccgcgattgtacgcgaacttgggcttgccccggcatga

SEQ ID NO: 49904 - protein, 246 aa, Unknown
  Obtained from environmental sample
  misc_feature (1)..(246): Xaa is any amino acid
MFPVADDGVRYVESGRYPGRKQDIVYYRQPSSILPNNDGSVWVVAYGSNELVKIDVNGFVRDRKRGPLNGFDRPYDLVRGIDGRLYVSENRGGRVSILDKNGNWLSYIGSKGIGKGQFIGPQNLTIDEDGYLYVVDYGLRRILKFDPDGAFILSFAEKSPVFPGMLSPTGIAAGGGKIYAADNLSKAIFMFDTNGSYLGRLAVHGLKSPESMRFLSNDKLLIADANRILLVEPEAAIVRELGLAPA

SEQ ID NO: 49905 - DNA, 666 bp, Unknown
  Obtained from environmental sample
  misc_feature (1)..(666): n is a, c, g, or t
gtggcagcggttgacccgtcgcggccaggaatggagttcgtagccagcgtcgtcagggctcccgttgacggaaccattatcgcgcttccggcccagcttggcatgaccgtcagccaggcggttccccttgcccgtatttcaggcggggcagggcttgagacaaggctctatgtggcggaaaggtttatttccaaagtcggcttaaaccagccctgcgaaattacgctggatgcgtatccgggagaaatctttcgtggaagtattaccgaaataagcccgactgttgataccacttccagaacaatggagataagggtgggggttgaaaacccgggctcacgcctaaaggcggggatgttcgcgaaggtgcgagttatcaccgaaacgaaagagaacgtcgtgaaaattccggcatcggcggtggtgaaccgttttggggagcagtatgttttttccgttgacaaaaccaatcctcagatgccggtagccagaaaaagagttattgttccgggaatagttattgacggggtaatggaagtccggcagggccttgcgcctaacgaggatgttgtcgttcggggccaaaccctccttgaggatggttccagggtcaacgttatcgagcagctggcgcctttaggcgctacgcctttgggcgccaaatag

SEQ ID NO: 49906 - protein, 221 aa, Unknown
  Obtained from environmental sample
  misc_feature (1)..(221): Xaa is any amino acid
MAAVDPSRPGMEFVASVVRAPVDGTIIALPAQLGMTVSQAVPLARISGGAGLETRLYVAERFISKVGLNQPCEITLDAYPGEIFRGSITEISPTVDTTSRTMEIRVGVENPGSRLKAGMFAKVRVITETKENVVKIPASAVVNRFGEQYVFSVDKTNPQMPVARKRVIVPGIVIDGVMEVRQGLAPNEDVVVRGQTLLEDGSRVNVIEQLAPLGATPLGAK

SEQ ID NO: 49907 - DNA, 615 bp, Unknown
  Obtained from environmental sample
  misc_feature (1)..(615): n is a, c, g, or t
atgggtcagaatcggcacgagatccgtataaataccgacaatcaggcggaagaagattttacattcaagtattttattgaacccccggaaaaactgattcaatcggggcggatacttttttcatacatggaaagcagcaaactttttattttaagcgaagaaagcaaaaatattcttgattttcgctggatcatggaagatgagaagattccaattgccgaagacgcggtatttttaggtattccaaaaaaggggaaagcccctagagcggcaaaggcctttgttcaatggtttttcaagattgaaaaccagcgtttacttttggatttcagcaaagcgaacaggataagcgaaaccgttttcggcatttgcgacggtttttcagccataggagcggttaccgaacaaatttttccgcgttactaccccagccttttaggccgcatgccgccttccgaatttctggccgctccgaacatccttcccggaaactgggcgctaatcagggaacgcgtggttcttccctaccttcacgaccgcgcccgcagcaaacaatcggaagagacattgcctttggaaaaacgtttggctgagtggcagagggtgaataggtaa

SEQ ID NO: 49908 - protein, 204 aa, Unknown
  Obtained from environmental sample
  misc_feature (1)..(204): Xaa is any amino acid
MGQNRHEIRINTDNQAEEDFTFKYFIEPPEKLIQSGRILFSYMESSKLFILSEESKNILDFRWIMEDEKIPIAEDAVFLGIPKKGKAPRAAKAFVQWFFKIENQRLLLDFSKANRISETVFGICDGFSAIGAVTEQIFPRYYPSLLGRMPPSEFLAAPNILPGNWALIRERVVLPYLHDRARSKQSEETLPLEKRLAEWQRVNR

SEQ ID NO: 49909 - DNA, 708 bp, Unknown
  Obtained from environmental sample
  misc_feature (1)..(708): n is a, c, g, or t
ttggccctaaatggcctggaggcggcagtactcaactgcgaaccggatgtcaacgggctatgtactattgatttaccgcagatggaagaggctatccgtcacaagagtttgcgctatgataaagatggcgatcagcattacgatattatttcggcttttattaaatccatgcgtggtagcgaccccgatgccgccctctattggatgtcgcgcatgttagctgtcggcgaagatccacgctttatcatgcggcgagtggttatctgtgctagcgaggatgtcggtgcggccgacccacaggcgctgctggttgcggtggcggcggcgcaggctttggaactgatcggtttgcccgaagcacgcttgaatatggcacaagcggtggtacatgtagccgccgcccccaagagcaacgcggtgactgtagcgatggggcgggcagcgcaggcagtggagcaaaacagcggcttaggcgcggtgccagcgcatttaggcgatgccagctacaccagtgctagccgcttgagccatggccaaggttatttatacgcccacgattttcctggccactttgtgcagcagcaatatttgccggatgaactacaacaggctagcttttaccaagccagcactaatggtgccgagcaggctattggcgaacacttggcgcggctctggcctcagcgctatcaactgcccaaagcctaa

SEQ ID NO: 49910 - protein, 235 aa, Unknown
  Obtained from environmental sample
  misc_feature (1)..(235): Xaa is any amino acid
MALNGLEAAVLNCEPDVNGLCTIDLPQMEEAIRHKSLRYDKDGDQHYDIISAFIKSMRGSDPDAALYWMSRMLAVGEDPRFIMRRVVICASEDVGAADPQALLVAVAAAQALELIGLPEARLNMAQAVVHVAAAPKSNAVTVAMGRAAQAVEQNSGLGAVPAHLGDASYTSASRLSHGQGYLYAHDFPGHFVQQQYLPDELQQASFYQASTNGAEQAIGEHLARLWPQRYQLPKA

SEQ ID NO: 49911 - DNA, 681 bp, Unknown
  Obtained from environmental sample
  misc_feature (1)..(681): n is a, c, g, or t
atgaaggttttattaatctgcgatgattattggcatccgggacaagttcccatagacggcgtttctccgcttaaacaacaaggttttcaatttgacattatcaccaacgcgaacgatttttcaccgggcttgctgccaaaacaccctgtcgtatttttatgtaaatgcgacgaagtttcaaaggaagataaacagccgtggaagacagaagccgtacaaaaggcctttgttgattatgttgaaggaggcggcgggcttttggctgttcattcagcgactgtagccggaaaaaatacggaagccatggataaacttctcggctgccgtttcattacccatcccaacgactgccctgtcaccgtacagccaatcaagccgcaccctgtaacaaacggcgtcggaatattttgcgaaaaagacgaacattaccgggtggatgtttttcctgacgccgacatactgcttgcgtcatactcgccgcctcagggagaggaaaacaagtatcaggaagacccgtatcacaatactcaggcaagtatctgtccggcaggctttgtccggacacaaggcaaagggcgcgtgtgcgtgctaacacccggacatcatcttgccgtatggcaaaatacgcagttccagcaattattgactaacgctttaaactggtgcgctaaatttttgtaa

SEQ ID NO: 49912 - protein, 226 aa, Unknown
  Obtained from environmental sample
  misc_feature (1)..(226): Xaa is any amino acid
MKVLLICDDYWHPGQVPIDGVSPLKQQGFQFDIITNANDFSPGLLPKHPVVFLCKCDEVSKEDKQPWKTEAVQKAFVDYVEGGGGLLAVHSATVAGKNTEAMDKLLGCRFITHPNDCPVTVQPIKPHPVTNGVGIFCEKDEHYRVDVFPDADILLASYSPPQGEENKYQEDPYHNTQASICPAGFVRTQGKGRVCVLTPGHHLAVWQNTQFQQLLTNALNWCAKFL

SEQ ID NO: 49913 - DNA, 603 bp, Unknown
  Obtained from environmental sample
  misc_feature (1)..(603): n is a, c, g, or t
gtgggcatgaacgaatgcctgcttaatttcctgggcagggaattcaccatagccaccgacaggggacgctcttttgcccttgaggttctgggctttatgcggaataagctcgcggactttcaggaagaaaccggagagctttttaacctggaggctacccctgccgaatccacttcatacaggcttgccaaacacgacaggaaaaaatacccgcgaattatcagcgcgggaaaagatgagccttactatacaaactctacccagcttccggtaatggaaaccgacgatattttcgatgccctggacttgcaggaaaagctgcaaaccgcctatacaggcggcacggttttccattgcttccttggcgaagctatcgaagactggcgggtttgcagggatctggtaaaaacaatagccggcaagtaccgaattccttattttacaatatcgcctactttctcggtatgtccgctacacgggtacttgaggggtgagcattttttctgcccaaaatgcagggaagaaaaagaaaacgatctccgcgaaaaaatcgcggcattggaagaagagaggaaggctgttttagctgccgcagttttatga

SEQ ID NO: 49914 - protein, 200 aa, Unknown
  Obtained from environmental sample
  misc_feature (1)..(200): Xaa is any amino acid
MGMNECLLNFLGREFTIATDRGRSFALEVLGFMRNKLADFQEETGELFNLEATPAESTSYRLAKHDRKKYPRIISAGKDEPYYTNSTQLPVMETDDIFDALDLQEKLQTAYTGGTVFHCFLGEAIEDWRVCRDLVKTIAGKYRIPYFTISPTFSVCPLHGYLRGEHFFCPKCREEKENDLREKIAALEEERKAVLAAAVL

SEQ ID NO: 49915 - DNA, 462 bp, Unknown
  Obtained from environmental sample
  misc_feature (1)..(462): n is a, c, g, or t
atgagaaaccttgaggtcatcgaaaaagatttggccgcggcgagggaggccctttcggcagcggaagggacgcctgcggaagtttacagccgtatcgtgggctactaccgttcggtacggaactggaacaagggaaagagggaggaatacggcgagcggcagctttactgcgtaaaagggccgcgcgccgtcgcttctcccctgtctgttccaacagaagagtcgctgcttctgctttttatccgcgcttcctgcccggcctgccctccagccaaggccgcggctggcaagctggggattccggttgagcttgtaaacgcggatacggcggaaggcatggccgaggcagtcaggcgcaacgtgatgtcaaccccgacagcaatacttatttcccggggcggcgaagaactcgcccgggccggaaacgcggaaacaatcggcaggctgcttaccgcttcttag

SEQ ID NO: 49916 - protein, 153 aa, Unknown
  Obtained from environmental sample
  misc_feature (1)..(153): Xaa is any amino acid
MRNLEVIEKDLAAAREALSAAEGTPAEVYSRIVGYYRSVRNWNKGKREEYGERQLYCVKGPRAVASPLSVPTEESLLLLFIRASCPACPPAKAAAGKLGIPVELVNADTAEGMAEAVRRNVMSTPTAILISRGGEELARAGNAETIGRLLTAS

SEQ ID NO: 49917 - DNA, 783 bp, Unknown
  Obtained from environmental sample
  misc_feature (1)..(783): n is a, c, g, or t
atgcgcgtcgcggcattgtgcgcggctatgggaagaaagctgggatttgacgatgacaccctttccgcgttatgcgtatgcgcgctgtttcatgacaacgcgctgaccgaatatcatctctataaaaataatagtatccaatacgaaaagaacatgatcctgcactgtgaaaaaggccaaagcaacgtgtcctggcttccgttcaaaaaagatatcggcggttttgtcctgtatcaccatgaatgtgaaaacggcaatgggccttttaaaaagcaggaaggggaatttcccctggaagcggctctcatcgctgcggcggattccattgatgtggcgtatcagctccagaacgttaaggccgccgaccttgaggttttacgcggcaaaatatcggcaaactcaggcgcatattcaacgaaaaccgctacaggcattttgctggatgtgctggatgccgatatgcttgagaaattgcgcgatgggaatatttcctcaactatggataaatccctgccccgttgggaagtagacttaaacgatcccagcgtaataaaaatcgccggctttatttcgcggataatcgattttaaatcccggttcacgcgaaaacacacaactcagatagccaatcgcgcctggcttatggccgggtattacggttacagtaaagaggagcaagccgcgctttttcttgcttcatctttgcatgacatcggcaagatcgccgtgcctgttgaagttattcagaaggacggccccctcaatgatgatgaatttcaataa

SEQ ID NO: 49918 - protein, 260 aa, Unknown
  Obtained from environmental sample
  misc_feature (1)..(260): Xaa is any amino acid
MRVAALCAAMGRKLGFDDDTLSALCVCALFHDNALTEYHLYKNNSIQYEKNMILHCEKGQSNVSWLPFKKDIGGFVLYHHECENGNGPFKKQEGEFPLEAALIAAADSIDVAYQLQNVKAADLEVLRGKISANSGAYSTKTATGILLDVLDADMLEKLRDGNISSTMDKSLPRWEVDLNDPSVIKIAGFISRIIDFKSRFTRKHTTQIANRAWLMAGYYGYSKEEQAALFLASSLHDIGKIAVPVEVIQKDGPLNDDEFQ

SEQ ID NO: 49919 - DNA, 384 bp, Unknown
  Obtained from environmental sample
  misc_feature (1)..(384): n is a, c, g, or t
ttgagcgtacatgaatcggcggaaatgtacttggaaacaatccatgttttaagcctgaaagggaaccccgtccgttccatcgatattgtcaatgaactggaatactcaaagccaagcgtcagcgttgcaatgaaaaacctgcgtataaaggggtatgttgaaattgacgaagacggttatataacactgaccgtaaagggccgtaaaatagctgaaacgatgtatgaaaggcatatcgcgatttccgactggcttatttttttgggcgtggataaaaaaactgcagtgcatgacgcctgcaagatggaacacgtcatgagcgaaaagagtttttcggcaataaaaaaacatatagaaaattggaaacgagagattaataattaa

SEQ ID NO: 49920 - protein, 127 aa, Unknown
  Obtained from environmental sample
  DOMAIN (2)...(62): Iron dependent repressor, N-terminal DNA binding domain
  misc_feature (1)..(127): Xaa is any amino acid
MSVHESAEMYLETIHVLSLKGNPVRSIDIVNELEYSKPSVSVAMKNLRIKGYVEIDEDGYITLTVKGRKIAETMYERHIAISDWLIFLGVDKKTAVHDACKMEHVMSEKSFSAIKKHIENWKREINN

SEQ ID NO: 49921 - DNA, 510 bp, Unknown
  Obtained from environmental sample
  misc_feature (1)..(510): n is a, c, g, or t
atgagaaacgcaattgcgggaacaaagcggcgttccatagaatcgtttgccgatcttcaaaatctggcggaaataaatccacggtacccgaatttaagggctattataactcaggctgaaatagacatgggataccgtccgccgcccccaaaccccgcaaatatagcgcgttcaagagaactaacggattccgcaagacgtatttttgaaagcaatgcgacgacgcagtacgaagtcgcccttacgcagttgaatgaagctataactttgaatccgcaaaatactgaagcgacacaggtaagagacaggctgctaagcaggatgagcgttccgggaggcattgttctttcaagcgaagacgaggctgattaccaacgggcgttacgcgaattaaatttaggtaacagccttgttgcgctctcgcttgtggagcgtcttatgcagaacccaaaaaaccgcaatataacaaaacttgtagaattacaaagaaggatacaatcggtattatga

SEQ ID NO: 49922 - protein, 169 aa, Unknown
  Obtained from environmental sample
  misc_feature (1)..(169): Xaa is any amino acid
MRNAIAGTKRRSIESFADLQNLAEINPRYPNLRAIITQAEIDMGYRPPPPNPANIARSRELTDSARRIFESNATTQYEVALTQLNEAITLNPQNTEATQVRDRLLSRMSVPGGIVLSSEDEADYQRALRELNLGNSLVALSLVERLMQNPKNRNITKLVELQRRIQSVL

SEQ ID NO: 49923 - DNA, 768 bp, Unknown
  Obtained from environmental sample
  misc_feature (1)..(768): n is a, c, g, or t
atgaatcaggaaaacctgccggctcaagtccgcctgttacagggaaaatcgcggatcatcgcgctggcccgcaaagagctttactcttaccttaacgcgccggctttttacggggcggccgttttctttctggccttcagctccgtatggctgttttatatacagcgttactttaccctgaacgtcgccaccctgcggccttattttgtggctttccccattgtttttatccttgttatccccgtgctgacaatgaaaagctgggccgaggagcgaaaaaccggaagcatagagcttttgcttaccatgcccttttccgaatgggaactggtactcggcaaattcttttcggctttctgtctgctggtgatgatgctggtcctgaccatccccctccccttttgcctcgcgcctctgggtgaatttgacgcgggcgttatcgtctgcgaatacctggggctggttttaatgggggcttccgccgtcgctttgggcctgctcttgtcatcgctctcaaaaaaccaggcggggagcttcctcggaagcgccgtcgtcctgatggccgttatgctgattaacaccctgaccttctcaatgaaacttcccttctggctgtccgaatttgttaattttatttccctttcatttcattttgaaagtttttccaaaggcttgctggattcaagggatataatttactttctggcaagcgcctttatgtttttgtttgtcaccacgcgggtgatactgttcaggaggtggaactaa

SEQ ID NO: 49924 - protein, 255 aa, Unknown
  Obtained from environmental sample
  misc_feature (1)..(255): Xaa is any amino acid
MNQENLPAQVRLLQGKSRIIALARKELYSYLNAPAFYGAAVFFLAFSSVWLFYIQRYFTLNVATLRPYFVAFPIVFILVIPVLTMKSWAEERKTGSIELLLTMPFSEWELVLGKFFSAFCLLVMMLVLTIPLPFCLAPLGEFDAGVIVCEYLGLVLMGASAVALGLLLSSLSKNQAGSFLGSAVVLMAVMLINTLTFSMKLPFWLSEFVNFISLSFHFESFSKGLLDSRDIIYFLASAFMFLFVTTRVILFRRWN

SEQ ID NO: 49925 - DNA, 675 bp, Unknown
  Obtained from environmental sample
  misc_feature (1)..(675): n is a, c, g, or t
atgacccgaaaacaggcttctacaataagtataatgatattggcggtcgtagcccttacctttctggtaagcaggcggctgtggttcaggttggatcttacaaaaggaaaaagctataccatttcggacgtttcacggaatctccataatgaaatcccagacagagtgcggataacatatttcctatcggacaaactcagggcgctatacccgtttcccggcgaaattgaagacctgctgcgggaatacgcaaactactccagggggaaaatccagtttacggtaagggacccggcaaaggcgcggctgacccaggagatcgagcagcttgggattctcccgcaacagttacagaccgtggagcaggatcaggccagcctgataaccgtgtataccggcatcgtgatagagtaccttgacgagacacaggttatgcctttggtgttttccatggaaacccttgaatacgatttaacgtcgcggatccgcgcgatggtgcggggcagttcccgcctgctggggcgttctttactcaggcgattccagaagtttcagcgagaattaccagtacctgatgagagccttcacgcaggccggataccagatcaggatgttaagccccggcgaagaaatccccgaaacagtgcccgccattatcgcgctggacggagttga

SEQ ID NO: 49926 - protein, 224 aa, Unknown
  Obtained from environmental sample
  SIGNAL (1)...(18)
  misc_feature (1)..(224): Xaa is any amino acid
MTRKQASTISIMILAVVALTFLVSRRLWFRLDLTKGKSYTISDVSRNLHNEIPDRVRITYFLSDKLRALYPFPGEIEDLLREYANYSRGKIQFTVRDPAKARLTQEIEQLGILPQQLQTVEQDQASLITVYTGIVIEYLDETQVMPLVFSMETLEYDLTSRIRAMVRGSSRLLGRSLLRRFQKFQRELPVPDESLHAGRIPDQDVKPRRRNPRNSARHYRAGRS

SEQ ID NO: 49927 - DNA, 753 bp, Unknown
  Obtained from environmental sample
  misc_feature (1)..(753): n is a, c, g, or t
atgagagccttcacgcaggccggataccagatcaggatgttaagccccggcgaagaaatccccgaaacagtgcccgccattatcgcgctggacggagttgaaagttttgacgatacctgtctgtaccggcttgacagctttatccaaaacggagggaaggtcttttttaccgttaaaggcgtccgtataaataccgaaagcgaccttggcgcgcggccggtttctgacaggggccttttggaaatgctttcctcttacggcgtaacagtgctgccggaaatcgtaatggacaggacggctctgacaatgcaatatcagaccgttactccgtcaggcggacgccagatacatataacacgctacccgcaatggattagtgtgagaaacggaaacccaacgcatcccgtgagcgccaaattcagcggcctggatatgtattgggcaagcccccttgaattgcgtgaagtaaaaggtgttgaagcgttaccgttgtttaccaccacggctgaggcatggtcaatgagagagccgttttatacaagccctgaaatgcccatgatgttaagcaaggacgcggactctaccacaggcgcaaagatacttggagcgagcctgacggggttgtttccctcatggttctcgacaaggccgaaacccgagcaggaagacggctcggaacttcccgatatacctgccgaagccaaaccctcgcggctggtaattatcggcgatacggatttctcggccatctga

SEQ ID NO: 49928 - protein, 250 aa, Unknown
  Obtained from environmental sample
  misc_feature (1)..(250): Xaa is any amino acid
MRAFTQAGYQIRMLSPGEEIPETVPAIIALDGVESFDDTCLYRLDSFIQNGGKVFFTVKGVRINTESDLGARPVSDRGLLEMLSSYGVTVLPEIVMDRTALTMQYQTVTPSGGRQIHITRYPQWISVRNGNPTHPVSAKFSGLDMYWASPLELREVKGVEALPLFTTTAEAWSMREPFYTSPEMPMMLSKDADSTTGAKILGASLTGLFPSWFSTRPKPEQEDGSELPDIPAEAKPSRLVIIGDTDFSAI

SEQ ID NO: 49929 - DNA, 870 bp, Unknown
  Obtained from environmental sample
  misc_feature (1)..(870): n is a, c, g, or t
ttgaaaacctcaaacttcaggaaccgctccggcatgaaaacctgcggggcagcgcctactacaaggaggacgatcatgttagataacgccacgctgggccagttgcgtgacctccatctgtccgcaatggcgtcatgtttcaaggatcaattaaaccggaacggcattggctcgctctcttttgaagagcgtttcggcatgttggttgaagccgagtgggtcagccgcggaaacaagcgctttaaccgactgataaggcaggcgggcttccgccttccggcggttcttgaggatattgattattcgggcaagcgcggtattaccaaaccggaaatactcaaactcagcctgggggcctatatcaaaaaagcgcaaaatgtttttttctcagggccgagccggggttggaaaacatacctggcatgcgccttgggcagggccgcttgcgcccaaggtgtccaggtcctctatacaagggtcacggattatttcaattcggtatttaccccctcaagcaattaccggcacaaaccgttgcgggataaattcgcttccgcgccgctgctcgtccttgacgactggggacttaaaaaattttccgctgaagaaacccatgaactctcggaattatttgaaaagcgttatggccgggccgcgaccattatttcagggcagatcccctgtaccgcctggcatgacttgtttcccgacccgacgcaagctgacgcaatcctcgaccgtattgtccataacgcctatgcctataatatatcaggggagtccatgcggaaaactcttgggaaaaaggatccgcattgcttcaaaattaatctaaccgaaaaggaaccatgcctcaaaataaaattctaa

SEQ ID NO: 49930 - protein, 289 aa, Unknown
  Obtained from environmental sample
  DOMAIN (48)...(77): IstB-like ATP binding N-terminal
  misc_feature (1)..(289): Xaa is any amino acid
MKTSNFRNRSGMKTCGAAPTTRRTIMLDNATLGQLRDLHLSAMASCFKDQLNRNGIGSLSFEERFGMLVEAEWVSRGNKRFNRLIRQAGFRLPAVLEDIDYSGKRGITKPEILKLSLGAYIKKAQNVFFSGPSRGWKTYLACALGRAACAQGVQVLYTRVTDYFNSVFTPSSNYRHKPLRDKFASAPLLVLDDWGLKKFSAEETHELSELFEKRYGRAATIISGQIPCTAWHDLFPDPTQADAILDRIVHNAYAYNISGESMRKTLGKKDPHCFKINLTEKEPCLKIKF

SEQ ID NO: 49931 - DNA, 915 bp, Unknown
  Obtained from environmental sample
  misc_feature (1)..(915): n is a, c, g, or t
atgattggaaacggttacaaaggagttgacgaaaatcatcctttggttctgggccacgagatcgccggaattattgaaaaggtcggaaagaacgttaaaggctatagcatcgggatgaaggcctcacttgcacctaacatcggctgcggtatctgcgactggtgcgtttcaggcgatacccatctgtgccctgattatacggcttttggcatcaacatagacggaggttttgccgagtatgtcaggataccgcaaaacgccataacccaggggaatatcatgatcctggacgattccatgcctctggacgttgcggctttgattgagcctgcctcctgtgtgctaaacggccagcttagggttggcatacgcctgaacgacaaagtgcttgtcatcggggccggcccgatcgggataatgcatggccttttggccagggtttttggcgcagcgaaagtttatatacgggatttgtctgtcccgcgcatgaaacaaagcgttgagcttattcccggcgcggaagcaatctctgaagacgatctggaagcggcggcaaagcgccttaccggcggcagggggtttgacgttaccattaccgcctgccccgcgcccaccgcccaggtagatgcccttaaggttaccggcatgaacgggcgtatcctctattttggcggcctccccgccggaaaggacgaggtcacactggccacaaaccatatccattacaagcagctttccatccacggttctacaagaggcaatataaaccaataccgcgctgtggcaaacatgatggcggcgggaaccttggatctgtccgctctgatctccaggcgttaccccataaccgaattcggcgacgcagtagaatacgcaaaaaaggctgaagggcttaagacagttattgtattttga

SEQ ID NO: 49932 - protein, 304 aa, Unknown
  Obtained from environmental sample
  DOMAIN (125)...(267): Zinc-binding dehydrogenase
  misc_feature (1)..(304): Xaa is any amino acid
MIGNGYKGVDENHPLVLGHEIAGIIEKVGKNVKGYSIGMKASLAPNIGCGICDWCVSGDTHLCPDYTAFGINIDGGFAEYVRIPQNAITQGNIMILDDSMPLDVAALIEPASCVLNGQLRVGIRLNDKVLVIGAGPIGIMHGLLARVFGAAKVYIRDLSVPRMKQSVELIPGAEAISEDDLEAAAKRLTGGRGFDVTITACPAPTAQVDALKVTGMNGRILYFGGLPAGKDEVTLATNHIHYKQLSIHGSTRGNINQYRAVANMMAAGTLDLSALISRRYPITEFGDAVEYAKKAEGLKTVIVF

SEQ ID NO: 49933 - DNA, 618 bp, Unknown
  Obtained from environmental sample
  misc_feature (1)..(618): n is a, c, g, or t
atgccggagagaatctcgttcataccttctacagtttctttgcttgtttttatgaatgcgtccgtttctttaaccaatgtttcgcctgattcttccatgtcatcagaccctttttttaccgaagccgttatgtctcgcagtcggcctatggattccagtatttgtttcccgccgatttcctgctcttccatggcgtgcaagatattttgttcatgctctgaaactgtattaacgcctgaagctattgttccaaaacgttccaatacttcgttagacgatttagtaatgttgtctattgacgattttatttttttaagcattgatgcggtagtttttgactgctttcccgacgtctccgcaagtttgcggatttcatcggctacaacggcaaaacccatacccgcttctccggcgtgcgccgcctcaatcgccgcattcatcgaaagcagatttgtctggcttgcgatactgttcatcaatgagtttatctccagaagtccctctgaatcctttgctattccctgtatctcctgcgagactaattggagtcctgttttgccgttttccgacgcttcggtcaagaaattgacattttccctgttttcagcaagcgtctga

SEQ ID NO: 49934 - protein, 205 aa, Unknown
  Obtained from environmental sample
  SIGNAL (1)...(25)
  misc_feature (1)..(205): Xaa is any amino acid
MPERISFIPSTVSLLVFMNASVSLTNVSPDSSMSSDPFFTEAVMSRSRPMDSSICFPPISCSSMACKIFCSCSETVLTPEAIVPKRSNTSLDDLVMLSIDDFIFLSIDAVVFDCFPDVSASLRISSATTAKPIPASPACAASIAAFIESRFVWLAILFINEFISRSPSESFAIPCISCETNWSPVLPFSDASVKKLTFSLFSASV

SEQ ID NO: 49935 - DNA, 948 bp, Unknown
  Obtained from environmental sample
  misc_feature (1)..(948): n is a, c, g, or t
atggaggatagcgtaactatagtacttgactcaggcgagttgctgtcgggaatctgtggagccaatgacggaaaccttaaagtcatggaagattctctggggggacgtatcgccgcccgcggcaatgaaatccggctggaaggaaccgatgaaaccggggtcaggcgcttcaaaaccatgatggataaccttatttcggttgtccgggagggggaaaccccttcactagagtatgttgaggcgcttgcagggacagttatccccgctgaaagcgacgctattcacgatgcggtaatccaaattccccacgggttccgccgtatttacccgcggagcaacgggcaggcggcttatattcagggaatgagggcctgtgacattgctttttgcgtcgggcctgccggaaccggtaaaacatacctggccgtagccgaagcgctcaggctggtattgtccaaaaacctgcgaaaactggtgctgacccgcccggtagtggaagcgggcgaaagcctgggtttcctccccggagaccttgcccagaagataaatccttacctgcggcccctgtacgacgcgatggaatccctcgtcccctacgaaatcatacacagaatggaagacacgcgggctattgaaatcgcgcccctggcctatatgcgcgggcgcagcctgaatgactgcgcggttatcctcgacgaggcgcagaataccacaaaggaacaaatgaaaatgttcctcacaagaatcggcgcgggcgcgcgggcggtcatcaccggtgacgtaacccagatcgatttgccgggaagaaccgaatccggactgcttcacgcggcggagattctgaaaaacgtcgacgggcttcatttttcatatctccataccgccgatgtcgtgcgcaatccgcttattaaaaagataatacaggcttacgatgaaaaaaaaccctaa

SEQ ID NO: 49936 - protein, 315 aa, Unknown
  Obtained from environmental sample
  DOMAIN (107)...(311): PhoH-like protein
  misc_feature (1)..(315): Xaa is any amino acid
MEDSVTIVLDSGELLSGICGANDGNLKVMEDSLGGRIAARGNEIRLEGTDETGVRRFKTMMDNLISVVREGETPSLEYVEALAGTVIPAESDAIHDAVIQIPHGFRRIYPRSNGQAAYIQGMRACDIAFCVGPAGTGKTYLAVAEALRLVLSKNLRKLVLTRPVVEAGESLGFLPGDLAQKINPYLRPLYDAMESLVPYEIIHRMEDTRAIEIAPLAYMRGRSLNDCAVILDEAQNTTKEQMKMFLTRIGAGARAVITGDVTQIDLPGRTESGLLHAAEILKNVDGLHFSYLHTADVVRNPLIKKIIQAYDEKKP

SEQ ID NO: 49937 - DNA, 1284 bp, Unknown
  Obtained from environmental sample
  misc_feature (1)..(1284): n is a, c, g, or t
ttgatttccgagatgaaacggataagcgagaacaacccgctgttttcggaagagatgcgccttaatatgataaatatcgaccatcccggaaaaatcgcggattttatcgcgagcatccttaacatagaaaaagcggaacagcagaagattcttgaaattatgaacgtgcgaaagcgcatggaacaggtgctggtttttataaagaaagaacaggaacttttgcgcattcaaaaaaagattcaaagggagataaacgaaaaaatagaaaaatcccagcgcgactatttcttaaaggaagaactgaaggctataaaaacggagcttggcatgacgaccgacgcgaaaagttccgattaccagcgtttcagggaaaagtttgacgcgtttaagtttgagggcgaaataaaagaagtggtggagcaggagcttgaaaaatttaacctgatggaacccaattccccggagtacacagttacgcgcaactatcttgacgtgattgtgtcccttccgtggggcgagccctcccccgagatttttgatttaaaaaacgcgcaggctattctggaagaggatcactacgggttaaaagacgtaaagacgcgtatagttgagtatctcgcggtgcgcaaacttcgcaaggacacaaaaggttcgattgtctgccttgtagggccgccgggggtgggaaaaacttccgttggcagatcaatagcgcgggcgctcggcaagcagtttttccgtttttcagtcggcggcatgagggatgaggctgaaatcaaggggcacaggcgcacttatatcggggcgatgccggggaaaattattcaggggctgaagattgtaaagacaagagaccccgtgtttatgatagacgaaattgacaagatgggttccagttttcagggagaccccgcaagcgcccttcttgaagtgcttgatcccgagcagaactacgccttccgcgatcattatcttgatctgccgtttgatatttcccatgtgttttttatcgtaacggctaacactttggacacaattcccgttccgcttatggaccgcatggaaataatccagcttcccggttatatcgacatagaaaagcttgaaatcgcacagcgttatcttctgcccaaaagccttgaaaagaacggtcttaaaaagaatcaggttaaatacacaaaggacagtcttttgcacatagcgaacgcctatgcccgcgaggccggcgtcaggattttgaaaaaaaccttgacaagattcaccgcaagctggcgaaacagatag

SEQ ID NO: 49938 - protein, 427 aa, Unknown
  Obtained from environmental sample
  DOMAIN (219)...(362): ATPase family associated with various cellular activities (AAA)
  misc_feature (1)..(427): Xaa is any amino acid
MISEMKRISENNPLFSEEMRLNMINIDHPGKIADFIASILNIEKAEQQKILEIMNVRKRMEQVLVFIKKEQELLRIQKKIQREINEKIEKSQRDYFLKEELKAIKTELGMTTDAKSSDYQRFREKFDAFKFEGEIKEVVEQELEKFNLMEPNSPEYTVTRNYLDVIVSLPWGEPSPEIFDLKNAQAILEEDHYGLKDVKTRIVEYLAVRKLRKDTKGSIVCLVGPPGVGKTSVGRSIARALGKQFFRFSVGGMRDEAEIKGHRRTYIGAMPGKIIQGLKIVKTRDPVFMIDEIDKMGSSFQGDPASALLEVLDPEQNYAFRDHYLDLPFDISHVFFIVTANTLDTIPVPLMDRMEIIQLPGYIDIEKLEIAQRYLLPKSLEKNGLKKNQVKYTKDSLLHIANAYAREAGVRILKKTLTRFTASWRNR

SEQ ID NO: 49939 - DNA, 453 bp, Unknown
  Obtained from environmental sample
  misc_feature (1)..(453): n is a, c, g, or t
gtgcaaaagactgtcctttgtgtatttaacctgattctttttaagaccgttcttttcaaggcttttgggcagaagataacgctgtgcgatttcaagcttttctatgtcgatataaccgggaagctggattatttccatgcggtccataagcggaacgggaattgtgtccaaagtgttagccgttacgataaaaaacacatgggaaatatcaaacggcagatcaagataatgatcgcggaaggcgtagttctgctcgggatcaagcacttcaagaagggcgcttgcggggtctccctgaaaactggaacccatcttgtcaatttcgtctatcataaacacggggtctcttgtctttacaatcttcagcccctgaataattttccccggcatcgccccgatataagtgcgcctgtgccccttgatttcagcctcatccctcatgccgccgactga

SEQ ID NO: 49940 - protein, 150 aa, Unknown
  Obtained from environmental sample
  misc_feature (1)..(150): Xaa is any amino acid
MQKTVLCVFNLILFKTVLFKAFGQKITLCDFKLFYVDITGKLDYFHAVHKRNGNCVQSVSRYDKKHMGNIKRQIKIMIAEGVVLLGIKHFKKGACGVSLKTGTHLVNFVYHKHGVSCLYNLQPLNNFPRHRPDISAPVPLDFSLIPHAAD

SEQ ID NO: 49941 - DNA, 591 bp, Unknown
  Obtained from environmental sample
  misc_feature (1)..(591): n is a, c, g, or t
ttgggcaagccgatttttcctgaaggcgacataaaaaaagcggacaggccgggaatgtcagtgggacttgcctggacaagcatgggcggcgacaccctggtaatcgaggcgacttcggttccgggcaaggaaggtctgacccttacaggcaaaatgggcgatacgatgaaggaaagcgccgccatcgccatgaccgtagcgcgcaagctggccgtagaacgttaccgggtcgcgcaggactggtttgatttcaaccatatacacctgcatattcccgaaggcgctacgcccaaagacggcccctcggccggaataacgatggcaacggccctgctttcgcttatgagggacaaggtcgtaaccgaacggctggtaatgaccggcgagctttccctgaccggccaggtgcttcccatcggcggccttaaagaaaaaacagtagccgcgaggcggaacaaagcccggcacatcattatcccgcgccagaacgagcgcgatcttgacgagattcccgatcatgtgaagaagggcatcagctttcatcctgtagaacgcttcgaggaagtgctggccctagcgctgccggaatag

SEQ ID NO: 49942 - protein, 196 aa, Unknown
  Obtained from environmental sample
  DOMAIN (1)...(196): Lon protease (S16) C-terminal proteolytic domain
  misc_feature (1)..(196): Xaa is any amino acid
MGKPIFPEGDIKKADRPGMSVGLAWTSMGGDTLVIEATSVPGKEGLTLTGKMGDTMKESAAIAMTVARKLAVERYRVAQDWFDFNHIHLHIPEGATPKDGPSAGITMATALLSLMRDKVVTERLVMTGELSLTGQVLPIGGLKEKTVAARRNKARHIIIPRQNERDLDEIPDHVKKGISFHPVERFEEVLALALPE

SEQ ID NO: 49943 - DNA, 486 bp, Unknown
  Obtained from environmental sample
  misc_feature (1)..(486): n is a, c, g, or t
atgaaagctgatgcccttcttcacatgatcgggaatctcgtcaagatcgcgctcgttctggcgcgggataatgatgtgccgggctttgttccgcctcgcggctactgttttttctttaaggccgccgatgggaagcacctggccggtcagggaaagctcgccggtcattaccagccgttcggttacgaccttgtccctcataagcgaaagcagggccgttgccatcgttattccggccgaggggccgtctttgggcgtagcgccttcgggaatatgcaggtgtatatggttgaaatcaaaccagtcctgcgcgacccggtaacgttctacggccagcttgcgcgctacggtcatggcgatggcggcgctttccttcatcgtatcgcccattttgcctgtaagggtcagaccttccttgcccggaaccgaagtcgcctcgattaccagggtgtcgccgcccatgcttgtccaggcaagtcccactga

SEQ ID NO: 49944 - protein, 161 aa, Unknown
  Obtained from environmental sample
  misc_feature (1)..(161): Xaa is any amino acid
MKADALLHMIGNLVKIALVLARDNDVPGFVPPRGYCFFFKAADGKHLAGQGKLAGHYQPFGYDLVPHKRKQGRCHRYSGRGAVFGRSAFGNMQVYMVEIKPVLRDPVTFYGQLARYGHGDGGAFLHRIAHFACKGQTFLARNRSRLDYQGVAAHACPGKSH

SEQ ID NO: 49945 - DNA, 1359 bp, Unknown
  Obtained from environmental sample
  misc_feature (1)..(1359): n is a, c, g, or t
atgcagtatggttattttgattctgaaaaaagggaatatgttattgacaggcccgatacgccggctccctgggcgaattatcttgggtctcctgagtatggagcgattatttccaataatgccggaggttacagttttgtaaaaagcggagcggcgggacggctaatacgttaccgttttaacgaacaggaccgtccaggtcgatacgtctacatgcgtgatgatgaatccggcgattattggtcggcttcatggcagcctgtcggcaaaccgcttgaacctcaaccgagcccgcagggcgaaggttccccccttgatcaatacaagtcgatatgccgtcatggcaccggctacactcagttggaagccgattacaaagacatacactcggaaatttgctactacgtgccccacggagcggattacgaggtgtggcggctaaaagttatcaataaaggagcaaaggcgagaaaaatatccgtttttggttttgtcgaatttacctgcgaaagtttttatgagcaggatcaggtgaaccttcaatatacccagtttattacccgtacttattttaaggaaaaatttatcctgcaaaccattaacgagaactgcctgaacgccgtcaacgaaagcagagtagatacgcgcttcttcggccttgcgggagcgaaggttgcaagttactgcggcgaccgagctaaatttctgggcaaataccatgactacggaaaccccgtctcagttgaaaacggcaaacttgacggcacgctcaactacaacatgaacccctgcggcgctttgcacacaaccctcgatctggaacccggcaaaagcgtcgaatgcgttttccttcttggacaaaaacgtgaagcgcaggcaaaagaattgattgcccgttacgaggattcagcccttcccgaccgtgaagttgccgaattaaaaaattattggcataaaaaattaggcaatttaaaagtaacaactcccgatgaaaattttaacaatatgataaacacatggaacgcctatcagtgttttattacatttatctggtctcgcgccgcctccttaatttattgcgggcaacgcaacggttacggatatcgcgacacggtgcaggatattcaaggcatcatccaccttgatcccgacatggctcttgaaaaaatcaagttcatgatttccgcgcaggtgaaccacggcggcgctcttccgctggtgaagtacagccacaatcccggaaacgaagacaaacccgaagacgaatcctatagcaaaagtacgggacatccgtcctatcgcgccgatgacgcgttatggctgtttcctactgttggaaatacatcgccgagacagtaa

SEQ ID NO: 49946 - protein, 452 aa, Unknown
  Obtained from environmental sample
  DOMAIN (207)...(293): Glycosyltransferase 36 associated family
  misc_feature (1)..(452): Xaa is any amino acid
MQYGYFDSEKREYVIDRPDTPAPWANYLGSPEYGAIISNNAGGYSFVKSGAAGRLIRYRFNEQDRPGRYVYMRDDESGDYWSASWQPVGKPLEPQPSPQGEGSPLDQYKSICRHGTGYTQLEADYKDIHSEICYYVPHGADYEVWRLKVINKGAKARKISVFGFVEFTCESFYEQDQVNLQYTQFITRTYFKEKFILQTINENCLNAVNESRVDTRFFGLAGAKVASYCGDRAKFLGKYHDYGNPVSVENGKLDGTLNYNMNPCGALHTTLDLEPGKSVECVFLLGQKREAQAKELIARYEDSALPDREVAELKNYWHKKLGNLKVTTPDENFNNMINTWNAYQCFITFIWSRAASLIYCGQRNGYGYRDTVQDIQGIIHLDPDMALEKIKFMISAQVNHGGALPLVKYSHNPGNEDKPEDESYSKSTGHPSYRADDALWLFPTVGNTSPRQ

SEQ ID NO: 49947 - DNA, 966 bp, Unknown
  Obtained from environmental sample
  misc_feature (1)..(966): n is a, c, g, or t
gtgaagatcatagtattagatggttataccgaaaaccccggtgatttaagctggggagagttcgaaaaattcggcgagcttaaagtctatgaccggacttctttaactgaccccaaagaatccatcgcaagaatcggagacgctgaagtggtgtacgtaaacaagaccccgctatctgcggaagtaatcaacgcctgcccctcgataaaattcgtcggtgtgcttgccactggttacaatatagtggatgtgaatgccgccaaggcaaagggtattcctgtctgcaatattcccacttatggaaccgcggctgtgggccagttcgccatcgccctgcttctggaaatctgccaccacatcgggcatcacgacaaagcagtccacgaaggcagatgggaaaacaacgtagactggtgtttttgggatttcccccttatcgaactcgccggtaaaaccattggcatcatcggctttggtcgcatcgggcaaacaaccggcatgatagcaaaagccctgaacatgaaggtcattgcctttgacagcgttccaactgacagcggcaagcagatcgcggagtatgtcagcctggacaccttgctcgccgagtccgatgtagtcgcgctccactgccccctgttccccgaaacccagggcatcatcaacaaggccaacatcgccaaaatgaaagacggcgtgatcattcttaataactcacgcgggcccctggtggtagaacaagacctggccgatgcccttaacagcggtaaggtgtatgcggcgggccttgatgtcgtttcctcagaaccaatcaagggaaacaaccctttgcttaaagcgaagaactgttttataacccctcacatttcatgggcgccgaaagaaagccgccagagacttatggatatagccgtaggtaacctggccgccttcgtcaagggcagtcctataaatgtagtaaacaaataa

SEQ ID NO: 49948 - protein, 321 aa, Unknown
  Obtained from environmental sample
  DOMAIN (3)...(320): D-isomer specific 2-hydroxyacid dehydrogenase, catalytic domain
  misc_feature (1)..(321): Xaa is any amino acid
MKIIVLDGYTENPGDLSWGEFEKFGELKVYDRTSLTDPKESIARIGDAEVVYVNKTPLSAEVINACPSIKFVGVLATGYNIVDVNAAKAKGIPVCNIPTYGTAAVGQFAIALLLEICHHIGHHDKAVHEGRWENNVDWCFWDFPLIELAGKTIGIIGFGRIGQTTGMIAKALNMKVIAFDSVPTDSGKQIAEYVSLDTLLAESDVVALHCPLFPETQGIINKANIAKMKDGVIILNNSRGPLVVEQDLADALNSGKVYAAGLDVVSSEPIKGNNPLLKAKNCFITPHISWAPKESRQRLMDIAVGNLAAFVKGSPINVVNK

SEQ ID NO: 49949 - DNA, 1401 bp, Unknown
  Obtained from environmental sample
  misc_feature (1)..(1401): n is a, c, g, or t
atggaatatataaactggtcagaaaaaaagatacctgttacaggtgactatgatctttttatcgcgggcggcggatgcgccggatcaggcgcagcgattgcggctggccgttcgggaataaagacctttgcggctgaacggatgttcgcgctaggcggaaccatgaccaacgctttgatgagcaaaatcgccatctcgtcctccaatcacgggattgccgaagagctgatcaaacgcctggacgcttatcaaaaatcaagcttccttgcctcgcggcatgaggttccggttgatcctgaactatgcaagtggatgctggatagaatggttattgatgaagctggaactgaagttagattcgggacaacgatctgtgatgtaattgccaataaccgcaagatagaatatgtgatcgtcgacagcatcaacggttttgaggcggtaaaagcggattactttgccgattgtaccggagacggccagttgagttttaaggccggggcttcttactcaatcggtaatgacgaaagttacggctcctctccctcgctcctgttccgcattgccaatgtggacatagaaaaactgatttccgaaatggaagcccatccggatactacgctttcggaacgcaatacctattccaaccataaattaagccctagccaaaacagggaaaacattgccaatgataaatacgcccactttgccgattttgttgcccttattcggcaaaaggtaaaggagaaccccgggtttctgacagaatgggaacttgagaagatccttcagcgcgggatcatattcatgaaccagcccaagggaactcacgtgctggtaaactcaaccaggattccctattttaagggcaatgacaacaaagagctttctgatgcaatagtatcgggaagaaaacagattgaggcaacgttccgttttatgaaagcgtttattcctggctttgaaaaagcctttatcatggataccgcgagtatgctgggtatccgcgagtcaaggcggattgcaggcgactatgtttttaccgacgaggatgtgaacagttgccgcaaatttgacgatggggtggtgagcaattttggcggcgtggaaattcacgcggccaacgggcagggcacaaagatcagcgagttgggaaagggcgatttttatcatgttccttaccggagcattatctcgaaggattttgacaacctgtatgtggctggccgctgtttcagtgccaatcacgccgccctctcggcggccaggaacatcgcctattgcatggcgttgggacaggctgtgggaagtgccgccgcgcaactgacacacagcgggaaaaagaacgtccgggaaatcgaaataaaatctttacagaaagaactggcttcaattatatag

SEQ ID NO: 49950 - protein, 466 aa, Unknown
  Obtained from environmental sample
  misc_feature (1)..(466): Xaa is any amino acid
MEYINWSEKKIPVTGDYDLFIAGGGCAGSGAAIAAGRSGIKTFAAERMFALGGTMTNALMSKIAISSSNHGIAEELIKRLDAYQKSSFLASRHEVPVDPELCKWMLDRMVIDEAGTEVRFGTTICDVIANNRKIEYVIVDSINGFEAVKADYFADCTGDGQLSFKAGASYSIGNDESYGSSPSLLFRIANVDIEKLISEMEAHPDTTLSERNTYSNHKLSPSQNRENIANDKYAHFADFVALIRQKVKENPGFLTEWELEKILQRGIIFMNQPKGTHVLVNSTRIPYFKGNDNKELSDAIVSGRKQIEATFRFMKAFIPGFEKAFIMDTASMLGIRESRRIAGDYVFTDEDVNSCRKFDDGVVSNFGGVEIHAANGQGTKISELGKGDFYHVPYRSIISKDFDNLYVAGRCFSANHAALSAARNIAYCMALGQAVGSAAAQLTHSGKKNVREIEIKSLQKELASII

SEQ ID NO: 49951 - DNA, 1107 bp, Unknown
  Obtained from environmental sample
  misc_feature (1)..(1107): n is a, c, g, or t
atgaacgacatattggaatggctggtaacagcggaagatacaaggcagcaagcaaaggtaaggcatctaatgcgggatataatcgccatcgtgttcttcgctgagcttgcaaacgcaagcgaatggatagagatatacctgtttgcggcagctcacgaggagccgttgaggaaatatctggaactgcccaacgggataccttcccacgatacgatacagcgggtgtttgctatggtatcgccggaatgcctgcaagagttccgcaaccgatggaacgaaaccatatcgggggatatgggagaaaagatcaagaggatacttgctttggacgggaaaacccagcggggcaacggaagcggcgggcaaaaagcgaaccacatagtaagcgccgtggacaacggcgggttttgcattggcgaggtgctggtggacgacaaatccaacgaaatcacggcaattcccgagcttttgaagcaattgaacgttcaagatactattgtcacgaccgacgcaatgggctgccagacagacattgcaaggctaatcagaaagaaaaaggccgattatatgcttggcttgaagggcaatcagggtactttgcacgatgacgttgagctgtacttcgacgatccgaagctgcgcgcaggctgcgcgtaccacaaagcagtggacaaggctcatggtgcggtagaaacacgcgagtattggcaaacggaggacatagcgtgggtgcaacagggaaaggcatgggcgggactttcatccatcgtcatgacaaaaaacactattgtcagaggcagcaataccgcaacggaagtacggtactttatcagcagcctgcctttaaacgtgggggaggcggctcgtgcgatccgcggccattggatggtggaaagctatcattggcaccttgatgtgacttttcgggaagatgccaaccatacccttgataaggctgctgcatataatttgaacatcgtgaaaaagatggccattaacacgctgaggctggtggatgtcggcatggccagaataagcatgaaaaacaagcgttacattatcagcatgaattttaggcactatttggatattctcatggccctttaa

SEQ ID NO: 49952 - protein, 368 aa, Unknown
  Obtained from environmental sample
  DOMAIN (106)...(334): Transposase DDE domain
  misc_feature (1)..(368): Xaa is any amino acid
MNDILEWLVTAEDTRQQAKVRHLMRDIIAIVFFAELANASEWIEIYLFAAAHEEPLRKYLELPNGIPSHDTIQRVFAMVSPECLQEFRNRWNETISGDMGEKIKRILALDGKTQRGNGSGGQKANHIVSAVDNGGFCIGEVLVDDKSNEITAIPELLKQLNVQDTIVTTDAMGCQTDIARLIRKKKADYMLGLKGNQGTLHDDVELYFDDPKLRAGCAYHKAVDKAHGAVETREYWQTEDIAWVQQGKAWAGLSSIVMTKNTIVRGSNTATEVRYFISSLPLNVGEAARAIRGHWMVESYHWHLDVTFREDANHTLDKAAAYNLNIVKKMAINTLRLVDVGMARISMKNKRYIISMNFRHYLDILMAL

SEQ ID NO: 49953 - DNA, 1578 bp, Unknown
  Obtained from environmental sample
  misc_feature (1)..(1578): n is a, c, g, or t
gtggatacgtcgtcaattgctactctgacgaagtcctatgatggaaaaacgacgattgacacaaccggaatagccggggcggcaggggacgaaattgcatttaatgacgctgcggctttcggtagtgctgttgcgacactgacgaaggatattgactacacggtaaccggcgatttcgttggcgcgaccaacgacacgaagacagcggatgtggcgaccgcgaagcgggcgaagctgactttcacgcttattgacaccggtgcgacgtcgaagaactacacgttgtcctcaacggcgacccacaacaagggcgctagcgtagatgtttacaaggctggagcgtcaataacaaaagcgaagcccgccgccaagtattttgactttgtcgatcctgattctcttgaccaccgctacacgggcagggtgcgcggcataggcgacgttaagtggaagacaggcctcaccggtaccggcggtaagttcatcgtgcggtatgccggcgatacggcgaaaccgaaagaggttggttcttaccttgtgacagtagatgttattgacacattggcgacgaacttcgacacactttacggcgttcagctgggcacgaatccgtatgttatcggcgaacccgcgctgcccacgattaacgcgtggcagacggacacaacggtacgtcagagcgttcccttgacgatgacggttgatgccgagccatccgcgaaaacaggcgtaacgctcagttatcaatggtatagagacggcgccaaagtcgccaccaacggaactagcaagagtttgaccgtaaacggtctgttggaaggcaattcctacatcttctccgtcgaggtgaagaacacgaagagcgcaggcgcggccggtagtgaagtcggaacggtgacgaaggacataaacgtgacggtaatcgagcctcccacaaacatagccggcgcgacgctgaaagtcagcggatcgtacacctatcagggagacgcgatcataccgccggcggacagcatcgtactattcttcccgccgacagcagatgaacctgacacaatatcgcttgttcgcgatgttgactacaaagtaacgttcgcgagaaacacaaacgtcggcgttgcgactgtttcggttcagggtgttgacaagtacatcggtatcaaaaccgcaacgttcaatatcacgaagaaagtacctgacgggacagttgtggattggaagtctgaggttgagtacgacggcaaagcgaagcctataacggtgacggccttggttggcaccggcttgggtgctgctacagttaagtacgacggtaaggccgatgcgccgaccaacgctggtatgtacatcataacggccgatttcgccgacggtacgaactatgctgcggcaactaacgtctccctcggtttctacacgatcaagccgaagacactgaccaaagaggacttggtgtacacacagtggccctcgcagatacttgtggacagcgcgaaagcgaccggtatcggcaacgttaccctgaagcccaataccgggcgatgccacaatcaacgtgacttacggcggcctcattga

SEQ ID NO: 49954 - protein, 525 aa, Unknown
  Obtained from environmental sample
  misc_feature (1)..(525): Xaa is any amino acid
MDTSSIATLTKSYDGKTTIDTTGIAGAAGDEIAFNDAAAFGSAVATLTKDIDYTVTGDFVGATNDTKTADVATAKRAKLTFTLIDTGATSKNYTLSSTATHNKGASVDVYKAGASITKAKPAAKYFDFVDPDSLDHRYTGRVRGIGDVKWKTGLTGTGGKFIVRYAGDTAKPKEVGSYLVTVDVIDTLATNFDTLYGVQLGTNPYVIGEPALPTINAWQTDTTVRQSVPLTMTVDAEPSAKTGVTLSYQWYRDGAKVATNGTSKSLTVNGLLEGNSYIFSVEVKNTKSAGAAGSEVGTVTKDINVTVIEPPTNIAGATLKVSGSYTYQGDAIIPPADSIVLFFPPTADEPDTISLVRDVDYKVTFARNTNVGVATVSVQGVDKYIGIKTATFNITKKVPDGTVVDWKSEVEYDGKAKPITVTALVGTGLGAATVKYDGKADAPTNAGMYIITADFADGTNYAAATNVSLGFYTIKPKTLTKEDLVYTQWPSQILVDSAKATGIGNVTLKPNTGRCHNQRDLRRPH

SEQ ID NO: 49955 - DNA, 693 bp, Unknown
  Obtained from environmental sample
  misc_feature (1)..(693): n is a, c, g, or t
atggtggtgtatcgctgttgcgatatccgtttggcggtgggaacgatgctcaaactaaagggaatacgcaagtttttcggtgacgttagggttttgaacagcgtcagttttaatctagagagtggtgttgtgtatacgctcattggcgacaatggttccggaaagactacgttgatcaacataatttcaggctttcttagaccggatgatggttgcattgagttgagagggaagaaagtaacgtgttttttgccgtatcgaatgaataggttgggtgttggacggacgtttcaggatctgaggttggttacacgggtgaccgtttacgaaaatatcctattagcattagaaaagaaaatgtttgctttcccggacaaagagcagcggaaacgcgtggacgaaattttggaaacggtgtccttatcgacaaagcgggatgaattggctggcgaaatatcttacggacagcaaaaattgctgaccataggctgttgtatcgcaaacaacgccgaattacttttgatagatgaaccggtcgccggaattgacgacagcaaccggttgaagattattcagataatcaaacaattgaagcaggaggggaagacgatattgcaaattgaacaccatcctgattacatcaaggagacaagcgactgtgttttgcggatgaagagtggtgtcttatgttga

SEQ ID NO: 49956 - protein, 230 aa, Unknown
  Obtained from environmental sample
  DOMAIN (42)...(227): ABC transporter
  misc_feature (1)..(230): Xaa is any amino acid
MVVYRCCDIRLAVGTMLKLKGIRKFFGDVRVLNSVSFNLESGVVYTLIGDNGSGKTTLINIISGFLRPDDGCIELRGKKVTCFLPYRMNRLGVGRTFQDLRLVTRVTVYENILLALEKKMFAFPDKEQRKRVDEILETVSLSTKRDELAGEISYGQQKLLTIGCCIANNAELLLIDEPVAGIDDSNRLKIIQIIKQLKQEGKTILQIEHHPDYIKETSDCVLRMKSGVLC

SEQ ID NO: 49957 - DNA, 840 bp, Unknown
  Obtained from environmental sample
  misc_feature (1)..(840): n is a, c, g, or t
atggaaattcttaaacttttgtccattgggcttgccctgggaattttagtcgttatccccggtctttcgacgggaacaatggcggtagttttcaacgtatacgaccgccttatcggaataattacacctaacataaaaaaaataataagcgaatggaagttctggctcccccttgtaatcggcggcgctgtaggactggcgtttatcagcaaagttgtcaccgtcatgtacgaaaaatacccatttcccataacatggttctttatcggcgtcattaccggaagtctgccgctcctttacggcagaatgaaacttcctgaaaaaaaactccctaatcttgcgcccgcgatttgcgctctccttgcgcttgcggtaatggtagtaatggcagcactaaaagcaagatacaatcaaaacgaagggataaccttattcacggaaatttcgccgcgcttgtttattcttcttgtgcttgcgggaatttcttccgctgtagcgatgataattcccggaatctccggcgcgtttttgcttcttatcattggaatgtaccgtacagtaattcagtctgtctctgattttaacatcccgcttttaatccctttagcgcttggcattctcgtgggccttttagccggcgccgctcttgtccgcttcctgctcttaaaagcgccgatggaaacctacggcgcggttttaggattggtagccggctcaattgtagttttattccccggcagtcttggagagggtaatattgttattatctccgcggcaagttttcccgccggcgcggtaatttcatttttgttaggcaagaagaagaattttatatcttag

SEQ ID NO: 49958 - protein, 279 aa, Unknown
  Obtained from environmental sample
  SIGNAL (1)...(28)
  DOMAIN (3)...(269): Domain of unknown function (DUF368)
  misc_feature (1)..(279): Xaa is any amino acid
MEILKLLSIGLALGILVVIPGLSTGTMAVVFNVYDRLIGIITPNIKKIISEWKFWLPLVIGGAVGLAFISKVVTVMYEKYPFPITWFFIGVITGSLPLLYGRMKLPEKKLPNLAPAICALLALAVMVVMAALKARYNQNEGITLFTEISPRLFILLVLAGISSAVAMIIPGISGAFLLLIIGMYRTVIQSVSDFNIPLLIPLALGILVGLLAGAALVRFLLLKAPMETYGAVLGLVAGSIVVLFPGSLGEGNIVIISAASFPAGAVISFLLGKKKNFIS

SEQ ID NO: 49959 - DNA, 816 bp, Unknown
  Obtained from environmental sample
  misc_feature (1)..(816): n is a, c, g, or t
atgaagtgtaatcccgcaaacccgaaagaatccggatttgtaaacatctggcaggaaacttttcccgtccgcttcggcgccatagacagatcggacaggcttacgttagacgctatttttcagttttttcaggaagcggcgatttgccacgctgaaaatttaaatgtagggcgcgaggacatgcttcgtacggggcagatttggatactttcgcgcatgtccgtaattgtaaaaaggcgcccaaaatatttcgagaacatcactgtcagaagctggccccgaggcggcgaaaaactntttgccgtccgcgattacgacatacgcgacaaagacgatattcctgtcgtatgcgcccgaagcggctggatagtactggacgtggaaaaacgccgccccatcaggccccaatcgttaatggacaatcttccgcagaacgagggagagaacgctctttcccccgaagacggcgccattgccgctcttgaagagcgaagcagtctgcaaaaaatcgcagaaagaaaagcgctctacacggaccttgactttaacggccatgtaaacaacgtccgctacattcaatggatagaggacgctcttgagccgcagtttctggaaaacgcggacagtatgcgtcttgacattaactatctgaacgagattctgggcggcgaagatattgatattatgtccgcaaacatagaagaccaatcttgcgccgaagcgtttgcctttgaaggcaagaagacagaagacggacaaactgcgtcgcagcaatctgcgttcagggcggaattaaggctgtatggaaattcttaa

SEQ ID NO: 49960 - protein, 271 aa, Unknown
  Obtained from environmental sample
  DOMAIN (14)...(258): Acyl-ACP thioesterase
  misc_feature (1)..(271): Xaa is any amino acid
MKCNPANPKESGFVNIWQETFPVRFGAIDRSDRLTLDAIFQFFQEAAICHAENLNVGREDMLRTGQIWILSRMSVIVKRRPKYFENITVRSWPRGGEKLFAVRDYDIRDKDDIPVVCARSGWIVLDVEKRRPIRPQSLMDNLPQNEGENALSPEDGAIAALEERSSLQKIAERKALYTDLDFNGHVNNVRYIQWIEDALEPQFLENADSMRLDINYLNEILGGEDIDIMSANIEDQSCAEAFAFEGKKTEDGQTASQQSAFRAELRLYGNS

SEQ ID NO: 49961 - DNA, 681 bp, Unknown
  Obtained from environmental sample
  misc_feature (1)..(681): n is a, c, g, or t
atgtttttaatcggcgcgctgtgctgcgacattttcgacggcagaatcgccaggatgaccaagacaaccagcactttcggcatggaactggattccttaagcgatcttgtttctttcgggatagcgcccgcgataatgatgtatatgctggtgttaaacaccatgggaaaaataggaatcgccattgccgtgctttatgtcctgtgctgcgccctgcgtctcgcgcgttttaacgttcttgcgcactcgggcgaggttcacaagcattttgtggggcttcccactcccgcctcggcaggcgtgttaatttcgtttgtgttgagctaccagcttttagcgccggaaggtattcatcttaactttaaaacaatacccatattaatggaatttatgccgacattttttaaggtaatgcccattgttattgttgtgctttcgttcctgatggtttccaacattccgtatctgtcgtttaagaaattgaaattgtccaaaatacacacaatagaacttttggccgtaataattgtggttataatattagttgtaattttcccgcagaacacgatatttattattttttcaatgtacgctatatccgggttgttaatttatgtgccaagccttattttcaaaaagaaaaaaccgccggagcagaaggtagaagaaaatgaagtgtaa

SEQ ID NO: 49962 - protein, 226 aa, Unknown
  Obtained from environmental sample
  DOMAIN (2)...(150): CDP-alcohol phosphatidyltransferase
  misc_feature (1)..(226): Xaa is any amino acid
MFLIGALCCDIFDGRIARMTKTTSTFGMELDSLSDLVSFGIAPAIMMYMLVLNTMGKIGIAIAVLYVLCCALRLARFNVLAHSGEVHKHFVGLPTPASAGVLISFVLSYQLLAPEGIHLNFKTIPILMEFMPTFFKVMPIVIVVLSFLMVSNIPYLSFKKLKLSKIHTIELLAVIIVVIILVVIFPQNTIFIIFSMYAISGLLIYVPSLIFKKKKPPEQKVEENEV

SEQ ID NO: 49963 - DNA, 768 bp, Unknown
  Obtained from environmental sample
  misc_feature (1)..(768): n is a, c, g, or t
atggctgaccccgccgtccacatttttaacggcaaattgtttatttacccctcccacgacagggaaagcggaattggcgaaaatgacaacggcgatcacttcgatatgaaagactaccatgctttttctttggaagacccggataatgggcaggtgaaagatcacggagtaattttagacgttaaggatattccttgggcaggccgccaattatgggacagcgatgttgcgtgtaaaaacggcaagtattacctgtatttctcgttaaaagataaaaatgacagtttccgccttggcgtagccgtcgcagaccgtcccgaaggaccgtttaaagcgcagggtgacccgattcgcggaagttacagtatcgacccttgcgtatttgaagaaaaaggcgaatattacatatattttggcgggctttggggcggtcagcttcaacgctacaaggacaataaagcattggaaacaggcggtacattccccgcaaataacgaacccgcaatttgcgcgagggtggcaaagttaagcgcggatatgctccagttcgcggaagagccgcgtcccgtcgtcattctgggtaaagacggaaaaccgcttaccgctggcgaaaatgaaaagcgtttttttgaagcgtcatggatgcacaaatacaacggtaaatattatttctcttactcacgggcgacacccactttttatgctatgctacgggcgataacctctacgggccgtttacatatcagggagtggttcttactccggtag

SEQ ID NO: 49964 - protein, 255 aa, Unknown
  Obtained from environmental sample
  misc_feature (1)..(255): Xaa is any amino acid
MADPAVHIFNGKLFIYPSHDRESGIGENDNGDHFDMKDYHAFSLEDPDNGQVKDHGVILDVKDIPWAGRQLWDSDVACKNGKYYLYFSLKDKNDSFRLGVAVADRPEGPFKAQGDPIRGSYSIDPCVFEEKGEYYIYFGGLWGGQLQRYKDNKALETGGTFPANNEPAICARVAKLSADMLQFAEEPRPVVILGKDGKPLTAGENEKRFFEASWMHKYNGKYYFSYSRATPTFYAMLRAITSTGRLHIREWFLLR

SEQ ID NO: 49965 - DNA, 582 bp, Unknown
  Obtained from environmental sample
  misc_feature (1)..(582): n is a, c, g, or t
atggcggtggaggttgagatgccgtttgacaaggaaaaagcgaagcgaaaccttgaaggaattcttaaaaaattcaataccgataccgatatagcccttctgcatgagtaccataaactatataaaaaagaagtttcacttttcaaacgttcatgggcggcggcttggctttttatgtattatgacaagagagaaacgccaagtccgttgcctgcgggtagtccgcgattagcggaaaaacagcaaaaagaaaagaaagaagataacggtgaaataaaaaaaacatccgctacggttgagtctcttttgcctgaggaagaatcaaaaatgctttttgtcagcatcggtaaaaaccgtcgcctgtttccgcgggaagttatcacgcttataatgtcgaaaagttcagccgcaagagaagatataggcattattcgcattttagataattattcttttgtgcagataagggatacaaaggccgatgaaattatcacggcgctgacgggacttaaattccgcggcagaactttgacggttaactacgccaaaccaaaaaatccggacggcgatatatcaaaatga

SEQ ID NO: 49966 - protein, 193 aa, Unknown
  Obtained from environmental sample
  DOMAIN (96)...(183): DbpA RNA binding domain
  misc_feature (1)..(193): Xaa is any amino acid
MAVEVEMPFDKEKAKRNLEGILKKFNTDTDIALLHEYHKLYKKEVSLFKRSWAAAWLFMYYDKRETPSPLPAGSPRLAEKQQKEKKEDNGEIKKTSATVESLLPEEESKMLFVSIGKNRRLFPREVITLIMSKSSAAREDIGIIRILDNYSFVQIRDTKADEIITALTGLKFRGRTLTVNYAKPKNPDGDISK

SEQ ID NO: 49967 - DNA, 1707 bp, Unknown
  Obtained from environmental sample
  misc_feature (1)..(1707): n is a, c, g, or t
atgtcattttcccgcacggcggctctcgctaaaaacataaatgtaatacaggaagaagcagattatttctttgatcaaaatccgcagattgcggctcttttctatacatcagcctcacccgccgcgtggacaaacagagtatttgtcaacgagcgttttttcctttcacggggaattgatataaatcttgcgaacgctttccgcgttaacagcgaaaaaacgctggaaaacgccgcgctgggacagacgatactcgttaacgcctcgccgcagtttaacaaagcgcagggttcaacgtatcttgcggcaatgtttttccccgtacaggaaggaagcgggtgcgttcttttttcaaccgaaaaccttaacgaaagttttggtatgggcgttaacgcttctttccttataaacgccgacggcgatattatcgcggatgccgacatagaaagagtaaaaactcaaacaaatttggctgaacaggaaattatcgggcggatattcgacagccccgaccgtaacaaacagatgttagttgaacttgacgttcagctaacgcccgattattcgtcttcatctttattttcctacttgcgggaaaaacttgtcggaaaaatcaaaaaaactaatactcaaaatgaaaacaaaaaagtacgctattatcttgcctataccaaactgaataccgccggaagcgttctaattaccacaatcgaatacgataaagtctttgaaggcataaacgcgaccacgcggcgcaacctctaccttaccgccgcgatattgtttctttctattatgtgtatctggtttttcgcaaaaagcatttcagttccgcttaaaacgctcgccggcgcggcgcgttctatcgagggcggcatttttaatattgagctaacgccggcaagcggcgatgaaataggtttattaacttccagcttcgggaaaatgtgttccgcgctgaatattttcggcaagtttaccaaccgtgatatcgctgttcaggcaatgcgcggggaaataaaaccgggcggcttgtccaaacacgccaccatctttttctcggatatccggggttttaccgaaaaatctgaaaactttgtaaagacattcggcaccgaggcttccgaccgtatcgtcttttggcttaacgaatatttatcaaacatggtttattgcgttgaaaagaccaacggcattattgacaaattcatcggcgacgctgtcatggcgcactggggaacagccaccacatcgggaaacccgcagaaagacgcgtttaactgcgtcaagtcggctctgatgatgagggatatgctgagaaaaatgaataaaaaccggaaagaagaaaacataggatcgccgcctatccgtatcggctgcggcatcaacacgggcattgttaccgccgggcagataggctccgacctccgcatggaatacaccgtcataggtgatcccgttaatctcgcttcccgtgttgaggcgcttaacaaacctttgggcactgatattcttatcagcgaaaatacatataatctggtaaagaaattttttatcaccgaagaaatgcctccggtaacagtaaaaggaaaagaaaaacctatacgtctttttgccgtagtaaattttaatttttccgcaatgaatataagccccgccccttctgaaccggtgacccttgcccaggtgcgaaaaatttgggaatag

SEQ ID NO: 49968 - protein, 568 aa, Unknown
  Obtained from environmental sample
  DOMAIN (253)...(322): HAMP domain
  misc_feature (1)..(568): Xaa is any amino acid
MSFSRTAALAKNINVIQEEADYFFDQNPQIAALFYTSASPAAWTNRVFVNERFFLSRGIDINLANAFRVNSEKTLENAALGQTILVNASPQFNKAQGSTYLAAMFFPVQEGSGCVLFSTENLNESFGMGVNASFLINADGDIIADADIERVKTQTNLAEQEIIGRIFDSPDRNKQMLVELDVQLTPDYSSSSLFSYLREKLVGKIKKTNTQNENKKVRYYLAYTKLNTAGSVLITTIEYDKVFEGINATTRRNLYLTAAILFLSIMCIWFFAKSISVPLKTLAGAARSIEGGIFNIELTPASGDEIGLLTSSFGKMCSALNIFGKFTNRDIAVQAMRGEIKPGGLSKHATIFFSDIRGFTEKSENFVKTFGTEASDRIVFWLNEYLSNMVYCVEKTNGIIDKFIGDAVMAHWGTATTSGNPQKDAFNCVKSALMMRDMLRKMNKNRKEENIGSPPIRIGCGINTGIVTAGQIGSDLRMEYTVIGDPVNLASRVEALNKPLGTDILISENTYNLVKKFFITEEMPPVTVKGKEKPIRLFAVVNFNFSAMNISPAPSEPVTLAQVRKIWE

SEQ ID NO: 49969 - DNA, 888 bp, Unknown
  Obtained from environmental sample
  misc_feature (1)..(888): n is a, c, g, or t
atgactaccggtaaccctgaacttaaacacatcatctccgtggtgcaaaaagcgctgcaaaacggttctatgcgctatctaacaagcctctataacaagggtggagacgcatatagacggcacgcgctgtttatgcgcttatccgaagaggaaaaggcgtacatgcgcgaacataccgttgtgtcgtttgccgccgaatacgataactatcccatcagtttttacaacagatttgagaaagagtggcaaggaatcgcccacgatgtcctaaaagagttggaagcgcttaccggcttaacctttgaaataacaaatgatcatgacatggaatggacggccttattgaataaactttcgcgcggggaagtatccatgataagcgaactcttgcgtttgccggaacgcgaagaatcgtttttatggccgaaaaccgccataatgacggatcactacgctctcatatccaaattgaattacccccgtctccgtatcaacgacgtcctgagcgtttcggtcggtttaatcaaagaaacggcctacgcctcattgtttaaaagttggtttccggagcacaaaaacatagtggaatacgaaagcaccaacgccgccttcgacgcgcttgaacaaggcaaagtcgatctggtgatggcgaatttaagccagctccttatgctgaccaattactacgagcgcacgggctacaaagcgaatatcatattcaatttcgtttccgagtctacctttggattcaataaagacgagaccgttctgcgctcaattatagacaaggcgcttctctttgtggatacaaaggagatatcggggcaatggatgcgcaagacatataattacagcgcgaaattggcgctgctgcaccgctttggctga

SEQ ID NO: 49970 - protein, 295 aa, Unknown
  Obtained from environmental sample
  DOMAIN (61)...(280): Bacterial extracellular solute-binding proteins, family 3
  misc_feature (1)..(295): Xaa is any amino acid
MTTGNPELKHIISVVQKALQNGSMRYLTSLYNKGGDAYRRHALFMRLSEEEKAYMREHTVVSFAAEYDNYPISFYNRFEKEWQGIAHDVLKELEALTGLTFEITNDHDMEWTALLNKLSRGEVSMISELLRLPEREESFLWPKTAIMTDHYALISKLNYPRLRINDVLSVSVGLIKETAYASLFKSWFPEHKNIVEYESTNAAFDALEQGKVDLVMANLSQLLMLTNYYERTGYKANIIFNFVSESTFGFNKDETVLRSIIDKALLFVDTKEISGQWMRKTYNYSAKLALLHRFG

SEQ ID NO: 49971 - DNA, 1158 bp, Unknown
  Obtained from environmental sample
  misc_feature (1)..(1158): n is a, c, g, or t
atgattgcgaggagtattatgacgagtgcggaaaggcgcgaggcgcggtatcagcggcgcgttgctgccagggaaacgaaaagacagcagaaactttctcaatatgatgattttcgattggtcgccgatgtcgataatctttacgcttcatttgggagatgtaaggtcggtgtgtcatggaaggaatcaatacagcgatatgaagccaatgctctaagaaatgttttggaaacgcgccggaaattatttgccggagaaagtattcagagcggatttgtagaatttaccctccgtgagcgcggcaaaattcgccatatcaagagcgttcatatttcagaacgtgtggttcaaaaatgtctctgcgatgaggttcttgttccgatactcacgaattcgcttatttatgataacggcgcgtctgtaagaaacaaaggaactcattttgcaatcaggcggttcattacacacatgacaaaattttaccgacacaataattgctcgaatgatggctatgtattgatgatagatttttcaaaatactttgataatgtagaccacgaaacattatttgagttgttggataaaagaataaatgattcctatgtaaagcagcttacaaaagatttaattaccgttttcggtgaaggaaaatcgctcggtctgggaagccaggtttctcaagtatgcgctattttttatcctgatatactcgatcactttattaaagaaaaactccggataaagtattacggcagatacatggacgatttatatttaattcatcacgataaaaattatctgatttattgtttggaaaaaatacaagaagtatgtgataaattaaaaataacaattaaccagagaaagaccgtaataacaaaactatctcatggtgcggagttcttgaaagggaaatacagcttgcttccttccggtagagtactgcgccgtcctgtaaaaacatcgactacacgaatgagaagaaaactaaataaattcaaaacattgcttgatcaaaagaaaatagggtataatgatattagaacatcgtaccaatcatggcgcggaaattataagcggcggttcgatgcataccacagggttcactatatggacaggttatataataagctgttcatatatgatcataatacttga

SEQ ID NO: 49972 - protein, 385 aa, Unknown
  Obtained from environmental sample
  DOMAIN (87)...(367): Reverse transcriptase (RNA-dependent DNA polymerase)
  misc_feature (1)..(385): Xaa is any amino acid
MIARSIMTSAERREARYQRRVAARETKRQQKLSQYDDFRLVADVDNLYASFGRCKVGVSWKESIQRYEANALRNVLETRRKLFAGESIQSGFVEFTLRERGKIRHIKSVHISERVVQKCLCDEVLVPILTNSLIYDNGASVRNKGTHFAIRRFITHMTKFYRHNNCSNDGYVLMIDFSKYFDNVDHETLFELLDKRINDSYVKQLTKDLITVFGEGKSLGLGSQVSQVCAIFYPDILDHFIKEKLRIKYYGRYMDDLYLIHHDKNYLIYCLEKIQEVCDKLKITINQRKTVITKLSHGAEFLKGKYSLLPSGRVLRRPVKTSTTRMRRKLNKFKTLLDQKKIGYNDIRTSYQSWRGNYKRRFDAYHRVHYMDRLYNKLFIYDHNT

SEQ ID NO: 49973 - DNA, 1686 bp, Unknown
  Obtained from environmental sample
  misc_feature (1)..(1686): n is a, c, g, or t
gtgctttccgataacactacaatgatcagggcgacgttaaaccaggtttatacaaacgcttttcagggcgcgtccctggccatgttgattcttatgctgtttntgcgcaatataaaagcgaccgtaatcatcgggctttcaattcccatttccataatgttaacccttatgtcaatgtcgattttcggttttacgcttaacctgcttacaatgaccgggcttataatgggattgggcatgactatggacgcttccatagttattatcgagaacgtacacagttaccgcgtgcgcggagcaaaacccgaaatcgcggcaattctgggaagccgcgaaatgttacgcgcaataatcgcgtcgtccgccactaccctttgcgtattcatcccgcttattatatataagaacgatttgaaagacatgggccttatgttcagcgaccttatttttaccgtggtaatatcccttacggtctcgcttcttgtcgcgattactcttgtacctagcctttccggcgcgattttaaaattaaatacaagggttcaaaaaccgataaaaaaccgttttttgcgcctgattgacgataaaacagaggcttttttatgcggtatggaaaacaaataccatacagcgcttgaatactgcctttctcacaggctgataattgttttgcttgtcgttctgctccttgctttctcgctgcgccaattcacgggcggaatgaatatgtatgtccgaatgcggacggacgacaatgtcgtcatcaatgtcgcgatgccgcgcggaacggctattgacgttaccgaaaaaacgttatttgaaattgaggaaattataaaagaagaagtacaaggttacataaatattgtccttaccgcaacgcgcagcggaaacaaccaggggtttatacagattaccctgccacctccggcacggcaaattgacacccccgattcaattatccgcaaacttaccccctacctaaacacaattcccggcgcaagaataagtttcagggctgggcgcggtgtaggaagtgcagacccaattgaaattgccataagttcaagagattataacgcgattatggcaaccgcagaggaaattcaaaatataatgagaagatatctgcctgaaattgaaaacccggtgataaatgtagacgagggagcgcctcagcttcagattgaaattgatcgcgaccgtgcggcaagctttggcgtgtcgcttgcgacaatcgcctcagaaatccgcacagccatggatggcagtaccgcgaccacaatgagcaggggcaaccggctgttagatgtacaagtcagacttaaagaggaagaccggcagggaatgccgaaccttgattctatttccgtaatcaaccgcagcggaacaagggtatccctttccaatgtcgcaaaaatagcggaaggacgtgcgccttcgtcaatcagaagagaaaagcaggagcgtgtaattcgcgtaacaggtggacttgcgccaggaattgcagctaccgagtaccagcgccgtcttatcaataccgttaatcaataccttgtaaaacgcgagggcgtaacgattcggtttctaggcgaagcgcaggaaattcaatcctacacggggcgatatattttgatcattgttaccgctgtttttctggtcttcggcgttaggcaagccagttga

SEQ ID NO: 49974 - protein, 561 aa, Unknown
  Obtained from environmental sample
  DOMAIN (1)...(561): AcrB/AcrD/AcrF family
  misc_feature (1)..(561): Xaa is any amino acid
MLSDNTTMIRATLNQVYTNAFQGASLAMLILMLFXRNIKATVIIGLSIPISIMLTLMSMSIFGFTLNLLTMTGLIMGLGMTMDASIVIIENVHSYRVRGAKPEIAAILGSREMLRAIIASSATTLCVFIPLIIYKNDLKDMGLMFSDLIFTVVISLTVSLLVAITLVPSLSGAILKLNTRVQKPIKNRFLRLIDDKTEAFLCGMENKYHTALEYCLSHRLIIVLLVVLLLAFSLRQFTGGMNMYVRMRTDDNVVINVAMPRGTAIDVTEKTLFEIEEIIKEEVQGYINIVLTATRSGNNQGFIQITLPPPARQIDTPDSIIRKLTPYLNTIPGARISFRAGRGVGSADPIEIAISSRDYNAIMATAEEIQNIMRRYLPEIENPVINVDEGAPQLQIEIDRDRAASFGVSLATIASEIRTAMDGSTATTMSRGNRLLDVQVRLKEEDRQGMPNLDSISVINRSGTRVSLSNVAKIAEGRAPSSIRREKQERVIRVTGGLAPGIAATEYQRRLINTVNQYLVKREGVTIRFLGEAQEIQSYTGRYILIIVTAVFLVFGVRQAS

SEQ ID NO: 49975 - DNA, 609 bp, Unknown
  Obtained from environmental sample
  misc_feature (1)..(609): n is a, c, g, or t
ttgcttcgcatgatggctggatttgaaaaagttacgtctggagaaatcatatgcaataacactaaaattattaaacctcaaatgaaatatgcgtatgtttttcaggaatataaccagttacttccatggaaaactgttaaacaaaatattgcatatcctcttcaaatattaaattttgacaagttaggaatcgaaaataaagttaaagaatttttaaatttagtcggattatcagaatatgccgattattatccgcacgccttaagtggcggaatgaaacaaagagtggctattgccagggctttagcgatgaatccggaaatattatttatagatgaacccttttctgctcttgatacacaaaacagagaaaaacttaataagaatttattaaatatctggaataaactgaaaatgaccattgtttttgttactcataatttagaagaggcaattttactatcaaataaaataatagttataggtggtaaaccagggaaaattattaatatcatacaaaataatgttgaaggtcaaagattacctggtgataaaggatatacagagttatggagtcttttatatgacagtataaaacttacaaattag

SEQ ID NO: 49976 - protein, 202 aa, Unknown
  Obtained from environmental sample
  DOMAIN (2)...(162): ABC transporter
  misc_feature (1)..(202): Xaa is any amino acid
MLRMMAGFEKVTSGEIICNNTKIIKPQMKYAYVFQEYNQLLPWKTVKQNIAYPLQILNFDKLGIENKVKEFLNLVGLSEYADYYPHALSGGMKQRVAIARALAMNPEILFIDEPFSALDTQNREKLNKNLLNIWNKLKMTIVFVTHNLEEAILLSNKIIVIGGKPGKIINIIQNNVEGQRLPGDKGYTELWSLLYDSIKLTN

SEQ ID NO: 49977 - DNA, 1404 bp, Unknown
  Obtained from environmental sample
  misc_feature (1)..(1404): n is a, c, g, or t
gtggtacaggcaggagaaaacctttgccgcggtacagaagcaggccggcgatatcgacgcgctgatcaacgagttcaacgagagaacaggcttactgaaaggctagtgtgcagtaaaggaaacgttatgcggaatgtaaaagccgctgtctgcgttaagtgcggctgtgaataccaggcgcgggacgatacgtatacgtgtaataagtgcggcggtgttcttgaaattgtctacgattacagttacatcaaaacaacaataagccgggaaaagctcttggccaaaaaagatttttccatgtggcgctatatggaactgcttcctatagaagaaggttcaaggcttggccccctgcgcccgggctggtcgccgctgtacagggcgcaggggcttggcgctgtgctggggcttgaaaatgtgtatgtcaaagacgacggcctgaacccgacatcaagtttaaaagacagggcttcggccattgccgctgtgcgggcctgccgcgcggggaaggatacgattgcctgttcgtcaacgggaaacgccgcgtcgtccctggcgggggcggccgcctcaatgggccttaaatcggtaatttttgtgccttcccgcgcacctcaggcaaaagtgacacagttattgatcttcggcgcggcagttatcagcgtacagggcaattacgagcagaccttccgcatttccgcccaggcaatagaaaaatacggctggtataaccggaacgccgccgtcaacccctatctgtcggaggggaaaagaccgtgtcttttgaaatgccgagcaatgggctttaccgccccggattttgtcgcggtctctgtcggcgacggctgtaccatagccggtgtctggaaaggcttcaaagacctgtacgcgaccggccttattgacaagctgccccgtcttatcagcgtacaggccgaaggctgctgtcccattaaccgcgctgtccaaaataataccgccattgaaaaaatggaagaaaacacccttgcggacagcatcgccgtgggagttccgcgcaacggggacaaggccctggctgcaatccgtgaatccaaaggcatcgccgttaatgtcagcgatgatgagatactcgtggcgatgcagttgctgggaaaaagcgccggagttttcggcgagcccgccggcgtcgccggaaccgcggggctggcaaaagccgcggctaacggccttattccccgggacgcgcttgtggtgtcgattgttacaggtaacggcctcaaggacgtggcctcggcgcaaaaagccgccgggattaacggcggcgcttctggaagcgccgccgcggctaacttgattcgcattgagccggatatggctttgcttataaaagaatttgcaaaacgcggaattgtaatgagttaa

SEQ ID NO: 49978 - protein, 467 aa, Unknown
  Obtained from environmental sample
  DOMAIN (118)...(418): Pyridoxal-phosphate dependent enzyme
  misc_feature (1)..(467): Xaa is any amino acid
MVQAGENLCRGTEAGRRYRRADQRVQRENRLTERLVCSKGNVMRNVKAAVCVKCGCEYQARDDTYTCNKCGGVLEIVYDYSYIKTTISREKLLAKKDFSMWRYMELLPIEEGSRLGPLRPGWSPLYRAQGLGAVLGLENVYVKDDGLNPTSSLKDRASAIAAVRACRAGKDTIACSSTGNAASSLAGAAASMGLKSVIFVPSRAPQAKVTQLLIFGAAVISVQGNYEQTFRISAQAIEKYGWYNRNAAVNPYLSEGKRPCLLKCRAMGFTAPDFVAVSVGDGCTIAGVWKGFKDLYATGLIDKLPRLISVQAEGCCPINRAVQNNTAIEKMEENTLADSIAVGVPRNGDKALAAIRESKGIAVNVSDDEILVAMQLLGKSAGVFGEPAGVAGTAGLAKAAANGLIPRDALVVSIVTGNGLKDVASAQKAAGINGGASGSAAAANLIRIEPDMALLIKEFAKRGIVMS

SEQ ID NO: 49979 - DNA, 591 bp, Unknown
  Obtained from environmental sample
  misc_feature (1)..(591): n is a, c, g, or t
atgcgaatcaagttagccgcggcggcgcttccagaagcgccgccgttaatcccggcggctttttgcgccgaggccacgtccttgaggccgttacctgtaacaatcgacaccacaagcgcgtcccggggaataaggccgttagccgcggcttttgccagccccgcggttccggcgacgccggcgggctcgccgaaaactccggcgctttttcccagcaactgcatcgccacgagtatctcatcatcgctgacattaacggcgatgcctttggattcacggattgcagccagggccttgtccccgttgcgcggaactcccacggcgatgctgtccgcaagggtgttttcttccattttttcaatggcggtattattttggacagcgcggttaatgggacagcagccttcggcctgtacgctgataagacggggcagcttgtcaataaggccggtcgcgtacaggtctttgaagcctttccagacaccggctatggtacagccgtcgccgacagagaccgcgacaaaatccggggcggtaaagcccattgctcggcatttcaaaagacacggtcttttcccctccgacagatag

SEQ ID NO: 49980 - protein, 196 aa, Unknown
  Obtained from environmental sample
  SIGNAL (1)...(23)
  misc_feature (1)..(196): Xaa is any amino acid
MRIKLAAAALPEAPPLIPAAFCAEATSLRPLPVTIDTTSASRGIRPLAAAFASPAVPATPAGSPKTPALFPSNCIATSISSSLTLTAMPLDSRIAARALSPLRGTPTAMLSARVFSSIFSMAVLFWTARLMGQQPSACTLIRRGSLSIRPVAYRSLKPFQTPAMVQPSPTETATKSGAVKPIARHFKRHGLFPSDR

SEQ ID NO: 49981 - DNA, 390 bp, Unknown
  Obtained from environmental sample
  misc_feature (1)..(390): n is a, c, g, or t
ttggaaaactcgacgggcagattaagcgaagttacaaagactctcgccggcgccggaataaatcttagagcaatcagtattgccgacactgcggattttggaatcttacgccttattgccgacaaaagcgaaaaggcggttgaaactttaactcaggcgggatttaccacacggcagaccgacgtagtagcggtggaaattgaagacgagccgggaagtctcgctaaattaatggcgttgtttcaggagtcgcaggtaaatatcgagtacctttacgcctcgcttgaaggacaggttggaaaagcagttgtcattttcaagctgaaggatcacgagaagggacagaatatactcaactcaaaaggctttaaattagcggaaaacttctga

SEQ ID NO: 49982 - protein, 129 aa, Unknown
  Obtained from environmental sample
  misc_feature (1)..(129): Xaa is any amino acid
MENSTGRLSEVTKTLAGAGINLRAISIADTADFGILRLIADKSEKAVETLTQAGFTTRQTDVVAVEIEDEPGSLAKLMALFQESQVNIEYLYASLEGQVGKAVVIFKLKDHEKGQNILNSKGFKLAENF

SEQ ID NO: 49983 - DNA, 1068 bp, Unknown
  Obtained from environmental sample
  misc_feature (1)..(1068): n is a, c, g, or t
atgagccggatgcgcgggataaatataggcggctggttaagccagattgacgctatacaggaaaaagatccggataaatttcaggggatagacaggcacatggaaactttcatagccgcggaggattttgccaatgtaaaaaattggggctttgatcatgcgcgtatccctgttgactcgtacctgttctttaccgaggaagaacagccgctggaaaacaggtttgtccatcttgataatgccgtaaagtacgcgaagcaaaacggcctaaagatgatattggacctgcatgagtgtccggggcacgatttttccgaagcggctaaaacccccgttcaaaaacttttctccggcgacgatacctatatcaaaaaaaccgagaaaatctgggcttatcttgcggagcgttatgcgcataacgatcatgttctctttgaaacgctcaacgagcctgtcgcccccactcctatgatttggaacaatgtaaaggacaggctctgccgcgaaatacgcaagcacgcgcctaaatcaactataataaccggttccaatatgtggaacgttccgggtacattcgccttccttactccctttgatgacggcaacatgatctactgcgtgcatttttacgagccgcttctttttacccaccagaacgcgccgtggatcgataatcctgaaattaaaacagcaagaccgtatccgggcgattacggtccgggcattgtccgccaatacgggcatgcgcattctgacggcgtttgggacaaacagcggcttgtaaatgaatttacgccggtcaacaatttcagaaaaaaatacaacgcgaaagtaatctgtaacgagttcggcgtttacgctcccgtcgagcttcagtcccaactgcgctggtatgaggatattctttccgtcctaaaagaaatggagatcggtttctcttactggaattataaaaacctcgactttggaattatttccataggggagaaactgcatgaaaatctcccgcagtacaacaacagcgaaaggattaatcatcctgttcttgatgttttaagaaagtattaa

SEQ ID NO: 49984 - protein, 355 aa, Unknown
  Obtained from environmental sample
  DOMAIN (24)...(325): Cellulase (glycosyl hydrolase family 5)
  misc_feature (1)..(355): Xaa is any amino acid
MSRMRGINIGGWLSQIDAIQEKDPDKFQGIDRHMETFIAAEDFANVKNWGFDHARIPVDSYLFFTEEEQPLENRFVHLDNAVKYAKQNGLKMILDLHECPGHDFSEAAKTPVQKLFSGDDTYIKKTEKIWAYLAERYAHNDHVLFETLNEPVAPTPMIWNNVKDRLCREIRKHAPKSTIITGSNMWNVPGTFAFLTPFDDGNMIYCVHFYEPLLFTHQNAPWIDNPEIKTARPYPGDYGPGIVRQYGHAHSDGVWDKQRLVNEFTPVNNFRKKYNAKVICNEFGVYAPVELQSQLRWYEDILSVLKEMEIGFSYWNYKNLDFGIISIGEKLHENLPQYNNSERINHPVLDVLRKY

SEQ ID NO: 49985 - DNA, 1104 bp, Unknown
  Obtained from environmental sample
  misc_feature (1)..(1104): n is a, c, g, or t
atgggtctttttgccataatcgccgcctttgccgtattgtttgtgcttgttattctcattctggttaagctgtattccgcaaatacaacagatgtatcgccgcagttaatcgatcttaaaaatgaattaaatgagctaaaaacaagacagttggaaagccagcagagttcgctcgcgcaacagcaacagctttttttaaattcgcaaaatcagcttggttcccagttaagccaaatgatgaaccgcatggatcagaattataattcttcccagagcaacatcgcaaaacagcttgacaactccaaccgtgtaattaacgacatacataccaaacttggttcactggaacaaaccgcgagaaacatccaggacataggaaataatatttccacccttagggatttattgcagccgcccaaactcaggggcaatctgggcgaattccttttggaagaccttttgcggcagatattaccaacagcaaatttcaaagcaaaatacagcttcagcaacggcacccaggtagacgccgtaataaagcttgccgacggaatagttccggtagattcgaaattcccgcttgagagttttcaaaggcttattgaagctggcaacgacgaggacaaaaagcgttttaagagggaatttatctccactgttaaaaaacgcatagatgaaatcagcggcaaatacataaaccccgcggaaaaaacatttgacttcgcgctgatgtatattccggcggaaaatgttttttatgagataattatcaacgattcgcttaccaacaaggaatatgagcttcttaattatgcaatggaaaaacacgtaatacctgtttcgcctaacagcttctacgcctatctcatggttctggtttttggtttgcagggtcttcagatagagcaggaagccaaaatcatacgcggcgagctgtcccaggtacaaaacatgctgggtaaattttccaccgaatacagccaggtagggaagcatctttcaaacgccatcggcaaatacaatgattccgagaaaagcgtcgaaaaactcaatgaccgcctgaatagaattacgggacaaaaagccgaattaatcgccgaataa

SEQ ID NO: 49986 - protein, 367 aa, Unknown
  Obtained from environmental sample
  SIGNAL (1)...(26)
  DOMAIN (84)...(367): RmuC family
  misc_feature (1)..(367): Xaa is any amino acid
MGLFAIIAAFAVLFVLVILILVKLYSANTTDVSPQLIDLKNELNELKTRQLESQQSSLAQQQQLFLNSQNQLGSQLSQMMNRMDQNYNSSQSNIAKQLDNSNRVINDIHTKLGSLEQTARNIQDIGNNISTLRDLLQPPKLRGNLGEFLLEDLLRQILPTANFKAKYSFSNGTQVDAVIKLADGIVPVDSKFPLESFQRLIEAGNDEDKKRFKREFISTVKKRIDEISGKYINPAEKTFDFALMYIPAENVFYEIIINDSLTNKEYELLNYAMEKHVIPVSPNSFYAYLMVLVFGLQGLQIEQEAKIIRGELSQVQNMLGKFSTEYSQVGKHLSNAIGKYNDSEKSVEKLNDRLNRITGQKAELIAE

SEQ ID NO: 49987 - DNA, 456 bp, Unknown
  Obtained from environmental sample
  misc_feature (1)..(456): n is a, c, g, or t
gtgagtgacagcgcgtggaacaaggcggtaattatcaacggttccaacggctaccgtttacccaccgaagcgcagtgggagtacgcggcgaggggcggcaacggcatgccctttaattacctttattcggggagcaatacggcaggcgacgttgcctggtatacggacaacagcggcaacataactcacgaagtgggcaagaaagctcccaactcacttggcttgtacgacatgagcgggaatgtgtgggagtggtgttgggactggtatggcagctactcaaatgaggcgcagaccaatccttccggaccggcaaccggttcttacaaagtgctgcgtggcggggcctggaacctggaagccgggggtgtgcgttcaatcatgcggaccaaccgcacccccaatgaccgatgggagagattgctcggcttccgggtggtgcgcccgagcgagtaa

SEQ ID NO: 49988 - protein, 151 aa, Unknown
  Obtained from environmental sample
  DOMAIN (1)...(148): Domain of unknown function (DUF323)
  misc_feature (1)..(151): Xaa is any amino acid
MSDSAWNKAVIINGSNGYRLPTEAQWEYAARGGNGMPFNYLYSGSNTAGDVAWYTDNSGNITHEVGKKAPNSLGLYDMSGNVWEWCWDWYGSYSNEAQTNPSGPATGSYKVLRGGAWNLEAGGVRSIMRTNRTPNDRWERLLGFRVVRPSE

SEQ ID NO: 49989 - DNA, 1143 bp, Unknown
  Obtained from environmental sample
  misc_feature (1)..(1143): n is a, c, g, or t
gtgttcggaacaaagtattccggggcgctcagctggaacgctagtgcgtctacgattaccgtcaacacgctcaagcacaacgtgttgtccatatccagcgatgttaagcagaacgggacgctcgtctccatagcgctggccgattcgctgccctacgagtatacgtattaccaccccaacttggcggtaaattttggcggcggcaagctcgatcccaaggccgtcaagcggagtttgcgggcgggcgtcgtcgattcagcgtttacgctgcagtacgacgagtcggcgcaggtgtcgtttatcctgaagcaggccgtggagccgccctatatagagtacagcgcgaagacccgcacgctcatgatttcgctcaagcctaagatcgagcagaagaagccgcctcaggcggcctctcaggtgccgcttgacgcctcgcttatccgcacgatagttttggatccggggcacggcggcaaggatccgggggcgatagggcctacgggggtcaaggagaaggatgtggtgctcggtatcgggctggagttgcgcactatgctcgagaaggccgggttcaaggtattcatgacgcgcgataaggatatttttataccgcttggggacaggactaaatttgctaatgagaaaaaggcggatctcttcgtgagcatccacgccgacgcggttggcggggacgccaagaagcgctcagcggcgcgcggttacaaggtctacttcctctcgcaggccaagaacgaggaagacaagatggtggctatgcgtgaaaacgccgtgatagagcttgaggacaaggacaagcgctccaactacaacgcgttgcaggacgtgctgataagcatagccggcgccgagtatctgcgggagagccaagatctttgcatattcatcgagcagtcgcttggggctaacgtcaagcagatacctcggctgcagctcggcgtcggccaggccaacttctgggtgctaaacggcgcgtacatgccctcggtgctcatagaggtgggcttcatatcgaatacggaggaggagaagctgctctccgacaagcggacgcagtttcagcaggcggcggcgctctccgaggccatagtgaagttcaagcagcagttcgagggggggcagtag

SEQ ID NO: 49990 - protein, 380 aa, Unknown
  Obtained from environmental sample
  DOMAIN (150)...(371): N-acetylmuramoyl-L-alanine amidase
  misc_feature (1)..(380): Xaa is any amino acid
MFGTKYSGALSWNASASTITVNTLKHNVLSISSDVKQNGTLVSIALADSLPYEYTYYHPNLAVNFGGGKLDPKAVKRSLRAGVVDSAFTLQYDESAQVSFILKQAVEPPYIEYSAKTRTLMISLKPKIEQKKPPQAASQVPLDASLIRTIVLDPGHGGKDPGAIGPTGVKEKDVVLGIGLELRTMLEKAGFKVFMTRDKDIFIPLGDRTKFANEKKADLFVSIHADAVGGDAKKRSAARGYKVYFLSQAKNEEDKMVAMRENAVIELEDKDKRSNYNALQDVLISIAGAEYLRESQDLCIFIEQSLGANVKQIPRLQLGVGQANFWVLNGAYMPSVLIEVGFISNTEEEKLLSDKRTQFQQAAALSEAIVKFKQQFEGGQ

SEQ ID NO: 49991 - DNA, 540 bp, Unknown
  Obtained from environmental sample
  misc_feature (1)..(540): n is a, c, g, or t
gtgagcgattcgcggcctataggggttttcgattcggggctggggggcctcacggtggccaaggagatattccgccttatgccccgagagcggataatctacctcggcgacacggcgcgcgtgccctacggcggcaaatccgaggagacgatccgccgcttcggccctgcaggacgcgagggtgctcttggacctcgacgtaaagatgctgatagtcgcgtgcaacacggtctcgtcggtggcgatagactatttggaacggcacatcaaggagatcccggtaataggcgtggttctgcccggggcgcgggcggcggccacgcgcagcgcggagaagcgggtcggagtcgtcggcacggcggcgacggtgagatcgggggcgtacgccaaggcgatccacagcatagatcccgacataaaggtttacgggaagccgtgccccctcttcgtgccgttggtcgaggaggggctcatagacagcgacatcacgcgtctcgccgtgcagcactacctctacgagatggtggatttggggattga

SEQ ID NO: 49992 - protein, 179 aa, Unknown
  Obtained from environmental sample
  misc_feature (1)..(179): Xaa is any amino acid
MSDSRPIGVFDSGLGGLTVAKEIFRLMPRERIIYLGDTARVPYGGKSEETIRRFGPAGREGALGPRRKDADSRVQHGLVGGDRLFGTAHQGDPGNRRGSARGAGGGHAQRGEAGRSRRHGGDGEIGGVRQGDPQHRSRHKGLREAVPPLRAVGRGGAHRQRHHASRRAALPLRDGGFGD

SEQ ID NO: 49993 - DNA, 711 bp, Unknown
  Obtained from environmental sample
  misc_feature (1)..(711): n is a, c, g, or t
gtgctcttggacctcgacgtaaagatgctgatagtcgcgtgcaacacggtctcgtcggtggcgatagactatttggaacggcacatcaaggagatcccggtaataggcgtggttctgcccggggcgcgggcggcggccacgcgcagcgcggagaagcgggtcggagtcgtcggcacggcggcgacggtgagatcgggggcgtacgccaaggcgatccacagcatagatcccgacataaaggtttacgggaagccgtgccccctcttcgtgccgttggtcgaggaggggctcatagacagcgacatcacgcgtctcgccgtgcagcactacctctacgagatggtggatttggggattgactgcctgatactgggatgcacccactatcctatattgatggaggtgatccagagcacggtgggtaaccgcatacagttggtggatagcgctctgtggacggctaaagaggctctccacataatgaaggcgatggggacggaatacccgtcgccgcaggcgccggcggagcagcaggaggcggttaaacgcgcggatcagttctccgtagaggcatcggaaggcttcgcggcaagccgatttttggtctccgacgtaacgccgaactttgagcaggtagcggagacgcttctgggcgcgagcctgccgagcatagagaaggtgtcggtggaggaactggaaaaggagttgtaa

SEQ ID NO: 49994 - protein, 236 aa, Unknown
  Obtained from environmental sample
  DOMAIN (1)...(162): Asp/Glu/Hydantoin racemase
  misc_feature (1)..(236): Xaa is any amino acid
MLLDLDVKMLIVACNTVSSVAIDYLERHIKEIPVIGVVLPGARAAATRSAEKRVGVVGTAATVRSGAYAKAIHSIDPDIKVYGKPCPLFVPLVEEGLIDSDITRLAVQHYLYEMVDLGIDCLILGCTHYPILMEVIQSTVGNRIQLVDSALWTAKEALHIMKAMGTEYPSPQAPAEQQEAVKRADQFSVEASEGFAASRFLVSDVTPNFEQVAETLLGASLPSIEKVSVEELEKEL

SEQ ID NO: 49995 - DNA, 1404 bp, Unknown
  Obtained from environmental sample
  misc_feature (1)..(1404): n is a, c, g, or t
ttgtggattggcttagagaaacggccgaggaagtatttgaccactgtatcatggtttatcaatggggcggacgggaagtatgaagcctggctttccaagggaaaggagagggagaaaagagaagaaggaagaggtaaagagcgtcaggatgtgtctgttaacaaagaactatgtgtcggggcttgggatgaattcaaggggtatgttgaaaggctgattgggctcagcggctatcttaacgcttcggagaaaactcccgccgaacgtttgttgaaagaacttgcgctgcggataaaggaaagacagcttgtctgcgccgccgccctgggttacgggctgctgtcggtattgcggtcagtaatcggaaaggccgacggaagccttgcggcaaacctcgcttttgagcattgggatttggaccgcaaacttaaagagcatttcagggttttcggcgcaaacgaagacgaagtctggcggcttggggaaatttgcaaggctgttttacgcaggaccggcgcggacaatccctcggcaattagtgacattgttgttaacaaaaaatccgccgcgtttagcgctgagagttttgccgcctcattattcattgataaccatccgcgtgaagatttccgctgcctcatcggcgtaaatgtttttaatgatgtgacatggttcaacaaggaagcttttgaaagcgccctgttctacggtaaactgttctttgtcctggaaggagattccgcaatgtcctgtattgacggggcaccactgccctggcatgacagggcggcgcgtattgccgaagtcaccgaagctatgaagaagacggaaattgactgcggttaccggctggacaaattgatacaactgctttcaggggacgaacccctggagccggcgccccaggggacgaagccaaaaaagacaagctctaaagtcgcagtccctgagacggcgccacaagtggcggcgccacaagtggcggcccaagagtcgcagcgaaaaaactcagcatctacaaagtctgcggtaaaaacgaccgcaacaaaaaagacggagccgaaaaagccggagactaaagcccaagagtcgcagcgaataaagtcagcatctgtaaaaccaaccgccctagagtcgcaacgaaaaaagtcagcccaagagtcgcagcgaataaagtcagcatctgtaaaaacaaccacagcgaaaaagccagctccagcaaaaaaaaccaccacagcgaagaagccaactcccgcaaaaaagacaaccaccacagcgaagaaaccagctcccgcaaaaaagacaagcaccgcagcgaaaaaaccagccccaagagtcgcagagaaaaaaggtagcagtagtaaaaccaaggctccaaaaggaaaaaaaagggatgaaacttaa

SEQ ID NO: 49996 - protein, 467 aa, Unknown
  Obtained from environmental sample
  misc_feature (1)..(467): Xaa is any amino acid
MWIGLEKRPRKYLTTVSWFINGADGKYEAWLSKGKEREKREEGRGKERQDVSVNKELCVGAWDEFKGYVERLIGLSGYLNASEKTPAERLLKELALRIKERQLVCAAALGYGLLSVLRSVIGKADGSLAANLAFEHWDLDRKLKEHFRVFGANEDEVWRLGEICKAVLRRTGADNPSAISDIVVNKKSAAFSAESFAASLFIDNHPREDFRCLIGVNVFNDVTWFNKEAFESALFYGKLFFVLEGDSAMSCIDGAPLPWHDRAARIAEVTEAMKKTEIDCGYRLDKLIQLLSGDEPLEPAPQGTKPKKTSSKVAVPETAPQVAAPQVAAQESQRKNSASTKSAVKTTATKKTEPKKPETKAQESQRIKSASVKPTALESQRKKSAQESQRIKSASVKTTTAKKPAPAKKTTTAKKPTPAKKTTTTAKKPAPAKKTSTAAKKPAPRVAEKKGSSSKTKAPKGKKRDET

SEQ ID NO: 49997 - DNA, 834 bp, Unknown
  Obtained from environmental sample
  misc_feature (1)..(834): n is a, c, g, or t
atggaaaacatgtctccgtacaatgataagagtgtttctttacaatttaaacgcccccggttgaacgaactgtttgcggaggctgtgaaattccctgtagttgtggtatgcgcgggcgcgggttacggcaaaacatacgcggttcatgatttcgcgcaggagtatcaggcgactacattttggctgcagctttcagagcgcgataacacaagcgcgcgtttttgggaaagttatatacatactttgacaaagattaacgcgcctcttgccaaagcattaaccaaaatgggttttcccgacacaaaagaaaaaataaatcattatctggatttattagacgaacttgtagagaaaaaaaggcgaatcattgtcatggatgattttcattgcattgaagagccttccgtaatcaggtttatagaggagtgtattcttttcaaaatgcctccggggacgtctgtatttcttatttcccgcactgttcccgatattaaaacagctaacgacgcttacgggaaaaaaatatttaatataaccgaagatgatcttcgctttacggaaagcgaacttgcccagtattttcgcagcaaaaatatttccccggcgtatgaaaacttgcgcgaaatcatgcgggataccggcggctgggcgtttgcgattaactttatcgcgcagtcttttcaaaaagcgccgggatacagcggttatgtgcgtaacgcgctcaggacaaatatattcggtataatcgagacaggactttggaatgatatttccgaccgcttgcaatttttttactgcgtctttctcttattggtcatctgtctatggatttaa

SEQ ID NO: 49998 - protein, 277 aa, Unknown
  Obtained from environmental sample
  misc_feature (1)..(277): Xaa is any amino acid
MENMSPYNDKSVSLQFKRPRLNELFAEAVKFPVVVVCAGAGYGKTYAVHDFAQEYQATTFWLQLSERDNTSARFWESYIHTLTKINAPLAKALTKMGFPDTKEKINHYLDLLDELVEKKRRIIVMDDFHCIEEPSVIRFIEECILFKMPPGTSVFLISRTVPDIKTANDAYGKKIFNITEDDLRFTESELAQYFRSKNISPAYENLREIMRDTGGWAFAINFIAQSFQKAPGYSGYVRNALRTNIFGIIETGLWNDISDRLQFFYCVFLLLVICLWI

SEQ ID NO: 49999 - DNA, 741 bp, Unknown
  Obtained from environmental sample
  misc_feature (1)..(741): n is a, c, g, or t
ttgctggcagagatcccagaggcgatgaggagagaggccgtctgccttgccgcattgcaacacagtaatccgtattctactagtagtgtcatggcaaacgtccccgaagcggcgaagaccgaagctgtctgccttgccgccgtgcaaaataacggcctgatgcttaaagtcgtccccgccgcgaagaagaccgaagccgtctgccttgccgccgtgcaaaatagcggctgggcgcttgaattcgtccccgaggcgctgaagaccgaggccctctgccttgccgctgtgcaaaatagcggctgggcgctgcaatacgtccccgaggcgctgaagaccgaagagctttgtcttgccgcttttattgaaagcgataaggcgcgggaatatattccggaaagcttaaaagcttcagtcgatgcggcgtttaaaaacgctttcacgacagaggaactctgccttgccagagttcagcaaagcggaagtgcgcttcgtcatgtccctgaagagtttaagaccgaggcagtctgccttgccgcagtgcagcaagacggccatttgctggaatatgttccagtaggaatgaggacagaagccatttgtattgaagcggtgcggcatggtctttctataaacttttccacttggagaacgccgtcagagtggcaccttgtaccttttgagctacagggcaaagtggtagcggcgctgaacttgtccggaagtcatccatggctcaggtag

SEQ ID NO: 50000 - protein, 246 aa, Unknown
  Obtained from environmental sample
  misc_feature (1)..(246): Xaa is any amino acid
MLAEIPEAMRREAVCLAALQHSNPYSTSSVMANVPEAAKTEAVCLAAVQNNGLMLKVVPAAKKTEAVCLAAVQNSGWALEFVPEALKTEALCLAAVQNSGWALQYVPEALKTEELCLAAFIESDKAREYIPESLKASVDAAFKNAFTTEELCLARVQQSGSALRHVPEEFKTEAVCLAAVQQDGHLLEYVPVGMRTEAICIEAVRHGLSINFSTWRTPSEWHLVPFELQGKVVAALNLSGSHPWLR

SEQ ID NO: 50001 - DNA, 891 bp, Unknown
  Obtained from environmental sample
  misc_feature (1)..(891): n is a, c, g, or t
ttggcccccataaattgggaaattatagaccccattaaaatatacaagtctttttcggaaaaacagggaaccataaaatacggcagaatatcagccctgctttcaaaagagagcatagatttggtttgcgaccacgtgcacggctcaaccaggggcaggcccgccgcaatgctgaataatccgcaatgcttaaccagcctgcgcaccgaaacagaccccttatttggcggcattgccccagaaccatcttccaaaaatctggaaggggtaaaacagtttttaaacgcaagcaaaagccgttttaggcttggcgcaatccttgatccggatggcgaccgtattcgcttctatgacggttcccgcgaaatagacatgaacagttttggagcaatagcctttcactatatggtcacttggcgcaaggaagagggcgttttggcaaagtccgttgccacctcaaatttcgcaaatatcatagccgcaaaattgggcattccggtgatggaaaccccagtcggctttaaaaatttccgcccctggctaaaaagaaatgctaaccccaaggccctcatagcctttgaggaatccgatggcataactggcttaaacaataccctggaaaaagacgccatgttcgggcttttgatagctttggagataatggctgtaacgggtaagaatttgggcgaatatttagaccttttatatacggaatatggccgtctttaccccgaacgttcgggttttgaagtggaaaaatccatggttggcgatccactcctggcaaaagtggcggaaatcgcaaaatccgcacagcccggggcaaaaatctccattggcaaaaaaagcaaggttgtacgcgagctattgaccatagatggcgttaaataa

SEQ ID NO: 50002 - protein, 296 aa, Unknown
  Obtained from environmental sample
  misc_feature (1)..(296): Xaa is any amino acid
MAPINWEIIDPIKIYKSFSEKQGTIKYGRISALLSKESIDLVCDHVHGSTRGRPAAMLNNPQCLTSLRTETDPLFGGIAPEPSSKNLEGVKQFLNASKSRFRLGAILDPDGDRIRFYDGSREIDMNSFGAIAFHYMVTWRKEEGVLAKSVATSNFANIIAAKLGIPVMETPVGFKNFRPWLKRNANPKALIAFEESDGITGLNNTLEKDAMFGLLIALEIMAVTGKNLGEYLDLLYTEYGRLYPERSGFEVEKSMVGDPLLAKVAEIAKSAQPGAKISIGKKSKVVRELLTIDGVK

SEQ ID NO: 50003 - DNA, 837 bp, Unknown
  Obtained from environmental sample
  misc_feature (1)..(837): n is a, c, g, or t
ttgtcctccatgcagactaccgaagtcaacttgccgtttatcaccgccgaccaaagcggtccgaagcatctgcaaaaatcgctgacacgggcaaagtttgaacagatggtcgaagatcttcttgagcgttcaaaagaaccttgcaaaaaggcgctttcagatgcgggacttaaagccgaacaaattgacgaagtcatccttgtcggcggttccacgcgtattccggcagttcagcagattgtcaaagacctgtttaaaaaagaacctaataaaggcgttaaccccgatgaagctgtcgcggtaggtgcggctattcagggcggtattctcggcggcgacgttaaagacgtattgttacttgacgttactcccctttcactcggtatcgagacacttggcggcgtaatgacaaaactcattacacgtaacacaacgattcccacacgcaagagccaaatcttctccaccgccgcggacggacaaactgccgtatctattcaagtcttgcagggcgagcgcgaaatggcgaatcagaaccgcgtgcttggtcgcttcgatcttgtaggcatacctcccgctccgcgcggagttccgcagattgaagtaacttttgatattgacgcanacggtattgttcacgtcagcgcaaaagatttaggaaccggtaaagaacaaaaaatccgcatcgaaagttccagcggcttaagcgattcggacattgaccgcatggtnaaagaagcggaactccacgccgaggaagataaaagagaacgcgaaaaagcccgaagtgcgcaacgaagccgactcgatgatttacgccacggaaaaaaaacataa

SEQ ID NO: 50004 - protein, 278 aa, Unknown
  Obtained from environmental sample
  DOMAIN (1)...(277): Hsp70 protein
  misc_feature (1)..(278): Xaa is any amino acid
MSSMQTTEVNLPFITADQSGPKHLQKSLTRAKFEQMVEDLLERSKEPCKKALSDAGLKAEQIDEVILVGGSTRIPAVQQIVKDLFKKEPNKGVNPDEAVAVGAAIQGGILGGDVKDVLLLDVTPLSLGIETLGGVMTKLITRNTTIPTRKSQIFSTAADGQTAVSIQVLQGEREMANQNRVLGRFDLVGIPPAPRGVPQIEVTFDIDAXGIVHVSAKDLGTGKEQKIRIESSSGLSDSDIDRMVKEAELHAEEDKREREKARSAQRSRLDDLRHGKKT

SEQ ID NO: 50005 - DNA, 648 bp, Unknown
  Obtained from environmental sample
  misc_feature (1)..(648): n is a, c, g, or t
ttgaatctctacttttgtgccaaaaaccgcgtccttaaacggtatttcaatatcgtagcgaagattcgctccctgtcttacaccgcttcctccgcttctgcgaaagcctccaccgcctccaaagaaactttcaaaaatactgccaaagccgccttcgccaaaaatatcttcaaagccccggaaattactccaatcatggctctgaccaccgcccatgccctcaactccggcaaaaccgaattggtcataggcggattttttctggtcatcaccaagaatttcataagcttcggtcgcttccttaaatttttcctcagcctgcttatcgccaggatttttatcaggatggtactgaacagcgagcttacgatatgccttttttatctcgtctttagaggcgtttttctgtatacccagaacttcgtaataatcccgcttagccattacctagttcactacctcatagtccgcatcttcagcgcccttggtattatcgccgcccataggaccaccgccttggtttccgcttccgcccatgttgggatcaaaaccgccgccgggtcctgcgccttgatcgccaccttgctgtccaccagcgccttgctgtttgtaaatttcttcggcgattttgtaagatgcctgttttag

SEQ ID NO: 50006 - protein, 215 aa, Unknown
  Obtained from environmental sample
  misc_feature (1)..(215): Xaa is any amino acid
MNLYFCAKNRVLKRYFNIVAKIRSLSYTASSASAKASTASKETFKNTAKAAFAKNIFKAPEITPIMALTTAHALNSGKTELVIGGFFLVITKNFISFGRFLKFFLSLLIARIFIRMVLNSELTICLFYLVFRGVFLYTQNFVIIPLSHYLVHYLIVRIFSALGIIAAHRTTALVSASAHVGIKTAAGSCALIATLLSTSALLFVNFFGDFVRCLF

SEQ ID NO: 50007 - DNA, 1128 bp, Unknown
  Obtained from environmental sample
  misc_feature (1)..(1128): n is a, c, g, or t
atggctaagcgggattattacgaagttctgggtatacagaaaaacgcctctaaagacgagataaaaaaggcatatcgtaagctcgctgttcagtaccatcctgataaaaatcctggcgataagcaggctgaggaaaaatttaaggaagcgaccgaagcttatgaaattcttggtgatgaccagaaaaaatccgcctatgaccaattcggttttgccggagttgagggcatgggcggtggtcagagccatgattggagtaatttccggggctttgaagatatttttggcgaaggcggctttggcagtatttttgaaagtttctttggaggcggtggaggctttcgcagaagcggaggaagcggtgtaagacagggagcgaatcttcgctacgatattgaaataccgtttaaggacgcggtttttggcacaaaagtagagattcaatattcacataacgaggcttgtacaacatgtaaaggttccggcactgcggacggatcaggaaaaaaaacctgtccgacttgccgtggctcaggacaggtgcggcacagtcagggatttttctcggtagcaaccacctgtcatagctgccacggcgaagggtatataatagaaaaaccatgtagcgactgcagcggttcaggaacccagaaaaaacggcaaaaaataatggttaccatacccgcaggcgtggagaacggcaagcgtgtagtaattcccaaacagggcgacgcaggacccaacggaggagcttccggtgatttgtatgtgttcatcagaataaaaccgcatgaatactttgaacgtcaaggaactgatctttactgcgctgttccgatttcaatatgtcaggctgcgcttggcgctgatattcacgtaacaacattggacaataaaacaatcaaggttaaagtacctgccggtatccagaccggaaaaatgctccgtatccgtgatgaaggaatcccttcaggaagccagcgaggcagtctctatattaaacttatggtacaaataccggaaaaactttcccgccgaggcaaggaactgctggaagaactggcaaaagttgaaggtcagaacgacaatcccaaacctattgcgctttcactgctttcggaaaattaa

SEQ ID NO: 50008 - protein, 375 aa, Unknown
  Obtained from environmental sample
  DOMAIN (142)...(222): DnaJ central domain (4 repeats)
  misc_feature (1)..(375): Xaa is any amino acid
MAKRDYYEVLGIQKNASKDEIKKAYRKLAVQYHPDKNPGDKQAEEKFKEATEAYEILGDDQKKSAYDQFGFAGVEGMGGGQSHDWSNFRGFEDIFGEGGFGSIFESFFGGGGGFRRSGGSGVRQGANLRYDIEIPFKDAVFGTKVEIQYSHNEACTTCKGSGTADGSGKKTCPTCRGSGQVRHSQGFFSVATTCHSCHGEGYIIEKPCSDCSGSGTQKKRQKIMVTIPAGVENGKRVVIPKQGDAGPNGGASGDLYVFIRIKPHEYFERQGTDLYCAVPISICQAALGADIHVTTLDNKTIKVKVPAGIQTGKMLRIRDEGIPSGSQRGSLYIKLMVQIPEKLSRRGKELLEELAKVEGQNDNPKPIALSLLSEN

SEQ ID NO: 50009 - DNA, 1224 bp, Unknown
  Obtained from environmental sample
  misc_feature (1)..(1224): n is a, c, g, or t
gtgaatgaagccctgaacagggaaaaaccgacctggcccatgcatacagtgcttgatttggcgtgcaacgcctgtgtgcgctcccattatatggtaaccaacgcctgtcttgcctgcgttgcccggccctgtcttttgaactgcggcaggaaggcgattgaggtcaaagagggcagggcgcgtatcgacagcgaaaaatgcgtcagttgcggcctgtgcatgcaaaattgtccctatcacgcaatcataaaaattcccgtgccatgcgaagaaggatgtccggtaggagccatcagtaaaaacgaaagcggcagggagcgcattgattatcacaaatgcatcaattgcggcaactgtatgcgcgaatgtccctttggcgcgatgatggacaagagccaggtggttgatgttattaaacatataatgaacaagaaaaacgtggtcgccatgtacgcgcctgccgtagcggcccagttccgggttgagcctggccggcttgaaggggcgctgcttgcagcgggcttcacaaacgtgcttgaagtcgccctgggtgcggatattacggcggaaaaggaagccgctgaatttgtagagcgcatggaaaaaggcgaaaagatgatgacaacttcctgctgccccgcgtttgtgcggactatccgccgccatataccggaactcaatgactgcgtttccgacacccgaaccccaatgcactacaccgcggagttagcaaaaaaagaataccccggctgcatcaccgttttcatcggcccctgcctgcccaagcggcgggaaggcatggatgacgaatttgtggattacgttatctccattgaggaactgggcgcgttttttgtggcaaaggagatcgacgtggcgcaggcagccccggtacctggagccgcgctgcccacctcctcggggaggaatttcgccagatccggcggcgtggcccaggcagtgagggcgcggctcaaagacccttcgatattgagagaaactgtcattgacggccttgataaagaaggaatgaaacgcctcgccgaattcggcaagataaactcaggcaagcttccccacacgccagaaacacccaaccttatcgaagtaatgacatgccagggcggatgtatcgccgggccttcggtagttaccaatccaaaagtcgccctcgcgcagttgtcaaaatacgcggaatttggggcgaaggtaaataacggataa

SEQ ID NO: 50010 - protein, 407 aa, Unknown
  Obtained from environmental sample
  DOMAIN (134)...(381): Iron only hydrogenase large subunit, C-terminal domain
  misc_feature (1)..(407): Xaa is any amino acid
MNEALNREKPTWPMHTVLDLACNACVRSHYMVTNACLACVARPCLLNCGRKAIEVKEGRARIDSEKCVSCGLCMQNCPYHAIIKIPVPCEEGCPVGAISKNESGRERIDYHKCINCGNCMRECPFGAMMDKSQVVDVIKHIMNKKNVVAMYAPAVAAQFRVEPGRLEGALLAAGFTNVLEVALGADITAEKEAAEFVERMEKGEKMMTTSCCPAFVRTIRRHIPELNDCVSDTRTPMHYTAELAKKEYPGCITVFIGPCLPKRREGMDDEFVDYVISIEELGAFFVAKEIDVAQAAPVPGAALPTSSGRNFARSGGVAQAVRARLKDPSILRETVIDGLDKEGMKRLAEFGKINSGKLPHTPETPNLIEVMTCQGGCIAGPSVVTNPKVALAQLSKYAEFGAKVNNG

SEQ ID NO: 50011 - DNA, 651 bp, Unknown
  Obtained from environmental sample
  misc_feature (1)..(651): n is a, c, g, or t
atggcgggccgtttcgttaggaatttcaacgattattcggtagggttggcgaagttcttcgttgacacctttgtccagcttacaggaaaccccaatgcgattcttgctacagtaaactacaacacaggcgatcaggatttcagcgcccagctcaccacagttcgcgcccagaacccggacgtaattttcgctcccgggaactataccgaatcggcgctggttattaagcaggcgagggagcttggtattaacacgccgataatcggcggcgatacctgggaaacccctgaatttatcgacgtgggcggcgaccgtgtgaatggctccgttttctcaaccttctttgccgccgaattcgcgggcactccacaagctaaaaccttccttgaggaatatacaaagcaatacaacaaggaacccgccgcggtaaccgccctgggctatgacggctatctggttgcccttgacgccatcaagagggctggctctaccgacccggcgaaaatccgcgacgcagttgccaaaaccgccaattttatcggcgcgacaggaactacaacccttgacgcaaacggcgacgccaccaagagcgcctacatcaaaggtgttgaaaacggcaggtttgttttcaagactatcgttaatccctag

SEQ ID NO: 50012 - protein, 216 aa, Unknown
  Obtained from environmental sample
  misc_feature (1)..(216): Xaa is any amino acid
MAGRFVRNFNDYSVGLAKFFVDTFVQLTGNPNAILATVNYNTGDQDFSAQLTTVRAQNPDVIFAPGNYTESALVIKQARELGINTPIIGGDTWETPEFIDVGGDRVNGSVFSTFFAAEFAGTPQAKTFLEEYTKQYNKEPAAVTALGYDGYLVALDAIKRAGSTDPAKIRDAVAKTANFIGATGTTTLDANGDATKSAYIKGVENGRFVFKTIVNP

SEQ ID NO: 50013 - DNA, 1074 bp, Unknown
  Obtained from environmental sample
  misc_feature (1)..(1074): n is a, c, g, or t
atgagggatgaattaaaggatgaattaaaggggttttacggcgtattaaaatcttatgacgaatacttgcgcttcgtgtttttaaccggagtgaccaaattttcccatgtcagcattttctccgatttgaaccacctttatgatctgacgcttgacccggattatgcggacatctgcggaataacccaggaagaggtggagcaaaacttcgggcctgaaatagagacagttcttgaaaacacgggcaaaagccgggaaacttatcttgaaaaactgcgccggttttataacggctaccggttttcggaaaaggcgcttgcggtgtataacccattcggcctgcttaatcattttaagaaaaaaggcaaatttctatcctactggtatgaaacgggaacgccaacttttttaattaacctcattatcaggcaaaagataaacattattgatctgacaaatatgccggttgggtatgaagacttccgtaaatatgacattgaaacgatgaaggctgaaccgcttttgtaccagagagggtatttgacgataaaggattatgatgaggagctaaaccagtatatccttgattatccgaatgaagaagtacgcgcgtctttttcaaagtcgctgttggaacagtatttacagccatccggtgaagcttcccgcaggttaaacacccggcttccggctgcgctgtttaaaggcgatgttgacggggcgatggattcgctgaaatcatttttggcgtccataccgtatgacataatcagggagagtgagaaatattaccagactgcaatacacttgatatttacgatgctggggcttaactgccgctcggaagtgcggatagcttcggggcgtatagatacacttgttgagacgaaaaataatgtatattgctttgagtttaagttaaacgggaccgcggaagaagcgttgacgcagatagacacgaaagagtatttattgccctgggccgtgagcgggaaatatttgtataaaatcggcgttgactttgattacgagaaacgcaatatcggccattggctcgtcaaaacggcgatatga

SEQ ID NO: 50014 - protein, 357 aa, Unknown
  Obtained from environmental sample
  DOMAIN (1)...(351): Protein of unknown function (DUF1703)
  misc_feature (1)..(357): Xaa is any amino acid
MRDELKDELKGFYGVLKSYDEYLRFVFLTGVTKFSHVSIFSDLNHLYDLTLDPDYADICGITQEEVEQNFGPEIETVLENTGKSRETYLEKLRRFYNGYRFSEKALAVYNPFGLLNHFKKKGKFLSYWYETGTPTFLINLIIRQKINIIDLTNMPVGYEDFRKYDIETMKAEPLLYQRGYLTIKDYDEELNQYILDYPNEEVRASFSKSLLEQYLQPSGEASRRLNTRLPAALFKGDVDGAMDSLKSFLASIPYDIIRESEKYYQTAIHLIFTMLGLNCRSEVRIASGRIDTLVETKNNVYCFEFKLNGTAEEALTQIDTKEYLLPWAVSGKYLYKIGVDFDYEKRNIGHWLVKTAI

SEQ ID NO: 50015 - DNA, 1239 bp, Unknown
  Obtained from environmental sample
  misc_feature (1)..(1239): n is a, c, g, or t
ttgctctttgaatcgctattctttcaactgaaacccatgaaaaattttaccggcattccggtgtccgcaggggtagcttacgcgaaggcctttgtatacaccgtagatgaaactctggaaatcccccatcacggcgtcagcgaggcggatgtatccgccgaattgaaacgcctgaaaaacgccatttccgaggccgtaaaagaagcgcagtccctgctcgacagggccgggcgggaaatgagccaggaacaggcggatatttttcaggcacagctgctcatgatggaggatgctgattttcatgatcagatgaataacaggctcagggaaagcctgtgcaacgcggaatgggttgtatgggaagtttcccatgagttaagccagaaactgctgcaatcgccggatgccgtcctccgggagcggtccgtcgatattgacgacgtttcccgcaggattatagactgcctgctcagcgacgcgaaaggccgctccccccttgccgatcttaccgaggaagtgatcctggttgcccaataccttatgccctccgacatggtgaatctgagcaaggactgtgttaagggcattgtcatggacgaggggagcagcacctgccatacggcgattctggcgagggcgtttaacattccggcggttatgggcatctccggtttttcaagaattgcgaatgacggcgagccgctggtcatgaacgggttatcggggcttgtcgtgacaaaccccgacaaacagaccctggcgcggttcagaaccgatgaaaaacagcagcgaagacagacggaccggcttagcggcctgcgtgaacttcccgccgaaacgaccgacggctgcatggtggcgatcaaggccaatatcagcctgccggaagaagcggaaacccttaaacactacggggccgaaggcatcggcctgtaccgctccgaattcctttatattacgccgggcaaagcgccggatgaggaaacccaatacagggcctacagccatgttttaaaaacgatgggggatcttcccgtcacgatcaggactatggacatgggcggcgacaagattgtccctgaactccacgccgtcgcccagatcgacagcgagaaaaaccccctgctgggatggagggctatacggctgtccctcgccaacccggaaatgttcaaagtgcagttacgcgcaattctcagggcaagcgtccacggcaacgcgcgtatcatgttcccatga

SEQ ID NO: 50016 - protein, 412 aa, Unknown
  Obtained from environmental sample
  DOMAIN (267)...(412): PEP-utilising enzyme, TIM barrel domain
  misc_feature (1)..(412): Xaa is any amino acid
MLFESLFFQLKPMKNFTGIPVSAGVAYAKAFVYTVDETLEIPHHGVSEADVSAELKRLKNAISEAVKEAQSLLDRAGREMSQEQADIFQAQLLMMEDADFHDQMNNRLRESLCNAEWVVWEVSHELSQKLLQSPDAVLRERSVDIDDVSRRIIDCLLSDAKGRSPLADLTEEVILVAQYLMPSDMVNLSKDCVKGIVMDEGSSTCHTAILARAFNIPAVMGISGFSRIANDGEPLVMNGLSGLVVTNPDKQTLARFRTDEKQQRRQTDRLSGLRELPAETTDGCMVAIKANISLPEEAETLKHYGAEGIGLYRSEFLYITPGKAPDEETQYRAYSHVLKTMGDLPVTIRTMDMGGDKIVPELHAVAQIDSEKNPLLGWRAIRLSLANPEMFKVQLRAILRASVHGNARIMFP

SEQ ID NO: 50017 - DNA, 375 bp, Unknown
  Obtained from environmental sample
  misc_feature (1)..(375): n is a, c, g, or t
atgaggcaggccttgttatgcgacacattcttcaccggctgcaacgcgatcagcgaggacggccagcttgtaaacatagatggctttggcaaccgcgtggcggcgatgacctttggcccgcggcaggtaatcgttgtcgcgggaatgaataaaatcgccaaaaccgtggatgacgcccttgtccgcgcgcggaccatcgccgctcccgccaacacccagcgttttccggacagcaaaactccctgtaatgaaacaggaagctgcgccgactgtaagtccccggactcaatttgcagtttcttcgtaacgaccagactctgcaaacccgccggcaggattaaagtgattttggtaggacaagacctgggactgtaa

SEQ ID NO: 50018 - protein, 124 aa, Unknown
  Obtained from environmental sample
  DOMAIN (1)...(124): Protein of unknown function (DUF1121)
  misc_feature (1)..(124): Xaa is any amino acid
MRQALLCDTFFTGCNAISEDGQLVNIDGFGNRVAAMTFGPRQVIVVAGMNKIAKTVDDALVRARTIAAPANTQRFPDSKTPCNETGSCADCKSPDSICSFFVTTRLCKPAGRIKVILVGQDLGL

SEQ ID NO: 50019 - DNA, 306 bp, Unknown
  Obtained from environmental sample
  misc_feature (1)..(306): n is a, c, g, or t
gtgaggaattttttattattgtctgaaggagtttttatgagtacggcgaaattgcttcgaaaccggaaacttggcgcgaaagtcacgcgggcgctgaaagagcgttattttgaggcctggtattttgacgagccggtcgaagccctcgctaaaattttatccctcattccgcctgagcacaccgtctcatggggcggatcccagacattgggcgagttaggcgtaaccgagcgcgtggcccttgagggctataaggtcattgaccgggacaaagcggcggacaggcaggaacggttgagcttatga

SEQ ID NO: 50020 - protein, 101 aa, Unknown
  Obtained from environmental sample
  misc_feature (1)..(101): Xaa is any amino acid
MRNFLLLSEGVFMSTAKLLRNRKLGAKVTRALKERYFEAWYFDEPVEALAKILSLIPPEHTVSWGGSQTLGELGVTERVALEGYKVIDRDKAADRQERLSL

SEQ ID NO: 50021 - DNA, 678 bp, Unknown
  Obtained from environmental sample
  misc_feature (1)..(678): n is a, c, g, or t
atgaacttactggcaatagacgccgcctgttccgttctttcagtcgccgtttcgcgcgggcaagattttttttatacggatactgaggcgggaatgaaacattcggagcttgttatggatataataaatacccaaactgaaaaagccggccttaaaccatgcgatttaaacggtattctttgtatgggcggtcccggttcctttaccggcctccgtatcggtttttcaattgccaaggggcttgcgctctcccttaacataccctttgtgccaattccgacgcttgaatgcataacatattccgcttccggcatgtctcttcccgtaattcaggcaagaaaggacgcctttttgtttgcgctttttgacggctcaaggcgtattacggacgacagagacggaaatacaaaccatatcgcggaagtaattcgggaaaatttacataaaaccgaaaaaataagcattacgggccctgcaacggccgctgtttatgacaccctgcccgctgtgttaaagcctttttgcggatgttcaaacaataataccggatacgcgaaggaattaataagcattgcacaaaagaaaaatttgttttataataaaaatgacgcgtatttatattccggtcctgaatatataagaaaaacagacgctgaacttaatttattacggaactga

SEQ ID NO: 50022 - protein, 225 aa, Unknown
  Obtained from environmental sample
  DOMAIN (19)...(222): Glycoprotease family
  misc_feature (1)..(225): Xaa is any amino acid
MNLLAIDAACSVLSVAVSRGQDFFYTDTEAGMKHSELVMDIINTQTEKAGLKPCDLNGILCMGGPGSFTGLRIGFSIAKGLALSLNIPFVPIPTLECITYSASGMSLPVIQARKDAFLFALFDGSRRITDDRDGNTNHIAEVIRENLHKTEKISITGPATAAVYDTLPAVLKPFCGCSNNNTGYAKELISIAQKKNLFYNKNDAYLYSGPEYIRKTDAELNLLRN

SEQ ID NO: 50023 - DNA, 456 bp, Unknown
  Obtained from environmental sample
  misc_feature (1)..(456): n is a, c, g, or t
ttgacgagatggacagtggcggagtgcttcctgattgaattccgctccgaatcaccgcaggatactttctctcttggacaacgtatagcttcttttcttacggcaggctccgtagtcgcccttcagggagagttgggaagcggtaaaacatatcttgttaaaggcatcgcaaaagggcttggcattacggaaaccataaccagcccgacttatacaataataagcgaataccggtcctcccctgttctgtaccacattgacgcctaccgtcttttaaacgatgaggactttgaaaatttgggcggcacagaaataattaactcagggggaatttccctgattgaatggagcgagcgtattccaaaatcactgccgcgggaattaattacaatcattttaaaaataacgggaccagtctccagattaattaaaataaacgggctggaaaaaatatga

SEQ ID NO: 50024 - protein, 151 aa, Unknown
  Obtained from environmental sample
  DOMAIN (22)...(143): Uncharacterised P-loop hydrolase UPF0079
  misc_feature (1)..(151): Xaa is any amino acid
MTRWTVAECFLIEFRSESPQDTFSLGQRIASFLTAGSVVALQGELGSGKTYLVKGIAKGLGITETITSPTYTIISEYRSSPVLYHIDAYRLLNDEDFENLGGTEIINSGGISLIEWSERIPKSLPRELITIILKITGPVSRLIKINGLEKI

SEQ ID NO: 50025 - DNA, 1146 bp, Unknown
  Obtained from environmental sample
  misc_feature (1)..(1146): n is a, c, g, or t
atggatttacaggattaccgggcgcatatagacaaggtagacgatcagcttttatcgctgttcaaagagaggatgggcatatccggccaaattgcccagttcaagaaagagcatggacttcaggctctggacgccacacgggagagggaaaagttagccgacattggtgaaaaggccggcgatgatattcgttctttcgcgtatattttgtacacgacgctgtttgagataagccgcgcccatcaggtgaatattataaacgccgaatccgaactaaataaaattatctccgaagcggtggaacacacggaacgggtgttcccccagcacgctcttgtagcctgtcagggcgtggagggtgcgtattctcagatcgcctgtgacaggctgtttgccgatcctaacattttgtatttcactggctttgacggagtattttctgcaatccgcgacggactttgccaatacgggatattgcctctggaaaacagcacagccggctctgtcaatctggtatacgatcttatgatgaagtacagtttcaagatcgcgcggagcgtgcggcttaaaatcgatcataacctgctggcgaaggcaggcataaaaaaagaaaacatccgcgaaattttctcgcatgagcaggcaattcaacaatgcgccgggtacctgaaaggactcggcaagaacgtaaaagtcaccaccgtcaccaataccgccgaagccgcgaagatggttgcggaatccgatcggaacgacgttgcggcccttgcctcccattcgtgctgtgatttgtacgccctgaaatgcctggaaagctcggtacaggacaggggcaataactacacgcgcttcatctgtatctccaagaacctcgaaatatatccgggagccgaccgtaccagcatcatgctgaccaccgctcacaagcccggttcgctgtacaaggtgctcggcctgatatacgcccttggcgtgaatgtcgtaaaacttgaaagccgcccgattcccgaccgcgatttcgagttcatgttttatttcgatcttgaaacgtcggtatattcaaaaaaattcagccagcttatgtgcgaactggaaaatttatgcgaggagtttcactatctcggaagttacacagagattgtttga

SEQ ID NO: 50026 - protein, 381 aa, Unknown
  Obtained from environmental sample
  DOMAIN (7)...(85): Chorismate mutase type II
  misc_feature (1)..(381): Xaa is any amino acid
MDLQDYRAHIDKVDDQLLSLFKERMGISGQIAQFKKEHGLQALDATREREKLADIGEKAGDDIRSFAYILYTTLFEISRAHQVNIINAESELNKIISEAVEHTERVFPQHALVACQGVEGAYSQIACDRLFADPNILYFTGFDGVFSAIRDGLCQYGILPLENSTAGSVNLVYDLMMKYSFKIARSVRLKIDHNLLAKAGIKKENIREIFSHEQAIQQCAGYLKGLGKNVKVTTVTNTAEAAKMVAESDRNDVAALASHSCCDLYALKCLESSVQDRGNNYTRFICISKNLEIYPGADRTSIMLTTAHKPGSLYKVLGLIYALGVNVVKLESRPIPDRDFEFMFYFDLETSVYSKKFSQLMCELENLCEEFHYLGSYTEIV

SEQ ID NO: 50027 - DNA, 1002 bp, Unknown
  Obtained from environmental sample
  misc_feature (1)..(1002): n is a, c, g, or t
ttgagggctgcctgccggcatcaaatcgacatggatgaactaagggccttccttaaacgcagggcacctgggcaaaacgacatttccacggcgcgagcggaagaagacgcgccggagattttgtcagggctggtggacggcattacttgcggcgcgccgcttgcaataatcatacgcaataaagatgcccgctccgttgattaccgcgaactacgggatattccgcgtccgtcccacgccgattttgccgcgcacataaagtatggcgggtttcaggatgtggcgggcggcgggcatttttccggcagacttaccgcgcccttgtgcgccgccggcgggatatgcatacaaatactgcgcggcctgggagtcggcattggagcgcatatattgcggattggcaacgcgcaagacgatccctttgaccctgtggctgtatcaagcgcggatttcgaactaattcaaaaaaacccgctgcctgtactcaagcctgaagcgggtgaggcaatgagacaacaaattctggaagcaaaggaaaaaggcgactcggtcgggggcattgtcgagtgcgccgcaatcgggctgcccattgggttaggtgatccgatgtttgacggcattgagaaccgtatcgccggaattgtcttcggcataccgggcgtaaagggcgttgaattcggaagcggcttcgccgttgccggacacaggggatctgaaaacaacgacagcttttttatggacggggaaaaggtaaaaacacgcacaaataactcgggcggcatactggggcggaataacaaacggaatgcctgtcctgttccgcgcggcgttaaacccacgcggtccattagtttggatcaggacagcgtcagcctgtcgcggtcgggaaacgctgttttacagattaaaggccgccatgatccctgtattgtcccccgcgccctgccctgcgtggaagccgcggcggccatcgcgttatacgacgcttttttggatcgataa

SEQ ID NO: 50028 - protein, 333 aa, Unknown
  Obtained from environmental sample
  DOMAIN (1)...(333): Chorismate synthase
  misc_feature (1)..(333): Xaa is any amino acid
MRAACRHQIDMDELRAFLKRRAPGQNDISTARAEEDAPEILSGLVDGITCGAPLAIIIRNKDARSVDYRELRDIPRPSHADFAAHIKYGGFQDVAGGGHFSGRLTAPLCAAGGICIQILRGLGVGIGAHILRIGNAQDDPFDPVAVSSADFELIQKNPLPVLKPEAGEAMRQQILEAKEKGDSVGGIVECAAIGLPIGLGDPMFDGIENRIAGIVFGIPGVKGVEFGSGFAVAGHRGSENNDSFFMDGEKVKTRTNNSGGILGRNNKRNACPVPRGVKPTRSISLDQDSVSLSRSGNAVLQIKGRHDPCIVPRALPCVEAAAAIALYDAFLDR

SEQ ID NO: 50029 - DNA, 387 bp, Unknown
  Obtained from environmental sample
  misc_feature (1)..(387): n is a, c, g, or t
atggaccgcgtgggtttaacgccgcgcggaacaggacaggcattccgtttgttattccgccccagtatgccgcccgagttatttgtgcgtgtttttaccttttccccgtccataaaaaagctgtcgttgttttcagatcccctgtgtccggcaacggcgaagccgcttccgaattcaacgccctttacgcccggtatgccgaagacaattccggcgatacggttctcaatgccgtcaaacatcggatcacctaacccaatgggcagcccgattgcggcgcactcgacaatgcccccgaccgagtcgcctttttcctttgcttccagaatttgttgtctcattgcctcacccgcttcaggcttgagtacaggcagcgggtttttttga

SEQ ID NO: 50030 - protein, 128 aa, Unknown
  Obtained from environmental sample
  misc_feature (1)..(128): Xaa is any amino acid
MDRVGLTPRGTGQAFRLLFRPSMPPELFVRVFTFSPSIKKLSLFSDPLCPATAKPLPNSTPFTPGMPKTIPAIRFSMPSNIGSPNPMGSPIAAHSTMPPTESPFSFASRICCLIASPASGLSTGSGFF

SEQ ID NO: 50031 - DNA, 1113 bp, Unknown
  Obtained from environmental sample
  misc_feature (1)..(1113): n is a, c, g, or t
atgggcacggttaatgcccgttggcccggagagacgcggccggccgtcaacaccactcccgaagggccgctcctctcggccaccctggccgaaatgctggcggccggctgccggtcggccgtgctggaagtctcttcccacgccctggccctgggccgggtgaccggcctcggtttcgaggcggccctcttcaccaatctgagccgggatcatttggatttccatccggacatggagagctactaccaggccaagaagcttctcttcgaccggcatctcaagccgggccccggccgggccgtgatcaatactgatgatgaatacggggcccgcctggccggggaactgggccagggcgccgtgacttacggatttgggggccgggccgaggtgaaaggtgaaaacctgagcctgggccgcgaaggcctggccctggatattgtccatcccggcggccggtggcggcagtcttcgcccctcctggccgaagtcaacgcttataaccttctggccgccgccgccctggccctggccctgcgccttgaaccggaaaccatccgggaggcgctggccgcctgtcccggggcgccgggccgcctggaaaaagtcggctccgatcccctggtgctggttgattacgcccacactccggcggccttggcccaagccctggccggggtccgggccttacggccggccaggcttttggtggtcttcggctgcggcggtgaccgtgaccagggcaagcgggccatcatgggccgggtggccggagaaggggccgacctgaccgtcctgacctccgataatcccagaaccgaagagcccggggccatcctggccggcatagaggccggcctgacgcccctgaatctgccccggttcaagaccggccaactcaaggcggccgattggcggcctggcggttatctgcttattgaagagcggccggcggccatcggggaggcggtcaggcttctggggccgggagatgttttgctcatcgccggcaaggggcatgaggactaccagataatcggacgggagaagatccatcttgacgaccgggaagaggcgatgaaagcgctaaaaaaagagggttggagccagtga

SEQ ID NO: 50032 - protein, 370 aa, Unknown
  Obtained from environmental sample
  DOMAIN (196)...(280): Mur ligase family, glutamate ligase domain
  misc_feature (1)..(370): Xaa is any amino acid
MGTVNARWPGETRPAVNTTPEGPLLSATLAEMLAAGCRSAVLEVSSHALALGRVTGLGFEAALFTNLSRDHLDFHPDMESYYQAKKLLFDRHLKPGPGRAVINTDDEYGARLAGELGQGAVTYGFGGRAEVKGENLSLGREGLALDIVHPGGRWRQSSPLLAEVNAYNLLAAAALALALRLEPETIREALAACPGAPGRLEKVGSDPLVLVDYAHTPAALAQALAGVRALRPARLLVVFGCGGDRDQGKRAIMGRVAGEGADLTVLTSDNPRTEEPGAILAGIEAGLTPLNLPRFKTGQLKAADWRPGGYLLIEERPAAIGEAVRLLGPGDVLLIAGKGHEDYQIIGREKIHLDDREEAMKALKKEGWSQ

SEQ ID NO: 50033 - DNA, 471 bp, Unknown
  Obtained from environmental sample
  misc_feature (1)..(471): n is a, c, g, or t
ttggagccagtgagggatctggggctggaactgggctgggtcttggaaaacgccggaaccctggccagcggggaagatttggccggcttggccggccataagctggccggcctctccacagacagccggaccattctgaaggatgaggtctttgtggccctgatcggtcctaatttcgacggccacgaccacgcggccgaggccctggccaaaggagccctggccgtggtggtccaacgggagcttaacggggaagccggccgaaaatcaatccgggtggctgatacattaaaggccctgggcgatttggccggcgctttgaggcgcgggcggcccctccgggtggtggccttgaccggctccaacggcaagacgacgaccaaggagatgctggccgccatcttaaggcttctggaccggcatcttctggccacggaagcaatttcaacaacctggtcggcctgcccctga

SEQ ID NO: 50034 - protein, 156 aa, Unknown
  Obtained from environmental sample
  DOMAIN (34)...(108): Mur ligase family, catalytic domain
  misc_feature (1)..(156): Xaa is any amino acid
MEPVRDLGLELGWVLENAGTLASGEDLAGLAGHKLAGLSTDSRTILKDEVFVALIGPNFDGHDHAAEALAKGALAVVVQRELNGEAGRKSIRVADTLKALGDLAGALRRGRPLRVVALTGSNGKTTTKEMLAAILRLLDRHLLATEAISTTWSACP

SEQ ID NO: 50035 - DNA, 807 bp, Unknown
  Obtained from environmental sample
  misc_feature (1)..(807): n is a, c, g, or t
atggaaaaagtcggcaaagacggggttatcacggtggaagagtccaaaacgatggacacgaccatcgactttgtggaaggtatgcaatttgaccgcggttatatttccgcctactttgtcaccgaccgcgataccatgaccgccgtatacgaagatgtctttatcctgatccatgacaaaaaagtttccagcatgaaggatatgcttcccctgctggaaaaagtcgcccagagcggcaagcccctgctcatcgttgccgaggacgtggacggcgaagccctttccaccctggtactcaacagcctgcggggaacccttaaaaccgtggcggtcaaggcccccggtttcggcgaccgccgcaaagcgatgctggaagacattgccatccttaccggcgggcaggtcatcactgaagagctgggcatgaagctggaaaataccgagctttcccacctcggcaaagccaagaccatcaaaatcgacaaggacaacaccacaatcatcaacggcggcggcaagaacaaggacattcaggaccgcattgcccagattaagactcaaatcgaagacaccaccagcgactatgaccgcgaaaaactccaggaacggcttgccaaactggccggcggcgtagcggtaattaacgtcggcgcggccaccgaagttgaactgaaagagaaaaaacaccgcgtggaagacgccctgtccgccacccgcgccgccattgacgaangcattgtgtcaggcggcgaaattgccccttatcangcggcccttgccctggacaggccgacaccaaaggcctga

SEQ ID NO: 50036 - protein, 268 aa, Unknown
  Obtained from environmental sample
  DOMAIN (1)...(268): TCP-1/cpn60 chaperonin family
  misc_feature (1)..(268): Xaa is any amino acid
MEKVGKDGVITVEESKTMDTTIDFVEGMQFDRGYISAYFVTDRDTMTAVYEDVFILIHDKKVSSMKDMLPLLEKVAQSGKPLLIVAEDVDGEALSTLVLNSLRGTLKTVAVKAPGFGDRRKAMLEDIAILTGGQVITEELGMKLENTELSHLGKAKTIKIDKDNTTIINGGGKNKDIQDRIAQIKTQIEDTTSDYDREKLQERLAKLAGGVAVINVGAATEVELKEKKHRVEDALSATRAAIDEXIVSGGEIAPYXAALALDRPTPKA

SEQ ID NO: 50037 - DNA, 420 bp, Unknown
  Obtained from environmental sample
  misc_feature (1)..(420): n is a, c, g, or t
atgtccttgttcttgccgccgccgttgatgattgtggtgttgtccttgtcgattttgatggtcttggctttgccgaggtgggaaagctcggtattttccagcttcatgcccagctcttcagtgatgacctgcccgccggtaaggatggcaatgtcttccagcatcgctttgcggcggtcgccgaaaccgggggccttgaccgccacggttttaagggttccccgcaggctgttgagtaccagggtggaaagggcttcgccgtccacgtcctcggcaacgatgagcaggggcttgccgctctgggcgactttttccagcaggggaagcatatccttcatgctggaaacttttttgtcatggatcaggataaagacatcttcgtatacggcggtcatggtatcgcggtcggtgacaaagtag

SEQ ID NO: 50038 - protein, 139 aa, Unknown
  Obtained from environmental sample
  SIGNAL (1)...(23)
  misc_feature (1)..(139): Xaa is any amino acid
MSLFLPPPLMIVVLSLSILMVLALPRWESSVFSSFMPSSSVMTCPPVRMAMSSSIALRRSPKPGALTATVLRVPRRLLSTRVERASPSTSSATMSRGLPLWATFSSRGSISFMLETFLSWIRIKTSSYTAVMVSRSVTK

SEQ ID NO: 50039 - DNA, 906 bp, Unknown
  Obtained from environmental sample
  misc_feature (1)..(906): n is a, c, g, or t
atgacttgttggccttcactctccccttacgcaaaatcccttcctatgccggggggcgaattattttattatgatagcgcctctggaactgccattgcggctaacaagccggcggtggttcttatacatgggctgggggatgaggccgatacctggcgccatgtttttcccttgcttgttgccgcgggctatcgcgtagtcgcgccggatcttcctggctttggccgttctgtatggaagggaaggatcagtatgcgcccgcattgcaaggctgttctcccgcttttaaacacggccggcattgcgagtcctggaaagccggcggcgcttgttgggagtccccttggggccgccgtctcggaaatggcggcgagcaaacggcccgatttggtaaaagccctgattttaattgacggctgttttcctattcaaaataaaattgacaaggggcttctcccgcttatgctgccgtctgtaggcaaacgatggtacaggtctttccgaaaaaaccatgagactgcctggaattcgctgtatccttattatgccgatcttgatgccatgagcggcgaggatcgcgaattcctccgtgagagggtaatcgcaagggtggaaagcgaaaaccaggaacgggggtatttgtccaccctgagcagcatgaacgtcttttttatttttaatgggcggcgaatttcccgcaggataaagacatatccgggtaaaatagctatactatggggtgaaaaagacagggttttacctgttgaaaaagccgcccttttccggggcctgcggcctgaagcgaagatgacgctgatatcaggcgccggccatcttccccaccaggaaaaacccgaggaaaccgcggcccaaatgctgcggtttctgaaggaaagtggtgtctga

SEQ ID NO: 50040 - protein, 301 aa, Unknown
  Obtained from environmental sample
  DOMAIN (64)...(294): alpha/beta hydrolase fold
  misc_feature (1)..(301): Xaa is any amino acid
MTCWPSLSPYAKSLPMPGGELFYYDSASGTAIAANKPAVVLIHGLGDEADTWRHVFPLLVAAGYRVVAPDLPGFGRSVWKGRISMRPHCKAVLPLLNTAGIASPGKPAALVGSPLGAAVSEMAASKRPDLVKALILIDGCFPIQNKIDKGLLPLMLPSVGKRWYRSFRKNHETAWNSLYPYYADLDAMSGEDREFLRERVIARVESENQERGYLSTLSSMNVFFIFNGRRISRRIKTYPGKIAILWGEKDRVLPVEKAALFRGLRPEAKMTLISGAGHLPHQEKPEETAAQMLRFLKESGV

SEQ ID NO: 50041 - DNA, 876 bp, Unknown
  Obtained from environmental sample
  misc_feature (1)..(876): n is a, c, g, or t
gtggcacactgggctgtcggcacaagtaccgtaactgttacctaccagggcaaaacaactacttttgacgtaacagttaccctcccaggtttcaccaccgcgcctgtcctttcccttgacccgggttatgaagaaatcgcttacacattgacagcctctgtccctgccgccgacagttacgatctgtactataaagagggcagcttgaacgcaagcctgcttaaaagcacaggcacaaagattactgtggcggctggcagcgataaaattaccggactgaccaacggcacggagtacagttttatcgtaacggcgaacaaggcaggctatacaagcgttgattcggtagtagaagaagcaaccccggcggatctttattatgtcattagcggaagcggttcagcgtttagcgcgaccagaaacggcgcggcactcggaacaaccggcacgatacagaccgttattaacgccattagaaccaacgccgccggagcgccctgtatcatacagtttggagccgagggagccacattgagtaccggctcaaccgccgtaagttttaacaacacaggcggcacatggggcacggtagagttaagcgggaaaataacgtcagcggtaacctgcgctcttgattctcccagcggaacaatagtcattgcggacgcagtttccgtaaccagcgtggcggaaataacaaacaccgcaagcacaagcagcaccggatacggcttcgcaatttgccacaattcaaccggaacgcttaccatatcgggcggcgatgttcagacaacaggtagtacggcttatgtcagggcgatacagaacaattccctccggaaacgtaaatatcaccgggcggcttggttcatttga

SEQ ID NO: 50042 - protein, 291 aa, Unknown
  Obtained from environmental sample
  misc_feature (1)..(291): Xaa is any amino acid
MAHWAVGTSTVTVTYQGKTTTFDVTVTLPGFTTAPVLSLDPGYEEIAYTLTASVPAADSYDLYYKEGSLNASLLKSTGTKITVAAGSDKITGLTNGTEYSFIVTANKAGYTSVDSVVEEATPADLYYVISGSGSAFSATRNGAALGTTGTIQTVINAIRTNAAGAPCIIQFGAEGATLSTGSTAVSFNNTGGTWGTVELSGKITSAVTCALDSPSGTIVIADAVSVTSVAEITNTASTSSTGYGFAICHNSTGTLTISGGDVQTTGSTAYVRAIQNNSLRKRKYHRAAWFI

SEQ ID NO: 50043 - DNA, 534 bp, Unknown
  Obtained from environmental sample
  misc_feature (1)..(534): n is a, c, g, or t
ttggttgatgacaagcaggtaaacgcatggtgtttgcccgggggcaagatcgtggtttacaccgggattctgcctgtaaccaagaacgaagcggggcttgcggttgtgctgggtcatgagatttcccacgccctgctcaaccacggccagcagagcatgagcgccgatttgcttcaacaagccggcatgatcgcggttatgttgggagcagaggcgctaggcgcttctgaaaatgtccagctcgccacgcttctcctatataccattggcgctgagtatggtgccgccctgccgttcagccgctccaacgaaagcgaggcggatcgttacggcctctctctcatggccattgccggctataacccggacgaggcacctcccttctgggaacggatgaaagccgctggcgccggaggcacaccggaatttctcagcacccacccatctcctgataacagaataaagcagttacaaggctggaatgccgaggcgaaaaagatagccgccgagtttggcgtaacaaggttcaattga

SEQ ID NO: 50044 - protein, 177 aa, Unknown
  Obtained from environmental sample
  DOMAIN (1)...(162): Peptidase family M48
  misc_feature (1)..(177): Xaa is any amino acid
MVDDKQVNAWCLPGGKIVVYTGILPVTKNEAGLAVVLGHEISHALLNHGQQSMSADLLQQAGMIAVMLGAEALGASENVQLATLLLYTIGAEYGAALPFSRSNESEADRYGLSLMAIAGYNPDEAPPFWERMKAAGAGGTPEFLSTHPSPDNRIKQLQGWNAEAKKIAAEFGVTRFN

SEQ ID NO: 50045 - DNA, 924 bp, Unknown
  Obtained from environmental sample
  misc_feature (1)..(924): n is a, c, g, or t
ttggccgcaaatgtcccctgtttccccgagttcattcctctgagtattgaaataaaggatgttttacatccccgtctttctttgacatttgacggcgtttcagagtttacctttacggggctttatcttttcagaaacagatacaattatcatatctcgcgcaatggggaagaagggggttttattatttccggcgtacagccttccggggaaaaacaggggaaaaagttttttatgactccctgttcagctcctgacgatgatacgctgaagcttctttttgaaactcacgattactggaaaaacatatcggaaacaatattattacccattaaagaaaaacttgaggggagcggccttgtcattacggaagacagggataattttgattatctttactatcgtaatgagttagcggaattatccggcaaaaagtttcacaagaaaaaaaaccatttaaataaatttttaagtttatatcccaatcacgaacaaaaaccgataaacaaagaatcggtttccgccgcgatggaagtgctggataggtggcggaatgaatcgcttcaaaaaacggaaggcgatgagggcgattacatagcgtcaaaagaagctttggagctttttgacgttcttcctctgcagggttcggtcttttttgttgacggtaaaccagccgctttttgtttaggtgaaagtatcgctagaggaaaaatgttcgttattcattttgaaaaagcgatagatgaatacaagggcatttatcagtatgtaaatcaatcgtttgccgcgtctttgcctaactttttcactcttataaaccgcgaacaagatttggggaatgaggggcttcgtcaggcaaaggagacttatcgtccttgcgattttgtgcgaaaatacacaggtgtccgagttggcacagagtag

SEQ ID NO: 50046 - protein, 307 aa, Unknown
  Obtained from environmental sample
  misc_feature (1)..(307): Xaa is any amino acid
MAANVPCFPEFIPLSIEIKDVLHPRLSLTFDGVSEFTFTGLYLFRNRYNYHISRNGEEGGFIISGVQPSGEKQGKKFFMTPCSAPDDDTLKLLFETHDYWKNISETILLPIKEKLEGSGLVITEDRDNFDYLYYRNELAELSGKKFHKKKNHLNKFLSLYPNHEQKPINKESVSAAMEVLDRWRNESLQKTEGDEGDYIASKEALELFDVLPLQGSVFFVDGKPAAFCLGESIARGKMFVIHFEKAIDEYKGIYQYVNQSFAASLPNFFTLINREQDLGNEGLRQAKETYRPCDFVRKYTGVRVGTE

SEQ ID NO: 50047 - DNA, 1101 bp, Unknown
  Obtained from environmental sample
  misc_feature (1)..(1101): n is a, c, g, or t
ttgtgcccgggacggaaggcggtgacgccggtgacgagtaggggcgttttcgtcgtcgtagcgcttgcgcttatgtggatttgccgcgctgtgtcggctcagccgcagcagcttcccgccgatatgcacgggtgggcgtcggcgagtgtggatttagtctttcgggaggactacaaaggcgccgaggaagaggccaagaagatactgcgcgcctatcccgaacaccccgccggttacttcttcatggccgccgtggccgaggcgtggatgcaacgctaccagtccaacaaacgggagaccgagttctaccgcttctgcgaccaagcggtggagaaggcggagaagatacttgccgccgatccgaacgacgactgggcgagattctttctcggcggcgccgagggctacaaaggcacctttgaggcgcgttacgagcgatacataacggccttccgctacggatggaaaggcgtctccatattcctgaagatggcctccggcggcagtaaaaaccccgacataaacttcggcataggcacctacgattattggcgcagcgcccttatgaagatgctttggtggatgcccggcgtggaggacaagcgccaggtgggtatagagaagctgaaaggtgtgatacaaaacggcgtctacacccgcgccgccgccggttgcgtcctgatagacgtatacatgaacgagaaacgctacgaggaggcgctaggcgtagcgaacgatatggggaagaagtaccccaaagcgatagcctttatgtggggacgcgccgccgccctgcacggtctgaagaggtacgaggaggccgccgcggtctacaaaacaatatacgcgaagtgcgagaacgaccaaaacacgaaccactacaacgccgttaaagcgagggtaggcatggcaagagcctatttagcgcttggcaaaaacagcgaggcgctggaacaggtgaacgccgtgaacgcctaccagctctccaaagacataaagaaacgcttagacgcggatctgtccgaggcgaacaccataaaaaaacgcgccaacaagggcgccggcggcggcgaggaactggctgcggacggcggggggtag

SEQ ID NO: 50048 - protein, 366 aa, Unknown
  Obtained from environmental sample
  misc_feature (1)..(366): Xaa is any amino acid
MCPGRKAVTPVTSRGVFVVVALALMWICRAVSAQPQQLPADMHGWASASVDLVFREDYKGAEEEAKKILRAYPEHPAGYFFMAAVAEAWMQRYQSNKRETEFYRFCDQAVEKAEKILAADPNDDWARFFLGGAEGYKGTFEARYERYITAFRYGWKGVSIFLKMASGGSKNPDINFGIGTYDYWRSALMKMLWWMPGVEDKRQVGIEKLKGVIQNGVYTRAAAGCVLIDVYMNEKRYEEALGVANDMGKKYPKAIAFMWGRAAALHGLKRYEEAAAVYKTIYAKCENDQNTNHYNAVKARVGMARAYLALGKNSEALEQVNAVNAYQLSKDIKKRLDADLSEANTIKKRANKGAGGGEELAADGGG

SEQ ID NO: 50049 - DNA, 810 bp, Unknown
  Obtained from environmental sample
  misc_feature (1)..(810): n is a, c, g, or t
atgaaagggagccatgttggtgggcggctcattccgggcgcggttccaaaaatcaaatacgaagtagaaaattaccgcgcctacatggaagccctggtgaaacgcggcgtgtctgagtacgggctaaagctaaaaacaaaaaccgaaatggacatcgaggccttaaataagctcaaggcggacgcgatcgtttttgcccttggcacaaaggacgtaaagctcccgttgccgggaatcgaatctacggttcaggctgtggatttgttcatgaatcccggccttttgggtaacgcgaaaaaagtggtggttataggcggaggggcggtgggctgcgaagccgcctactggctcaggtacgaaaagaactgcgaggttacggtggtagaaatggacaagtacattatgaaccatacatgcaccgcgaaccgggggtatctcatctactatcttaaaaagggaggggtgaagctgctcaactgcacacggcttaccggtatcggcaaagacggagctgaagttatgcgcaacgtctcaaaaactgtcccggatccctacgtcacctggcacccgatactccccgaaaatgtggagaacccgcttgccccgaagctcaaggttgaggagaaaagcgagaccattccggctgacctggttgttatggcgacaggcggcgttcccaacgacggcctttattatgaagcgcttgcggataactcttctcctgagctgtacaatatcggtgacagctcaagcgcgggaaaagttctggaagcagtcanggcggcttaccgcctcgggcacaggctatag

SEQ ID NO: 50050 - protein, 269 aa, Unknown
  Obtained from environmental sample
  DOMAIN (100)...(223): Pyridine nucleotide-disulphide oxidoreductase
  misc_feature (1)..(269): Xaa is any amino acid
MKGSHVGGRLIPGAVPKIKYEVENYRAYMEALVKRGVSEYGLKLKTKTEMDIEALNKLKADAIVFALGTKDVKLPLPGIESTVQAVDLFMNPGLLGNAKKVVVIGGGAVGCEAAYWLRYEKNCEVTVVEMDKYIMNHTCTANRGYLIYYLKKGGVKLLNCTRLTGIGKDGAEVMRNVSKTVPDPYVTWHPILPENVENPLAPKLKVEEKSETIPADLVVMATGGVPNDGLYYEALADNSSPELYNIGDSSSAGKVLEAVXAAYRLGHRL

SEQ ID NO: 50051 - DNA, 1296 bp, Unknown
  Obtained from environmental sample
  misc_feature (1)..(1296): n is a, c, g, or t
atgatgaaacttaccgaagaagaacagaagatccttgacggaaaagaaggggagattaaagccaaggtaatgaaaaccctggtcatgtacggcgacgcctttggggctgaaaagatggttaagattaccggggactacggccacctggttaccagtttcggcctttcgataatgaagcctgtttacagcctgatggacagtctgatcgattcaggctcgctttcgggtcagaagttcactgtcaatcccaggcccctggataaaaacgtgccgtcctccgcgctcgctaaactgcttttcaaagttatgtactccaagcaggaagcatacgaagcgcagcttcgcaagctgggtctgatcaacgacgacggctttacctgcacctgttacatgaacgaagctggaaacatccccaaaaaaggggatatcctttcatgggccgaatcgagcgccgtggtttttgccaactccgttctgggcgcgaggtgcaaccgcaattcggggatcattgaattgttcggcagtgtcgcgggaaaggttccgtactttggccttttaaccgacgagggacggaaagcgacctggataatcgaggtaaagacaagcaagaaaccggaagcccagcttcttggcagcgcaatcggcatgaaggtgatggaagaagttccctttatacgcggtcttgacaagtggcttggaagcagcctaaacaggaacaccgaagaaggccgggccgcggcggattacctcaaggactttggcgcggcgaccgccagcaacggcgcggtggggctttaccatgttgaaaaccttacccccgaggcggaagaagccggagataaactgatcgcgaaaggggcgaaggtttacacgatagacgacgcggaactggaaaaggtgcggcagagttatccctgcatctggaagaacgcttctgcggagccggtggtcgcatttataggctgcccgcatctttctcacgaccagcttatccactggacgggccgcatcctcggcttgctcgcggcgaagggcaggaagaaactcgccgtgcccaccgtgtttacagccgctcccaaggtgaagagggaattccgtatgacaagcgaagccgcgaagctggtcgaagccggggcggtgttaagcgatatttgcccccttatgtacatgaacaatcccctctgcgggaaaaggcccgtgatcaccaattccaacaaactgaggacttattcctcagctcggttttatactgatgatgaaatttgcgagataataaccggaaaggagaaaaaatga

SEQ ID NO: 50052 - protein, 431 aa, Unknown
  Obtained from environmental sample
  DOMAIN (2)...(427): Protein of unknown function (DUF521)
  misc_feature (1)..(431): Xaa is any amino acid
MMKLTEEEQKILDGKEGEIKAKVMKTLVMYGDAFGAEKMVKITGDYGHLVTSFGLSIMKPVYSLMDSLIDSGSLSGQKFTVNPRPLDKNVPSSALAKLLFKVMYSKQEAYEAQLRKLGLINDDGFTCTCYMNEAGNIPKKGDILSWAESSAVVFANSVLGARCNRNSGIIELFGSVAGKVPYFGLLTDEGRKATWIIEVKTSKKPEAQLLGSAIGMKVMEEVPFIRGLDKWLGSSLNRNTEEGRAAADYLKDFGAATASNGAVGLYHVENLTPEAEEAGDKLIAKGAKVYTIDDAELEKVRQSYPCIWKNASAEPVVAFIGCPHLSHDQLIHWTGRILGLLAAKGRKKLAVPTVFTAAPKVKREFRMTSEAAKLVEAGAVLSDICPLMYMNNPLCGKRPVITNSNKLRTYSSARFYTDDEICEIITGKEKK

SEQ ID NO: 50053 - DNA, 1695 bp, Unknown
  Obtained from environmental sample
  misc_feature (1)..(1695): n is a, c, g, or t
atgatcagatcggccgagaggcgtggatctgccaaggatctgcccgatctgccgggattaaagggtcagaagaactacaactggggcgacttaaaatctatagtgccggaagttttagccttgtcaaaaaaagtcaatcttgacgcgctgcccaatgagcttaaatacagtcctgtcaacagttggaaattcaaagccgaccccggacagtatctatacttcaagttgaatgaaggcacgcggttctacggcggctatgtccttgccgagccttacgaaaaaatattccggataagagattttccacgggagctttcaatactttcggaagggtccattctttcctttagcggagacaagcggctttccatggtgagccggggaataggagaggtcgaatttaacattgggcgtatcaggcccgatgacgtcaatcatctggtatcgcagacttacggagatgtcagcaatatcaacttcaataattatgattttaaccagtacaatattaccgaacagtacaccgaaagcgcgattgttccggttgccagcgagcgcgacattggctatttctcttttaacttttcccggtatctggaaaatatacccaacagaaatttgcgatacggcctttttatttttaccgttcgcgcgaagcagggttcttacagcgacaggcggcttatcatggttacggatttgggcttctttgtaaaaaccggcaccgataccagcagggacatttttgtccaatcaatcgcttcgggagctcctgtggcgggggcggctattaatgtgcttgggcttaacggcaacccgattttctccacctctacccgatcgggaggccgcgcgcgaatacccgcttttggcgatacctataaatacgaccgcgctcccacggtttacacggttgtcgcgggggaagatatgtcttttatggcatataacgccaacgggcggaaccttgactattccgcctttgacgtgggcggcattcagggagcaagcgatcctaaaacgctcagggcgtttcttttctccgacaggggattgtaccgcccgggtgacgagacgcgcctgggtcttattatcaaaagcggcgactggggcgtaaatctcggcggcactccgcttgaatatcgcgtaacagatccgcgcggcgccgaaattgtaaacaaacggatcaaattgtcccccgagggagtggaagacatccgtttcagcacgcatgactggtcgcccacgggaacttatacggcttcggtctatgtaatccaggagtataaacagggcgacgaaataatagaacgccatgtattcctcggctcccagacggtgaaagtggaggaattcctgccggacaccttgaacgtttccgcagttttcgatcccgcgccgcaggatggttggatcgcgcccggcgaattaaaagcgaaggtatcggcgcgaaatctttttggaaccgccgcctcaggcaacgaggtaaaggcgcagatcaatttgtcgccgggtcatcaatacttccgccaataccgcgattatcaattcagggacccgtatcttgggaaaaacagcttccaggagttccttggaaccaaaaccacggatacggaaggaaccgccgaatttaatttaaatctggcaaagttgaaaaggcgacttaccgtctttctttttataccgaagcgttga

SEQ ID NO: 50054 - protein, 564 aa, Unknown
  Obtained from environmental sample
  DOMAIN (229)...(522): Alpha-2-macroglobulin family N-terminal region
  misc_feature (1)..(564): Xaa is any amino acid
MIRSAERRGSAKDLPDLPGLKGQKNYNWGDLKSIVPEVLALSKKVNLDALPNELKYSPVNSWKFKADPGQYLYFKLNEGTRFYGGYVLAEPYEKIFRIRDFPRELSILSEGSILSFSGDKRLSMVSRGIGEVEFNIGRIRPDDVNHLVSQTYGDVSNINFNNYDFNQYNITEQYTESAIVPVASERDIGYFSFNFSRYLENIPNRNLRYGLFIFTVRAKQGSYSDRRLIMVTDLGFFVKTGTDTSRDIFVQSIASGAPVAGAAINVLGLNGNPIFSTSTRSGGRARIPAFGDTYKYDRAPTVYTVVAGEDMSFMAYNANGRNLDYSAFDVGGIQGASDPKTLRAFLFSDRGLYRPGDETRLGLIIKSGDWGVNLGGTPLEYRVTDPRGAEIVNKRIKLSPEGVEDIRFSTHDWSPTGTYTASVYVIQEYKQGDEIIERHVFLGSQTVKVEEFLPDTLNVSAVFDPAPQDGWIAPGELKAKVSARNLFGTAASGNEVKAQINLSPGHQYFRQYRDYQFRDPYLGKNSFQEFLGTKTTDTEGTAEFNLNLAKLKRRLTVFLFIPKR

SEQ ID NO: 50055 - DNA, 591 bp, Unknown
  Obtained from environmental sample
  misc_feature (1)..(591): n is a, c, g, or t
atggtattttcgagcataattgcagaagaattgaaaattgaagaacagcgcgttaaagcggcgcttaaacttatggaagaaggcgggacggtgccgtttattgcacgctaccgcaaggaccaaactgataacctagacgaaattcagttgcgcgatattcagcacagaaaggaatctttaaccgaacttgcagaacgcaaagaaacggttttaaaaaccattgaggagcttggcaagctaactcccgagctaaaagcccaaatagatagctgccgcgataaaaatattttggaagatatttacgctccctacaaacccaaacgcagcacacgtgccacaatcgcaaaagacaaaggcatggaaggtcttgcaaaaattatatgggaacaagaagaaacaaccaactccgcagaaacaatcgctatggcttttctctccgaagaaaaaggcgttgcagacccagcggcagcaatcaaattcgctttggatattttggcagaagatgttgcagatacaccggaattccgcggatatttgcgtgcgcaaattgaaaaacagggcaaaatggtttccaaagtaaaaaggaattga

SEQ ID NO: 50056 - protein, 196 aa, Unknown
  Obtained from environmental sample
  misc_feature (1)..(196): Xaa is any amino acid
MVFSSIIAEELKIEEQRVKAALKLMEEGGTVPFIARYRKDQTDNLDEIQLRDIQHRKESLTELAERKETVLKTIEELGKLTPELKAQIDSCRDKNILEDIYAPYKPKRSTRATIAKDKGMEGLAKIIWEQEETTNSAETIAMAFLSEEKGVADPAAAIKFALDILAEDVADTPEFRGYLRAQIEKQGKMVSKVKRN

SEQ ID NO: 50057 - DNA, 345 bp, Unknown
  Obtained from environmental sample
  misc_feature (1)..(345): n is a, c, g, or t
gtgaaattttcctatattcccactatgcaaaacattttatttgaatgggacgagcggaaaaatttggcgaacataaaaaaacacggcattagttttcaagaagctaaaacttgttttgaagacgactttgccgaagtattctcagatgctgaacattcagcaattgaggatagatatatcttacttggactttcagaaattcacaaaaccttagttgtaattcacaccgaaaaagacaataaaaacaatgaacaaacaatactaagaataatcagtgcaagaaaagcgacaaaaaaagaatttctatattattgggggcatcgcaaacaaaaggagcaaatatga

SEQ ID NO: 50058 - protein, 114 aa, Unknown
  Obtained from environmental sample
  DOMAIN (12)...(106): Protein of unknown function (DUF497)
  misc_feature (1)..(114): Xaa is any amino acid
MKFSYIPTMQNILFEWDERKNLANIKKHGISFQEAKTCFEDDFAEVFSDAEHSAIEDRYILLGLSEIHKTLVVIHTEKDNKNNEQTILRIISARKATKKEFLYYWGHRKQKEQI

SEQ ID NO: 50059 - DNA, 789 bp, Unknown
  Obtained from environmental sample
  misc_feature (1)..(789): n is a, c, g, or t
ttgctttctctttggcacgctttaaaaggcacagaatacactttggatattaatgttgaaaaaattatggaagcaaaccaagttagtaaggaatgtttcaaagaatacgactttccacccgaggctctggctattgaacccgaagttattttcagcccaatgccgggcggtgccttaaccgcaaacacattgatgatgcgcgaaaccaaaacattccacctttacccgcaagtgattaaaaatatggcagagtgcgtggctcgcggtggatttggctcaagcgttactcctgtttcccagttctatttccagcaggcttacgcgaatacagttcaaggcccttggaaaaaaataacagacggctatggcaatatggttcttggctatcttggcaaaactccaagagaaccagatccagaaatagtgaaaattgcaagcgaacagatgaaaaaacctgtgttcaccggaaatccattggatgttttggagccgggtattccaaaagcgaaaaaagttttggaagaaaatcatctgccagtaaccgatgaaaatattttcataattggcgcaatggcaacaaaaggcggcaacaaaggcttggatttcttgcagggaaaagcgagagtgagcgttcccaaaaagaaacccgctgctccagcggcagccgcacctgctgctgcgccatctgcaactgctgcatctccactggtttttgctcccattagcggtaccgttaattatggtgttaccgttggcggaaaaacattcagtgtgcaggttagcgggtaa

SEQ ID NO: 50060 - protein, 262 aa, Unknown
  Obtained from environmental sample
  DOMAIN (49)...(253): Conserved carboxylase domain
  misc_feature (1)..(262): Xaa is any amino acid
MLSLWHALKGTEYTLDINVEKIMEANQVSKECFKEYDFPPEALAIEPEVIFSPMPGGALTANTLMMRETKTFHLYPQVIKNMAECVARGGFGSSVTPVSQFYFQQAYANTVQGPWKKITDGYGNMVLGYLGKTPREPDPEIVKIASEQMKKPVFTGNPLDVLEPGIPKAKKVLEENHLPVTDENIFIIGAMATKGGNKGLDFLQGKARVSVPKKKPAAPAAAAPAAAPSATAASPLVFAPISGTVNYGVTVGGKTFSVQVSG

SEQ ID NO: 50061 - DNA, 354 bp, Unknown
  Obtained from environmental sample
  misc_feature (1)..(354): n is a, c, g, or t
ttgctcccattagcggtaccgttaattatggtgttaccgttggcggaaaaacattcagtgtgcaggttagcgggtaaaaatttgaaaggtattcttttggcaggtggcgcgggctcaaggctttaccctttgagcgcggtggcgagcaagcagctccagcctgtttacgataagcccatagtttactacccgttgtccacgttgatgctcggcggcataaaagatataatgcttataagcacgccaaccgacattccacgttttcaagatttgctcggcaacggaagccagtgggggataaacatccaatatgccgttcagccaaaaccagagggcatagcgcaggcgttttga

SEQ ID NO: 50062 - protein, 117 aa, Unknown
  Obtained from environmental sample
  misc_feature (1)..(117): Xaa is any amino acid
MLPLAVPLIMVLPLAEKHSVCRLAGKNLKGILLAGGAGSRLYPLSAVASKQLQPVYDKPIVYYPLSTLMLGGIKDIMLISTPTDIPRFQDLLGNGSQWGINIQYAVQPKPEGIAQAF

SEQ ID NO: 50063 - DNA, 492 bp, Unknown
  Obtained from environmental sample
  misc_feature (1)..(492): n is a, c, g, or t
gtgaacgtaatctccagcgatctttcaatagaggggcgcactaaggcgttaaaagaaggcccttacggaagatgcgttttccgctgcgacaataacgttgttgatcatcaggcggttctgcttaatttcgcgaacggcgtaacggcaaattttacaatgtcgggttttacaatggaaattcaccgttcaattaagcttttcgggacaacaggagaaatctccggcgatatggaagaaaacaaaatcgttgtaaaagattttgtttccggaaacacggaaaccatcgcgatcgcgcaggctatcggcggtcattcaggcggagactcaggcttcatcactgattttgtacgcatgattcacggttcaggcggcgaagggcgcaacacactaaaaaaatcctttgaaagccactacatggccttcgccgcggaatgttccaggctggaaggcggtagaatggttaagctatcggagattcgggcaaaaacataa

SEQ ID NO: 50064 - protein, 163 aa, Unknown
  Obtained from environmental sample
  misc_feature (1)..(163): Xaa is any amino acid
MNVISSDLSIEGRTKALKEGPYGRCVFRCDNNVVDHQAVLLNFANGVTANFTMSGFTMEIHRSIKLFGTTGEISGDMEENKIVVKDFVSGNTETIAIAQAIGGHSGGDSGFITDFVRMIHGSGGEGRNTLKKSFESHYMAFAAECSRLEGGRMVKLSEIRAKT

SEQ ID NO: 50065 - DNA, 1146 bp, Unknown
  Obtained from environmental sample
  misc_feature (1)..(1146): n is a, c, g, or t
ttgctccgcgccaggaaccgtgcgggcaggcgccgcctaaccccgccaggtccggaaggaagcaacggtaagcggaggtttgccgcgccgcggcctccctgtcgcggggcaatcctactggtttttttttacttctttctatatactgactccatggcagaaaccacgcaagcttatgaagttaccgcttcaaaatacagaccaaaaacttttgacgaattggcggggcaggaatttgtggtttctaccctcaaaaactcgcttcaaagcggacatatcgcacatgcttaccttttttcagggccgagagggtgcggcaaaaccagcgcggcgcgtattttggcgcgctcgcttaactgcgaaaaagggcccgcaaacgggccgtgcggggtctgcgataactgtctcgcgataagcaggggcgccagcatggatgtaatcgaaattgacggcgcgtcaaacaacaaagttgacgaagcgcgtcaaattatcgacgaagttctttttccgccgcaagccggcaaatacaaagtttacattattgacgaagttcacatgcttacgaatcaggcttttaacgctctcttaaaaaccatagaagagccgccgccgtatatcgtttttatttttgcgacgacggaattgcacaaagttcccgcaacgataaaaagccgatgccagcagtttaatttcaggctgataccgattgagaccattcaggaaacactgaaaaaaatctgcgccgaaaagggaattacagccgaagacgacgcgctgttttggatagcgagagaatcgacaggcagtatgcgcgacgccttcaccctgtttgatcaaattgcgtcattttccgctggcagtatccgcagtgatgtaatccgcgaaaaattaggcataaccggtcttgaaaaactgaacgcccttgcggaagcatgcgccgtaaatgattcgcccgccgctttcgcgctgacagatgaaatacttggaagcggcgtcgccatcgagcaatttgtaatcgaccttgcgggcttttaccgcagtttgcttttgttaaaaaacnggcataacaagggaatcgcttttaggttaccgcccttccctcttttccgcaaaagccttggaaacctacgactcgattcgtcttga

SEQ ID NO: 50066 - protein, 381 aa, Unknown
  Obtained from environmental sample
  DOMAIN (96)...(286): ATPase family associated with various cellular activities (AAA)
  misc_feature (1)..(381): Xaa is any amino acid
MLRARNRAGRRRLTPPGPEGSNGKRRFAAPRPPCRGAILLVFFYFFLYTDSMAETTQAYEVTASKYRPKTFDELAGQEFVVSTLKNSLQSGHIAHAYLFSGPRGCGKTSAARILARSLNCEKGPANGPCGVCDNCLAISRGASMDVIEIDGASNNKVDEARQIIDEVLFPPQAGKYKVYIIDEVHMLTNQAFNALLKTIEEPPPYIVFIFATTELHKVPATIKSRCQQFNFRLIPIETIQETLKKICAEKGITAEDDALFWIARESTGSMRDAFTLFDQIASFSAGSIRSDVIREKLGITGLEKLNALAEACAVNDSPAAFALTDEILGSGVAIEQFVIDLAGFYRSLLLLKNXHNKGIAFRLPPFPLFRKSLGNLRLDSS

SEQ ID NO: 50067 - DNA, 939 bp, Unknown
  Obtained from environmental sample
  misc_feature (1)..(939): n is a, c, g, or t
atggggattaccgccgaggatgacgcgttgttctggatagcgagggaatcgacgggcagtatgcgcgacgcttttaccctgtttgatcaggttgtttctttttccgcgggcagtatacgcggcgatttaatacgcgaaaaactcggcattacggggcttgaaaaacttaacgcgttagctgaaatgtgcgccgcaaatgacgcgccgggagcttttgcgcttaccggggaaattctcgatacaggcgtttcaatcgaacagtttgtaattgatcttgccggatactaccgcagtcttctgcttctgaaaaacggcgtaacaagggaatcccttttgggttaccggtcggcgctgttttcggcaaaggcgctcgaaacttttgactccgtccgtcttgaacaggcgctggatctgctgctcaactgctaccgcaacatacgctattccgtctctcctcgttttgaactggaaaccgctgtttcaaaattgtcgtggcttagccgctggatttcccctacagaacttggcgaagcggttgagaacgcgcggggtgttcttggaaacgcgggaatcaggcaaggccgggccgcggcggtaaagactgcgcctgcggcgagggagacggcgtcatcggacataaagtccgcagacataaagtccgcagacgtgaagtctgcttccgcggcgagcgcgcctgccgccgctgcgccaagaccgcagccaaagagcggctctctgtccgatgaattcaggcgaatgttggcagagaggggaagtaatgtgtcctcggcgtcctcggacggtacgtcctcggacgatacgttcggagatgacgatgtcccgctttgggacagatcggtaagtaagaacggcggcggggaaataccgcctcaggttgagactgtgctttctgtgattccgggaacagtcgttgaataa

SEQ ID NO: 50068 - protein, 312 aa, Unknown
  Obtained from environmental sample
  misc_feature (1)..(312): Xaa is any amino acid
MGITAEDDALFWIARESTGSMRDAFTLFDQVVSFSAGSIRGDLIREKLGITGLEKLNALAEMCAANDAPGAFALTGEILDTGVSIEQFVIDLAGYYRSLLLLKNGVTRESLLGYRSALFSAKALETFDSVRLEQALDLLLNCYRNIRYSVSPRFELETAVSKLSWLSRWISPTELGEAVENARGVLGNAGIRQGRAAAVKTAPAARETASSDIKSADIKSADVKSASAASAPAAAAPRPQPKSGSLSDEFRRMLAERGSNVSSASSDGTSSDDTFGDDDVPLWDRSVSKNGGGEIPPQVETVLSVIPGTVVE

SEQ ID NO: 50069 - DNA, 423 bp, Unknown
  Obtained from environmental sample
  misc_feature (1)..(423): n is a, c, g, or t
gtggctagcggcgcccgcctgatggataatatccgcaatttttgcataatcgcccatatcgatcacggaaagtcaacacttgccgacaggcttattcagaaaggccgccttgtggatgacagagatttccagaaccagattttggacaacatggacattgaaagggagcgcggcatcaccatcaagagccaggctgtttgcattccgtacaccgcacttgacggcattgaatacaagctcaacctggtggacacgccaggccatgtggactttagttacgaagtatcaagggcgataaattcatgcgagggagcgctgctccttgttgacgcaacccagggcgtccaggccccaaaccctttccaatatgtacctggctttggaacacattctggaaatcattccggtaataaacaagattga

SEQ ID NO: 50070 - protein, 140 aa, Unknown
  Obtained from environmental sample
  DOMAIN (9)...(139): Elongation factor Tu GTP binding domain
  misc_feature (1)..(140): Xaa is any amino acid
MASGARLMDNIRNFCIIAHIDHGKSTLADRLIQKGRLVDDRDFQNQILDNMDIERERGITIKSQAVCIPYTALDGIEYKLNLVDTPGHVDFSYEVSRAINSCEGALLLVDATQGVQAPNPFQYVPGFGTHSGNHSGNKQD

SEQ ID NO: 50071 - DNA, 588 bp, Unknown
  Obtained from environmental sample
  misc_feature (1)..(588): n is a, c, g, or t
atgcgaggtcgatcgaccgtgttcggaattgatgagaatagccgctatacctatgctgactatctgggctgggaaggcctggagaggtatcagctcataaacgggaaagtttttcagattgctaccccgtcgatagttcatcaggctttgctaatggagttgtcaacgcagttcgccaattggcttaaaggcaaaccatgccgggtgtttgccgccccactggacgtgcgccttttcccaaaagaagataattctgacgacacaattgtacagcccgatttgcttgttgtatgcgataaagaaaagctcggtaaaggctttgtaaacggcccgccggatctggtagccgagattgtttcgcctttaagcacatattgtgaattttttttgaaatttcacgattaccttgaagccggagtaaaggaatactgggtgattgacccggaagaaaaaaggatactggttcatatttacgaaaacggccattttataagctctgtccataaaggggatggcagcatttcggttaatatcctgccgggcctgaatatttctcttggaaacctgtggctagcggcgcccgcctga

SEQ ID NO: 50072 - protein, 195 aa, Unknown
  Obtained from environmental sample
  DOMAIN (47)...(157): Protein of unknown function (DUF820)
  misc_feature (1)..(195): Xaa is any amino acid
MRGRSTVFGIDENSRYTYADYLGWEGLERYQLINGKVFQIATPSIVHQALLMELSTQFANWLKGKPCRVFAAPLDVRLFPKEDNSDDTIVQPDLLVVCDKEKLGKGFVNGPPDLVAEIVSPLSTYCEFFLKFHDYLEAGVKEYWVIDPEEKRILVHIYENGHFISSVHKGDGSISVNILPGLNISLGNLWLAAPA

SEQ ID NO: 50073 - DNA, 2058 bp, Unknown
  Obtained from environmental sample
  misc_feature (1)..(2058): n is a, c, g, or t
gtgatacgcacccccgacgaactggagcgtgagcggaagcgggcgatggaccaggtgctgctggtcgtggactacgactcggcggctgccgcagagtccgctcggaaaacggcggaactcggtgccgccgtcaagcatatcgccgacgccaaggcgccggactcgctcaaggaagccggctggctgcaactctcccgcgaattgtcgggcaaagctgtagaaacgctccaccgcaggcccgccctgcttgaagaggctaaaaagcagatcgcggagatcatggggcgcggcgtctccgccacactcttctacgccacaaacgaggagctctccgaacgccgcctgcgcttcaacacgaatttcgagtccgcccagcagtattcgaaacgctacgtcaacctccttaaagacggcgtagagaccaccgtcgcggtttccgacatccccgtgaaagaggccgccatggaacttgccgcggcgcagttgcgacgcgagtcgcggatggacgaagcggcgctcaacgcggtctacgaactgatccacgcctgcgtgcggcccaccgtgcgggtcaacaacagggtcacctccgacaggcggcgggtggcggcggaccaggtgcttgaggtcagcggcaaggtcataaaggacaccgaaatcgtccgtaagcaccaagaggtgacgccggagatagcccagaggttgcactccctgcacgtggctatggagcgtttggagggcggcgccgaaaaacggcaggcgttcggcgcctacgccggacgggtcatactgctgcttataacgctgtgcttcctcgccttctacatgagaaagtacaacgaggccatagtggccagccctaagaacctgctggcgctctgcatagtcgtcgtcttgcagatactggtggtgagactgggtacgcagtacctgccgatgctcttaaagggcgacggcgtgtcggccgtaatgccggagtacctgattccggtgacgatgggcgcgcttctgggcacgatcctcttcgggatgcgggtcagcgtgatcgtcagcctcttcgtcggcatatacttcgcggttgcggtcggcttcaaccactacttcttcctgtacgcgttcttgaattcggtggtggccatcttcttcaactacaaaatccgataccgctggcacttcttcagagccataccgcccatgacgcttgtgagcgttgtcatcataaccgtctggcagatgatgtcttggcgcttcggcgtcacctatttaaccaacatagcttgcgcgttcgccggtatcgtggcctcggtattcatggctatggtgctgtcgcccttcttcgagagggtcttcgacattaccacggatatgacgctgatagagctatccgacatgaatcacccgattctcaagaagctctccatacaggccgccggaacctacaatcacagcgttttggtaggcaatttggcggaatcggcggcgcaggcggtgggcgccaacgcccttttggcgcgtgtggcctcctactaccacgacataggcaagatcgaaaaaccggactacttcgtggaaaattgccagggcgacagaaaccgccacaacaaactctctccgaccatgagcgccctcataatatgctctcacgtgagagagggcgttgagttagccaaaaagtacaagttgcccaagatcatccaagacataataatgcagcaccacggcgacagctccgtctccttcttctacgaaaaggcgctggagttagacccgcataagcaggtgcaggaaaaggactttcgctatcccggccccataccgcagacccgcgaggccgcgataatcatgctgtccgactccgtggaagccgcgtcgaggagtttggccacaagttcgcccaaactgctcagagaattagtcaaaaagataatacgagaccggctcttggccggacagctcgacgggtgcaacctgacgctcagggatctgaatgaaattacagagggcttcatgccgatattgcaggggatattccactccagaattgagtatcctaataaataa

SEQ ID NO: 50074 - protein, 685 aa, Unknown
  Obtained from environmental sample
  DOMAIN (254)...(453): 7TM receptor with intracellular HD hydrolase
  misc_feature (1)..(685): Xaa is any amino acid
MIRTPDELERERKRAMDQVLLVVDYDSAAAAESARKTAELGAAVKHIADAKAPDSLKEAGWLQLSRELSGKAVETLHRRPALLEEAKKQIAEIMGRGVSATLFYATNEELSERRLRFNTNFESAQQYSKRYVNLLKDGVETTVAVSDIPVKEAAMELAAAQLRRESRMDEAALNAVYELIHACVRPTVRVNNRVTSDRRRVAADQVLEVSGKVIKDTEIVRKHQEVTPEIAQRLHSLHVAMERLEGGAEKRQAFGAYAGRVILLLITLCFLAFYMRKYNEAIVASPKNLLALCIVVVLQILVVRLGTQYLPMLLKGDGVSAVMPEYLIPVTMGALLGTILFGMRVSVIVSLFVGIYFAVAVGFNHYFFLYAFLNSVVAIFFNYKIRYRWHFFRAIPPMTLVSVVIITVWQMMSWRFGVTYLTNIACAFAGIVASVFMAMVLSPFFERVFDITTDMTLIELSDMNHPILKKLSIQAAGTYNHSVLVGNLAESAAQAVGANALLARVASYYHDIGKIEKPDYFVENCQGDRNRHNKLSPTMSALIICSHVREGVELAKKYKLPKIIQDIIMQHHGDSSVSFFYEKALELDPHKQVQEKDFRYPGPIPQTREAAIIMLSDSVEAASRSLATSSPKLLRELVKKIIRDRLLAGQLDGCNLTLRDLNEITEGFMPILQGIFHSRIEYPNK

SEQ ID NO: 50075 - DNA, 429 bp, Unknown
  Obtained from environmental sample
  misc_feature (1)..(429): n is a, c, g, or t
atgacaacgcctttaagccccggaggcgccttgagcgacgagtcgcgcacgtcgccggccttttcgccgaagatcgctctcaaaagcctctcttccggagacagctccgtctcgccctttggcgttaccttgccgacaaggatatcgcccggctccacctccgtgccgatccttatcacgccgttctcgtcgagattgcgcaccgcgtcgtcgctgacgttgggaatctccctagtgagctcctccggcccacgcttcgtgtcgcgcacctccgtctcaaagacctctatgtgcaccgacgtaaagacatcctcggccacgagtttctcggagatgattatggcgtcctcaaagttgtatccgcgccacggcataaaggcaaccatcacgttcctgccgagagcgagttcgcccaagctcgtggcgtga

SEQ ID NO: 50076 - protein, 142 aa, Unknown
  Obtained from environmental sample
  misc_feature (1)..(142): Xaa is any amino acid
MTTPLSPGGALSDESRTSPAFSPKIALKSLSSGDSSVSPFGVTLPTRISPGSTSVPILITPFSSRLRTASSLTLGISLVSSSGPRFVSRTSVSKTSMCTDVKTSSATSFSEMIMASSKLYPRHGIKATITFLPRASSPKLVA

SEQ ID NO: 50077 - DNA, 1407 bp, Unknown
  Obtained from environmental sample
  misc_feature (1)..(1407): n is a, c, g, or t
ttgacggaaaaagatcctttcggcggctcggtatatgcggtcgtaaactccgcggccaagctgattgccgccggtgtggcgccggatacgatacatctttctttgcaggaatatttcccgcgggtcaacgccgaccccgcgcgttgggggcgggttttttccgctatgctaggcgcttttaccgcgcagatgggtttgcggttggcggcgatcggcggcaaagattccatgtccggcagttttggtaatctggatgtacctcccacgcttatctcttttgccgccggggtaagcaccgcggcgaatttgctcactcccgaatttaagcaggcgggacatcctgtttatctgctgactgcgcctctggatgcggacggtctgccggattacccggcgctgcgggcggtctgggaaaactttacggcgctctgccgttccggaaaagtattgtccgcttgggcgtgtgagaacggcggagtgtatggcggtattctgaaaatggcgctcggcaatatgcttggattttccggtccggcggacgatagtttttttgactatcaaggtggttcgatattgtttgaggccggtgcggaattgcccggttttcgtttgctggggcacacccagtcaacgcccgcgcttaactttgggtcaacgtccgttacactggacgaattgcgccgggtctgggaagcgccgctagagagtgtatttcccgtgaggactgagcagcgcggcagtgctccgttgattacggacaaaaatgcgcccggcaggccaaccgccaaacggcgcagtccggcggcactggcacatcccgaggcggtcattccggttttccccggcacaaactgtgagtatgacactgcggcggctatagaacacgcgggcggccgggctaggatagttatggtccgcaaccttacgccggaaatgttaaaaacttccgtcgccgaattggaaaaagcaatctcctccgcgcaaatgttggtttttcccggcggtttttccggcggcgacgagccggacggttcgggtaaatttattgtgtcgttgttccgcaacgcgcgtctggctaatgccgtccacgaattgctttatgagcgtgacggtttggcactgggcatctgcaacggatttcaggccttgattaaactgggtttgctgccctttggacgcatagccccgacgacggcggatagtccgacgctgactttcaactatatcggccggcatcaggcgcgttatgttacgacccgcgttgcttccgttctctcgccgtggctgagtaaatgcaccgccggggagatgtatgtacagccggtctcgcacggagagggccgtctcacagcttcggcgcaggtcttgcaaactatgcaagaaaacggacaaatagtttttcagtag

SEQ ID NO: 50078 - protein, 468 aa, Unknown
  Obtained from environmental sample
  misc_feature (1)..(468): Xaa is any amino acid
MTEKDPFGGSVYAVVNSAAKLIAAGVAPDTIHLSLQEYFPRVNADPARWGRVFSAMLGAFTAQMGLRLAAIGGKDSMSGSFGNLDVPPTLISFAAGVSTAANLLTPEFKQAGHPVYLLTAPLDADGLPDYPALRAVWENFTALCRSGKVLSAWACENGGVYGGILKMALGNMLGFSGPADDSFFDYQGGSILFEAGAELPGFRLLGHTQSTPALNFGSTSVTLDELRRVWEAPLESVFPVRTEQRGSAPLITDKNAPGRPTAKRRSPAALAHPEAVIPVFPGTNCEYDTAAAIEHAGGRARIVMVRNLTPEMLKTSVAELEKAISSAQMLVFPGGFSGGDEPDGSGKFIVSLFRNARLANAVHELLYERDGLALGICNGFQALIKLGLLPFGRIAPTTADSPTLTFNYIGRHQARYVTTRVASVLSPWLSKCTAGEMYVQPVSHGEGRLTASAQVLQTMQENGQIVFQ

SEQ ID NO: 50079 - DNA, 1200 bp, Unknown
  Obtained from environmental sample
  misc_feature (1)..(1200): n is a, c, g, or t
ttgatggccgagttcgtgtgtctgttggttttgatgctggtcccggcctgcagcaaaaaaacttctgcaagcgcggctaataaaggggagaaaatcacactctgggtatacgatgaaggccgtattcaggtgcttaatgaactgggcaaaaaatttgaaacagaatttggcgtggcggtggaagtttccatggttgaccttgggcagatacgcaaccaattccttctggcttccggcgggaatgagtgcgccgatatcgccatcatcccccacgataaccttggggctttggttgagaacggcatggtaacggaaataaatctcggatcaaaaaagagttcttatctgcagccggctcttgacgggtttaactataacggaaaactctacggcgtgcctctggcggtggaaaacatcgggtttttctacaatacaaccatgatgtccgcgccgcccgaaacctgggatgacgccatagctatagctgaaaaacttataagtgagaaaaaagcggaagttatgatgggtcttcccgacgccacctataacgcgtatccggtatatgacggtttcggcggggcgattttcggcaaaaagagcgacggcagtctggacgggaaaaatgtgcttttggcggatcccggctttgtagccggcctggaattccttacggcgcaggtaaaaaagaaattgattcctgaaaacattgactgggatgccgcgcatgtgctgtttgagagcggcaaagcgccgtattgtatgaccggcccctgggcgttaaatcgtttcaaagaatccaaggttccttatgcgatagccaaattcccgtcagcaaaaaaaggcggaccggccggcaatcctttccttggtgtccagggcctgattgtcagttccgccagcccgcgtaaactgctggcccagtcctttgccgtggattttatggccagagaggaaaattacagggccatttttcaggccgaacaaaggccttccgcgtggaagaccatatttgaaggcagcggggacagcgataccaagggatttaacgccgccggtgtaagcgcggtccctatgccgtcaattcccgaaatgggcaatgtctgggacgcgtgggtcgccgccgcagcgctggccttctccggtgaaagaacgccgaaagccgctttagagaatgcaaaaacccagatattaagcaaatga

SEQ ID NO: 50080 - protein, 399 aa, Unknown
  Obtained from environmental sample
  SIGNAL (1)...(23)
  DOMAIN (3)...(321): Bacterial extracellular solute-binding protein
  misc_feature (1)..(399): Xaa is any amino acid
MMAEFVCLLVLMLVPACSKKTSASAANKGEKITLWVYDEGRIQVLNELGKKFETEFGVAVEVSMVDLGQIRNQFLLASGGNECADIAIIPHDNLGALVENGMVTEINLGSKKSSYLQPALDGFNYNGKLYGVPLAVENIGFFYNTTMMSAPPETWDDAIAIAEKLISEKKAEVMMGLPDATYNAYPVYDGFGGAIFGKKSDGSLDGKNVLLADPGFVAGLEFLTAQVKKKLIPENIDWDAAHVLFESGKAPYCMTGPWALNRFKESKVPYAIAKFPSAKKGGPAGNPFLGVQGLIVSSASPRKLLAQSFAVDFMAREENYRAIFQAEQRPSAWKTIFEGSGDSDTKGFNAAGVSAVPMPSIPEMGNVWDAWVAAAALAFSGERTPKAALENAKTQILSK

SEQ ID NO: 50081 - DNA, 711 bp, Unknown
  Obtained from environmental sample
  misc_feature (1)..(711): n is a, c, g, or t
ttgggcattcttgtctggaacataacattttcacttttttccgtgctgataagttttggcgtcggcatgatgatcgccctgctctttgaagatttaaaatacaagcgccttatacggacattgctcattgtgccttatcctattcccgtattggtttccatcatggtgtggaaggggctgcttaatgaaaatatgggattggttacaacaataataaccaatattttcggatcttcccccaagttctttaccgatttgaattggacccgttttgccttaatcctgatcaatgtgtatttatcgtacccctatttttatgtgcttacatccggagccctgaaggctatccccaaagacctctttgaagcggcgtcaattgacggcgcaaggccttttacagtggtgcgaagaatcgttttaccgctggtaatgcgcatactttcaccgcttgtgattgcctctttctgtttcaactttaataactttacccttgtctggggcttcaacgccggattaccggcaatggcggatacggcggtgccgatgggttattcagatttgcttatctcttttatttaccgtttgggctttagttcgtctaacgcggccgattacggcttctccgcggccattacggtaatgctttttattctggtggctctgatggtgtttttccagaccatgaataccaaaaccatcaaggaatcataa

SEQ ID NO: 50082 - protein, 236 aa, Unknown
  Obtained from environmental sample
  DOMAIN (4)...(235): Binding-protein-dependent transport system inner membrane component
  misc_feature (1)..(236): Xaa is any amino acid
MGILVWNITFSLFSVLISFGVGMMIALLFEDLKYKRLIRTLLIVPYPIPVLVSIMVWKGLLNENMGLVTTIITNIFGSSPKFFTDLNWTRFALILINVYLSYPYFYVLTSGALKAIPKDLFEAASIDGARPFTVVRRIVLPLVMRILSPLVIASFCFNFNNFTLVWGFNAGLPAMADTAVPMGYSDLLISFIYRLGFSSSNAADYGFSAAITVMLFILVALMVFFQTMNTKTIKES

SEQ ID NO: 50083 - DNA, 1089 bp, Unknown
  Obtained from environmental sample
  misc_feature (1)..(1089): n is a, c, g, or t
ttgggcgggcgtggcggtcagccagcggcggtgcattctccatggccatctcgactgatggcagcctatgggcctgggggactaatacctctggccagcttggtccttggcgactctgtgcatcggaatgtcccaacccgggggggatttgcgcgggattgggccgccgtggtgtgtggcgacaactacgttgttgccctcaaagagtacggcactctttgggcgtggggcataaacggctcgggccagcacggccaaggcgacaccttgcagcggacttcccctacccaagtgggcgaagcggaggaatggtcggctgtggcggtcggcggagccggcaacttcacagtggccatcaagagcgacggcaccctctggacttgcggaggcaactccaacggtcagctgggcctcggcaacagtggtggcgccacaaaccggactgtcttcacgcaggtgggcgaggacaaaaactggaagtctgcgtcgtgcggcgagtaccacacggcggctctaaagagcgacggcagcctatgggcgtggggcatgaactattctggtcagctcggcgatggcaccaacaccagccgggacttccccgtccaagtgagtccggcgaaggactggaccgccgtggcggcgggccgctaccacacagtggccctcaaggcggacggcagcctctgggcgtggggcataaacaattggggccagctcggcgatggcaccaccatagatcggaacgccccagtgcaggtgggcgcggcgaaggactggaccgccgtgtcggtgggcgacaaccacacgctcgccattaggacggacggcagcctatgggcgtggggcatgaacaactacggtcagttgggtcacttcactcgttcagacatggggagtgcccccgcaagggtgggcgcggcgaaggactgggtcacggtggcggcgggccgctaccacactgtggcactcaaggcggacggcagtctgtgggcgtggggcctgaacaactgcggtcagctgggcgacggcaccgactggacaggaacaccccagtccaagtgggactcggccgaatctgtcattggntaa

SEQ ID NO: 50084 - protein, 362 aa, Unknown
  Obtained from environmental sample
  DOMAIN (122)...(172): Regulator of chromosome condensation (RCC1)
  misc_feature (1)..(362): Xaa is any amino acid
MGGRGGQPAAVHSPWPSRLMAAYGPGGLIPLASLVLGDSVHRNVPTRGGFARDWAAVVCGDNYVVALKEYGTLWAWGINGSGQHGQGDTLQRTSPTQVGEAEEWSAVAVGGAGNFTVAIKSDGTLWTCGGNSNGQLGLGNSGGATNRTVFTQVGEDKNWKSASCGEYHTAALKSDGSLWAWGMNYSGQLGDGTNTSRDFPVQVSPAKDWTAVAAGRYHTVALKADGSLWAWGINNWGQLGDGTTIDRNAPVQVGAAKDWTAVSVGDNHTLAIRTDGSLWAWGMNNYGQLGHFTRSDMGSAPARVGAAKDWVTVAAGRYHTVALKADGSLWAWGLNNCGQLGDGTDWTGTPQSKWDSAESVIG

SEQ ID NO: 50085 - DNA, 564 bp, Unknown
  Obtained from environmental sample
  misc_feature (1)..(564): n is a, c, g, or t
ttggtactgcttaacacctgttccgtcagggcaacggcggaacagcgcgtttttggcaggcttgcgcagtacatggcgctcaaaaaaaagcggcgctttacgctggttgtggcaggctgtatggcggaacggttgggcgagaagctaaaaaaagactatgccgtggattacgttattggaacaagcgcccgttcactttttccgctcatcctggaatctgtcgaaaagggctctgttttcgtagacgaaaacaaagccaccgaaaagccggttttttctttctcctctttttaccacgacccctcaagcccatttcgcagttatgtgccgattatgcacggctgcaacaatttctgctcctattgcattgtcccctatgtgcgtggccgcgagctttcccgctctccccagtcaattcttgaggaaattcgtcttttgggcagtcggggcgtaaaggagattacccttttgggccagaacgtcaattcttacttttggaaggaagagagctttgattcgtggcgagggtttcataccccgctgttctgcggcggggtatgttga

SEQ ID NO: 50086 - protein, 187 aa, Unknown
  Obtained from environmental sample
  DOMAIN (1)...(60): Uncharacterized protein family UPF0004
  misc_feature (1)..(187): Xaa is any amino acid
MVLLNTCSVRATAEQRVFGRLAQYMALKKKRRFTLVVAGCMAERLGEKLKKDYAVDYVIGTSARSLFPLILESVEKGSVFVDENKATEKPVFSFSSFYHDPSSPFRSYVPIMHGCNNFCSYCIVPYVRGRELSRSPQSILEEIRLLGSRGVKEITLLGQNVNSYFWKEESFDSWRGFHTPLFCGGVC

SEQ ID NO: 50087 - DNA, 333 bp, Unknown
  Obtained from environmental sample
  misc_feature (1)..(333): n is a, c, g, or t
ttggtactttgcagatttgccaagttgttcctctatgcggagcaattggttgtatttgcaaatacggtcggtgcgggagagagagccggtttttatttggcctgcgcccgtgccaacggcaaggtctgcgataaaggaatcttcggtttcgccgctgcgatggctggcaataacgccgtagcctgctttttgagccattttgatagcttccaaagtttcggaaacggtgccgatttgattaacctttatcagaatggcatttgcagctttcattttgatgcccttgccaaacgctctgggtttgtcacaaagaaatcatcgccaacgagctga

SEQ ID NO: 50088 - protein, 110 aa, Unknown
  Obtained from environmental sample
  misc_feature (1)..(110): Xaa is any amino acid
MVLCRFAKLFLYAEQLVVFANTVGAGERAGFYLACARANGKVCDKGIFGFAAAMAGNNAVACFLSHFDSFQSFGNGADLINLYQNGICSFHFDALAKRSGFVTKKSSPTS

SEQ ID NO: 50089 - DNA, 816 bp, Unknown
  Obtained from environmental sample
  misc_feature (1)..(816): n is a, c, g, or t
gtgttaaaggcagtggctgccgttaatggacccattgctcgcttgctcaaaggcaaagaccctctgaaacaggctgcccttgacgatgccatgattaggctagacggcacaaaaaacaaaagcaaactcggcgcaaatgcaattctcggtgcttcaatggcaatcaccgttgctggcgcaaacgtgagcaaattgccactttggagatatattggcaaattgcacagcaccaaaaaattcatacttccaaccccaatggcaaacattgtgaatggcggcaaacacgcagacaataaaattgacttccaggaatttatgattatgcccgtaggtgcaaaatccttctccgaagggcttcgctggataaccgagattttccacactcttaaaaaattgctcaaaaaagacagacaggcaacatctgttggtgacgaaggtggctttgcccctaacttgaccaacgatcaggctttggaatacattatgaaagccattaaagaagctggctacaaacccggcactcaaattggcattgcccttgactgcgcttcttccgaactctttgacgagggtggtcgcaaaggttacaaattctggaaatccgaaccaggcaaacttcacaccgcanaagagatggttgcaaaatatgcagcttggattaaaaaatatccaatcgtctcaatagaagacggtttagaccagaacgactgggaaggctatgttggttttaccaaggaactcggtaaaaaagttcagctcgttggcgatgatttctttgtgacaaacccagagcgtttggcaagggcatcaaaatga

SEQ ID NO: 50090 - protein, 271 aa, Unknown
  Obtained from environmental sample
  DOMAIN (1)...(71): Enolase, N-terminal domain
  misc_feature (1)..(271): Xaa is any amino acid
MLKAVAAVNGPIARLLKGKDPLKQAALDDAMIRLDGTKNKSKLGANAILGASMAITVAGANVSKLPLWRYIGKLHSTKKFILPTPMANIVNGGKHADNKIDFQEFMIMPVGAKSFSEGLRWITEIFHTLKKLLKKDRQATSVGDEGGFAPNLTNDQALEYIMKAIKEAGYKPGTQIGIALDCASSELFDEGGRKGYKFWKSEPGKLHTAXEMVAKYAAWIKKYPIVSIEDGLDQNDWEGYVGFTKELGKKVQLVGDDFFVTNPERLARASK

SEQ ID NO: 50091 - DNA, 468 bp, Unknown
  Obtained from environmental sample
  misc_feature (1)..(468): n is a, c, g, or t
gtgaagtttgcctggttcggatttccagaatttgtaacctttgcgaccaccctcgtcaaagagttcggaagaagcgcagtcaagggcaatgccaatttgagtgccgggtttgtagccagcttctttaatggctttcataatgtattccaaagcctgatcgttggtcaagttaggggcaaagccaccttcgtcaccaacagatgttgcctgtctgtcttttttgagcaattttttaagagtgtggaaaatctcggttatccagcgaagcccttcggagaaggattttgcacctacgggcataatcataaattcctggaagtcaattttattgtctgcgtgtttgccgccattcacaatgtttgccattggggttggaagtatgaattttttggtgctgtgcaatttgccaatatatctccaaagtggcaatttgctcacgtttgcgccagcaacggtgattgccattga

SEQ ID NO: 50092 - protein, 155 aa, Unknown
  Obtained from environmental sample
  misc_feature (1)..(155): Xaa is any amino acid
MKFAWFGFPEFVTFATTLVKEFGRSAVKGNANLSAGFVASFFNGFHNVFQSLIVGQVRGKATFVTNRCCLSVFFEQFFKSVENLGYPAKPFGEGFCTYGHNHKFLEVNFIVCVFAAIHNVCHWGWKYEFFGAVQFANISPKWQFAHVCASNGDCH

SEQ ID NO: 50093 - DNA, 501 bp, Unknown
  Obtained from environmental sample
  misc_feature (1)..(501): n is a, c, g, or t
ttggtcaagttaggggcaaagccaccttcgtcaccaacagatgttgcctgtctgtcttttttgagcaattttttaagagtgtggaaaatctcggttatccagcgaagcccttcggagaaggattttgcacctacgggcataatcataaattcctggaagtcaattttattgtctgcgtgtttgccgccattcacaatgtttgccattggggttggaagtatgaattttttggtgctgtgcaatttgccaatatatctccaaagtggcaatttgctcacgtttgcgccagcaacggtgattgccattgaagcaccgagaattgcatttgcgccgagtttgcttttgttttttgtgccgtctagcctaatcatggcatcgtcaagggcagcctgtttcagagggtctttgcctttgagcaagcgagcaatgggtccattaacggcagccactgcctttaacacacctagccgccatagactctcggccgctcggccaatctga

SEQ ID NO: 50094 - protein, 166 aa, Unknown
  Obtained from environmental sample
  misc_feature (1)..(166): Xaa is any amino acid
MVKLGAKPPSSPTDVACLSFLSNFLRVWKISVIQRSPSEKDFAPTGIIINSWKSILLSACLPPFTMFAIGVGSMNFLVLCNLPIYLQSGNLLTFAPATVIAIEAPRIAFAPSLLLFFVPSSLIMASSRAACFRGSLPLSKRAMGPLTAATAFNTPSRHRLSAARPI

SEQ ID NO: 50095 - DNA, 543 bp, Unknown
  Obtained from environmental sample
  misc_feature (1)..(543): n is a, c, g, or t
atgtttgtcagcaagcaatgggctgccgcttttgttaattcccttgaaagagaaggcggcgattttgaaagcggtattagcactctcaaaatcctggctgatttcgcggcatcccttcagggcatggtctttggcaaagccgctgccatggcgctggagccgcttgtaagggacgcaatggcagaagccagactgacacaggaaacaacagtcaggttctttctcctgatggttagaaaaaacgcaatccgccatgccgattcgattattagcgaaatgaggaaaatactggacaagagaaacaacgcgatcaaagtttccgcagaatatgcctttgaaccggagaaggacttgctttccgaaataaacgcgacaattaaaaaaatgaccggggcagccagcgtggaattaaccgggcagattaacaaagagcttatcggcggatacaggctgcgcattggggatgaaataatcgatgccagcgttcgccgtcaattacagaaaatggaagcctgcctggccgccggagatggaggaagctaa

SEQ ID NO: 50096 - protein, 180 aa, Unknown
  Obtained from environmental sample
  DOMAIN (3)...(173): ATP synthase delta (OSCP) subunit
  misc_feature (1)..(180): Xaa is any amino acid
MFVSKQWAAAFVNSLEREGGDFESGISTLKILADFAASLQGMVFGKAAAMALEPLVRDAMAEARLTQETTVRFFLLMVRKNAIRHADSIISEMRKILDKRNNAIKVSAEYAFEPEKDLLSEINATIKKMTGAASVELTGQINKELIGGYRLRIGDEIIDASVRRQLQKMEACLAAGDGGS

SEQ ID NO: 50097 - DNA, 1509 bp, Unknown
  Obtained from environmental sample
  misc_feature (1)..(1509): n is a, c, g, or t
atggcgaattacggggacttaaccagagttctggaagaacaaataaaaaactggaatggcaaagccatcaccgaatcttcggggtttgtggtgcaggcaggcgacggagttgtaagcatacacgggctttccagggccatttacggggagctgttggattttgcatcgggagcttccggcatcgcgcttaaccttgaagaagacggcgtgggatgcgttctgctttccggcgaatccggcgtaaaggacggggaagaagtaaaaggcacaggcagggtagtgtccgtaccgtcaggcgattcgcttatcggcagggtgctaaacccgcttggcaaacccatagacggcaaagggcctgtccaggcggaagagtggctgcccgtggaagccccggcagcgcctgtaatagagcgcggcagcgtagaaaccccaatgcagacaggcatcctctcggtggactccatgatccccatcggccgcgggcagagggagcttatcataggcgacaggcaaaccggaaaaaccgccctcgccgttgacgcaattgccaaccaaaagggcaaaggcatgtactgcgtttactgcgccatcggccaaaagtcgtcgtcggttgccgcgattataaaaaacctggaaaaagccggagccatggattacacctttgtagtgcttgcttcggcttccgattcggcggcccttcaatacctcgccccttattccgcggtggcaatggcggagcattttatgcacaaaggcaaagacgtgcttgtcgtttacgacgatctttcaaagcacgccgtggcatacagggccataagcttgcttttgcgcaggccgcctggcagggaagcttttcccggcgacgtgttctacctgcactcaaggcttttggaaagggcggcaaagctttcaccggcgcggggcggaggttccattaccgccctgccaatcgtagaaacccaggcgggagatatttcgtcttatattcccaccaacgtaatttccattaccgacggtcagatctttttggacacggagctttttaattcaggtttccgcccggccattgacgttggtctttcggtcagccgcgttggaggctccgcgcagttcaaagcgattcgtaaaatagcgggcaggctcaggctggatttggcgcagtaccgcgagatggcggcctttgcccagttcggaagcgatctggacaaagcgacacagacaaaactggcgcagggggaacggctcatggaagtactaaagcagacccagttttctccctatagcatggcaaggcagtacgttatcctctttacagccgtaaacggctatcttatggatatcgcgacaaaagacatcccttcctttataaagggttttctggaatatttttcaacaaataacgggcaaattatttcacaactggacaaaagcggtgaatccaatattgagacagatcagctaataaccgaagccattgaaagctataaacaagctaataaccagaagtaa

SEQ ID NO: 50098 - protein, 502 aa, Unknown
  Obtained from environmental sample
  DOMAIN (23)...(91): ATP synthase alpha/beta family, beta-barrel domain
  misc_feature (1)..(502): Xaa is any amino acid
MANYGDLTRVLEEQIKNWNGKAITESSGFVVQAGDGVVSIHGLSRAIYGELLDFASGASGIALNLEEDGVGCVLLSGESGVKDGEEVKGTGRVVSVPSGDSLIGRVLNPLGKPIDGKGPVQAEEWLPVEAPAAPVIERGSVETPMQTGILSVDSMIPIGRGQRELIIGDRQTGKTALAVDAIANQKGKGMYCVYCAIGQKSSSVAAIIKNLEKAGAMDYTFVVLASASDSAALQYLAPYSAVAMAEHFMHKGKDVLVVYDDLSKHAVAYRAISLLLRRPPGREAFPGDVFYLHSRLLERAAKLSPARGGGSITALPIVETQAGDISSYIPTNVISITDGQIFLDTELFNSGFRPAIDVGLSVSRVGGSAQFKAIRKIAGRLRLDLAQYREMAAFAQFGSDLDKATQTKLAQGERLMEVLKQTQFSPYSMARQYVILFTAVNGYLMDIATKDIPSFIKGFLEYFSTNNGQIISQLDKSGESNIETDQLITEAIESYKQANNQK

SEQ ID NO: 50099 - DNA, 432 bp, Unknown
  Obtained from environmental sample
  misc_feature (1)..(432): n is a, c, g, or t
gtgcataaaatgctccgccattgccaccgcggaataaggggcgaggtattgaagggccgccgaatcggaagccgaagcaagcactacaaaggtgtaatccatggctccggctttttccaggttttttataatcgcggcaaccgacgacgacttttggccgatggcgcagtaaacgcagtacatgcctttgcccttttggttggcaattgcgtcaacggcgagggcggtttttccggtttgcctgtcgcctatgataagctccctctgcccgcggccgatggggatcatggagtccaccgagaggatgcctgtctgcattggggtttctacgctgccgcgctctattacaggcgctgccggggcttccacgggcagccactcttccgcctggacaggccctttgccgtctatgggtttgccaagcgggtttag

SEQ ID NO: 50100 - protein, 143 aa, Unknown
  Obtained from environmental sample
  misc_feature (1)..(143): Xaa is any amino acid
MHKMLRHCHRGIRGEVLKGRRIGSRSKHYKGVIHGSGFFQVFYNRGNRRRLLADGAVNAVHAFALLVGNCVNGEGGFSGLPVAYDKLPLPAADGDHGVHREDACLHWGFYAAALYYRRCRGFHGQPLFRLDRPFAVYGFAKRV

SEQ ID NO: 50101 - DNA, 1530 bp, Unknown
  Obtained from environmental sample
  misc_feature (1)..(1530): n is a, c, g, or t
ttgatggccgagaaccttcgagtggctgaagggcaggagctgaccgccctcgccttcatgctgggcgagagcagccacggggcgctcatgatcgccccgcgcaacgccggcttcttcgtcggcgggctcgccgaccttcaggggatgctcaacccattggaaattccggacaactttcatatcgcctgcatcatgtacgtggcgccgcccttccgccacacccacttcaacggcaagcaggtagtggtgcacaaccgcctcgaccaactccacgagatattctcctataacctataccccggccccagcgccaaaaagggcgtctacggggcgctgctcaccatcggcgagcaggagaagtggctcacgctccacgccgccaccgtgcaggtcgtaaccccctacgacaacattacgaccatcatgcacgaaggggccagcggcagcggcaagagcgagatgctcgaactcgtccaccgcgagtgggacgggcggctcctattagggcgcaacacgaagacaggctcgaggcgtatcatctccatgaaccaaacctgctccctctacccggtcaccgacgatatggccatgtgcccgcacgaggtacaagataaaagcggctacgttcacgcctgcgacgccgaacaagcgtggttcgtccgcctgaaccacatcacccgctacgggaccgacccgcaattagagaacataaccgtccacgccagcgaaccgctgatattcctgaacatgcagggcgtccccgacgctaccgtgctcatttgggagcacatagaagactcgcccggcaaacgctgccccaacccgcgcgtgatcctgccgcgccgcctcatgcccaactgcgtgaacggggccgtggaggtgcacgtccgcaacttcggcttccgcaccccgccgtgcacgagggagaagccctcctacggcatcgcgggcttcctgcacgtgctgccccccgcgctgggatggatatggcggctcatatcaccgcgcggctacgacaaccccagcgtcaccgacgacgacgcgatgacgagcgagggcgtagggtcgtattggcccttcgccacaggactgcgggtggaccacgcgaaccttattttgcggcagatacagaatacgccgcacgtgcgctacacgctgacccccaaccagcacgtcggcgcgtacgccgtcagcttcatgccccagtggatagccagagagtacctcgcccggcgcggcgcggccaaattccgtcccgaacagctcgtccccgcccgatgcccgctgctcgggtacgccttcgcgacgatgcaggtcgaggggacgcaccttcagcacgacttcctgcgggtggacgaacagcccgacgttggtcaggacggatacgacgccggggcgaagatactcaaaacgttcttcgacgaggaattgaagaagttcctcgtgccggagctgaacgaggtcgggcggaggatcatagagtgctgtctggataacgggacggttaaggattatgaggcgttgctgtga

SEQ ID NO: 50102 - protein, 509 aa, Unknown
  Obtained from environmental sample
  misc_feature (1)..(509): Xaa is any amino acid
MMAENLRVAEGQELTALAFMLGESSHGALMIAPRNAGFFVGGLADLQGMLNPLEIPDNFHIACIMYVAPPFRHTHFNGKQVVVHNRLDQLHEIFSYNLYPGPSAKKGVYGALLTIGEQEKWLTLHAATVQVVTPYDNITTIMHEGASGSGKSEMLELVHREWDGRLLLGRNTKTGSRRIISMNQTCSLYPVTDDMAMCPHEVQDKSGYVHACDAEQAWFVRLNHITRYGTDPQLENITVHASEPLIFLNMQGVPDATVLIWEHIEDSPGKRCPNPRVILPRRLMPNCVNGAVEVHVRNFGFRTPPCTREKPSYGIAGFLHVLPPALGWIWRLISPRGYDNPSVTDDDAMTSEGVGSYWPFATGLRVDHANLILRQIQNTPHVRYTLTPNQHVGAYAVSFMPQWIAREYLARRGAAKFRPEQLVPARCPLLGYAFATMQVEGTHLQHDFLRVDEQPDVGQDGYDAGAKILKTFFDEELKKFLVPELNEVGRRIIECCLDNGTVKDYEALL

SEQ ID NO: 50103 - DNA, 846 bp, Unknown
  Obtained from environmental sample
  misc_feature (1)..(846): n is a, c, g, or t
gtggttcgtccgcctgaaccacatcacccgctacgggaccgacccgcaattagagaacataaccgtccacgccagcgaaccgctgatattcctgaacatgcagggcgtccccgacgctaccgtgctcatttgggagcacatagaagactcgcccggcaaacgctgccccaacccgcgcgtgatcctgccgcgccgcctcatgcccaactgcgtgaacggggccgtggaggtgcacgtccgcaacttcggcttccgcaccccgccgtgcacgagggagaagccctcctacggcatcgcgggcttcctgcacgtgctgccccccgcgctgggatggatatggcggctcatatcaccgcgcggctacgacaaccccagcgtcaccgacgacgacgcgatgacgagcgagggcgtagggtcgtattggcccttcgccacaggactgcgggtggaccacgcgaaccttattttgcggcagatacagaatacgccgcacgtgcgctacacgctgacccccaaccagcacgtcggcgcgtacgccgtcagcttcatgccccagtggatagccagagagtacctcgcccggcgcggcgcggccaaattccgtcccgaacagctcgtccccgcccgatgcccgctgctcgggtacgccttcgcgacgatgcaggtcgaggggacgcaccttcagcacgacttcctgcgggtggacgaacagcccgacgttggtcaggacggatacgacgccggggcgaagatactcaaaacgttcttcgacgaggaattgaagaagttcctcgtgccggagctgaacgaggtcgggcggaggatcatagagtgctgtctggataa

SEQ ID NO: 50104 - protein, 281 aa, Unknown
  Obtained from environmental sample
  misc_feature (1)..(281): Xaa is any amino acid
MVRPPEPHHPLRDRPAIREHNRPRQRTADIPEHAGRPRRYRAHLGAHRRLARQTLPQPARDPAAPPHAQLRERGRGGARPQLRLPHPAVHEGEALLRHRGLPARAAPRAGMDMAAHITARLRQPQRHRRRRDDERGRRVVLALRHRTAGGPREPYFAADTEYAARALHADPQPARRRVRRQLHAPVDSQRVPRPARRGQIPSRTARPRPMPAARVRLRDDAGRGDAPSARLPAGGRTARRWSGRIRRRGEDTQNVLRRGIEEVPRAGAERGRAEDHRVLSG

SEQ ID NO: 50105 - DNA, 327 bp, Unknown
  Obtained from environmental sample
  misc_feature (1)..(327): n is a, c, g, or t
gtgttagctaaagtaccttattacgcgccggcgtgttatcattgccaacaatctgtcgaaaaaattctgaaagcctatatcattgcaaaagaaaatatattaataaaaacacatgatcttgatgatcttattaataaatgtgaaaaacacgctgtagatttcggtaaactcaaagatgcttgcgaagatttaacgctatatactaccatacgatacccaccgttcggaaatttgaccgagaacgatatgaaacacgcgctaaatgatgctcaggacgtactggagttcacgaaaactaagttggcggaaatggggtttgggagttga

SEQ ID NO: 50106 - protein, 108 aa, Unknown
  Obtained from environmental sample
  DOMAIN (4)...(100): HEPN domain
  misc_feature (1)..(108): Xaa is any amino acid
MLAKVPYYAPACYHCQQSVEKILKAYIIAKENILIKTHDLDDLINKCEKHAVDFGKLKDACEDLTLYTTIRYPPFGNLTENDMKHALNDAQDVLEFTKTKLAEMGFGS

SEQ ID NO: 50107 - DNA, 1443 bp, Unknown
  Obtained from environmental sample
  misc_feature (1)..(1443): n is a, c, g, or t
atgtcaaaaaacgcggacgcatatcttcttagcaatgacgggcttgctgatccctggcggattattgaggaaggctggcacaaagaacgaaacatggtttctgaatctgtgttttccctggggaatgaatacatgggagtccgaggttacgccgatgaaggtaccgcggcggaatcattacggggcagttacttcaacggcatttacgaagaagtcgatttagaaaaaagctacaagggcatagttaccaaaacgcattttatggttaacgccgttgactggctctacacggaaattcgcgcagggggtgagacgcttgatatggcaacctctaaaataagtaatttccgccgtgtgctggatatgcgggagggaactttgaggcgcggttttaactggcatacctcagacggtcctgtggttcgccttgattttacccgtttcctcggtatggaagacgcacacgaggcttttcagaaaattcattttactgtttcaggaggcgacatctgcgtcgttgttattattgccaatagctttaatacaggccacggctggaacaaaaaaaattactggaatttggtaaaaagagaatggtttgataacggagcggcagtacaggcgcaaaccatacgcacggggcagcaggttttttccggtttttcctggaaagcaagcggcggcgtacagtggagcaaaaacgaaggggaaaaagcggctggttttgagattgttctgcccctgaaagacggcggcgaaggctggattgaaaaaagcatctataattacgcgcaaaaagagaggaataccgctgctgagccggtttggaaaaatggtatggcagcgcttgcaggcaatttgcctgattttaatcaggcgctggaacaacagcgcaagtattggggttctttctgggaaaacgctgatatccgtatagaaggggatccgcttaaccagcagggaatacggttctgtattttccagatgcaccaaacttatcatggttatgatccttccaacaatatcggagccaaagggcttacgggcgagtcatataacggtcatacattttgggataccgaaacctactgtcttcccttttttattttttccaatcctcaggcagcccgcaatttgcttgaataccgttatgcgacacttaatgctgcaaaggacagggccagggcgcttgactgccggggtgcctgctatcctatagctacgctgaacggagaggaaggctgtagtctttggcagcacgccagcctgcagtttcatcccagcaccgccgttgcttacggcatagcccattatgtaagggtaagcggggacattgaattcctttataatcacggtgctgaaatactcgttgagatttgccgcttcttgtatcacggggatcatggaacaacgccggaacaggctttggcttntatgctgtaa

SEQ ID NO: 50108 - protein, 480 aa, Unknown
  Obtained from environmental sample
  DOMAIN (323)...(480): Glycosyl hydrolase family 65 central catalytic domain
  misc_feature (1)..(480): Xaa is any amino acid
MSKNADAYLLSNDGLADPWRIIEEGWHKERNMVSESVFSLGNEYMGVRGYADEGTAAESLRGSYFNGIYEEVDLEKSYKGIVTKTHFMVNAVDWLYTEIRAGGETLDMATSKISNFRRVLDMREGTLRRGFNWHTSDGPVVRLDFTRFLGMEDAHEAFQKIHFTVSGGDICVVVIIANSFNTGHGWNKKNYWNLVKREWFDNGAAVQAQTIRTGQQVFSGFSWKASGGVQWSKNEGEKAAGFEIVLPLKDGGEGWIEKSIYNYAQKERNTAAEPVWKNGMAALAGNLPDFNQALEQQRKYWGSFWENADIRIEGDPLNQQGIRFCIFQMHQTYHGYDPSNNIGAKGLTGESYNGHTFWDTETYCLPFFIFSNPQAARNLLEYRYATLNAAKDRARALDCRGACYPIATLNGEEGCSLWQHASLQFHPSTAVAYGIAHYVRVSGDIEFLYNHGAEILVEICRFLYHGDHGTTPEQALAXML

SEQ ID NO: 50109 - DNA, 525 bp, Unknown
  Obtained from environmental sample
  misc_feature (1)..(525): n is a, c, g, or t
atgggccgcaagggcgacgcgcagacttatatagcgttagttgaaacaatcagaaagcggctgtttgcggccgttatacgcacaacttttctcgtcggctttcccggtgaaaccgaagacgattttgccatgttggcggatttccaggaaaaactccgtccggactgggccggttgtttcgcgtattcgcatgaggaagacacccccgcctatacgatgaaagcgcaggttcccaaaaaaaccgcagcccgcagaaaacatgaaattgaagaacgtcagattcagattaccgaaaagagcatggaacgttttgtaggccggaactttgacgcgctttttgaggaacgcttttcaggcgcggaagaagatatttggcttggccgtctttattgccacgcgccggaggttgacggggccgcagtaattaccggcgtcgcgcccgaagcggaacccaaagccggagatttactgccctgccgggtaatagcgcggcgggggattgatctggaagcggtaatcaggtaa

SEQ ID NO: 50110 - protein, 174 aa, Unknown
  Obtained from environmental sample
  misc_feature (1)..(174): Xaa is any amino acid
MGRKGDAQTYIALVETIRKRLFAAVIRTTFLVGFPGETEDDFAMLADFQEKLRPDWAGCFAYSHEEDTPAYTMKAQVPKKTAARRKHEIEERQIQITEKSMERFVGRNFDALFEERFSGAEEDIWLGRLYCHAPEVDGAAVITGVAPEAEPKAGDLLPCRVIARRGIDLEAVIR

SEQ ID NO: 50111 - DNA, 1482 bp, Unknown
  Obtained from environmental sample
  misc_feature (1)..(1482): n is a, c, g, or t
ttgctggaaacgaccggcggttgggcgatgtatctttcggcactgctgtcaggcgagcaaacgtacaaaacgccgcaaacattggttcagtaccttgagacgcgggtgtgggacgtatgggatgataaaataaagaaactgctggttaaacttgctatccctgttgaaattacgcctgacttgtgcgaacggttgaccacagaagcggacggtaaaaatattttggaacgtctggttaaaaaggaaggggtgtttttaacgctcatcggaaacggcgtttaccgctttcacgacatattccgtgattttttactggagcgtaccgcgttacttgaaaatcaggaaatacggcggctgaacgacgtaaccgccgaatggtattacgagcggggcgattaccacaccggagcgcagtattatatcagaaacaacgaccacgaaggaattatacgctgtttgacgtctgcttcccaataccatgaagatttgggcgttatgtcggtagaggcttatataaattttaccatacggtatgttaaagacctgcccgctgaatttatttccgaaaacccctacttgatctataaactaatcacgacggcgtatcacaacggcgacatgaacgagtatatgcgttattcggatatgctgtacgaaaaacaggctgaaatcgccgcgaaatatcccgctttgttggaaacatttagtcttgccagggtaattaacccccatgtgccgttaaaagaacacgcaaaggatctgttaaaactaattgaacaaatgcctaaaaccacggcaaaaacgaacaccaacatcggcactatgacgcagaaccttcctttttttcaccgttctttgcgtgatttgtcagagtgttacgaattaaaagcggaagatttgaaattgtttaaggctagtgtcggggtattgatgaataaagattacgaggtgatggaacgggctttattcgcgggtatttattatgaacgcggacagcttatggacgctgttcatcacgctcttatcggaaaggaagcctgtttggaagggatacaccccgaaacacgtttttcagctaacatgattctggcggcggtactctatgcgatgggcgattttcgggatgccggtaatgttatggagcaaacggaagtctttattggagaaaaggcgcggtttttatatccaaatttcaaagctctgcaaacggaacgtgttataaggtctgacaataaggaagcggctcaaaaacaagcgcaggattggctggcagtgtacgcaaacagcgcgcagcggctgccgttttatcaaatatgcaggcactttacatctctgcgttcctatatcgcgctggaagattataaggcggctgttgattttggcagacgtatacaacaactggcggcagattacaaacgtcctcttgaccggattgaaagcactatattgacggctatcgcgttatgggaaaagnggcgataa

SEQ ID NO: 50112 - protein, 493 aa, Unknown
  Obtained from environmental sample
  misc_feature (1)..(493): Xaa is any amino acid
MLETTGGWAMYLSALLSGEQTYKTPQTLVQYLETRVWDVWDDKIKKLLVKLAIPVEITPDLCERLTTEADGKNILERLVKKEGVFLTLIGNGVYRFHDIFRDFLLERTALLENQEIRRLNDVTAEWYYERGDYHTGAQYYIRNNDHEGIIRCLTSASQYHEDLGVMSVEAYINFTIRYVKDLPAEFISENPYLIYKLITTAYHNGDMNEYMRYSDMLYEKQAEIAAKYPALLETFSLARVINPHVPLKEHAKDLLKLIEQMPKTTAKTNTNIGTMTQNLPFFHRSLRDLSECYELKAEDLKLFKASVGVLMNKDYEVMERALFAGIYYERGQLMDAVHHALIGKEACLEGIHPETRFSANMILAAVLYAMGDFRDAGNVMEQTEVFIGEKARFLYPNFKALQTERVIRSDNKEAAQKQAQDWLAVYANSAQRLPFYQICRHFTSLRSYIALEDYKAAVDFGRRIQQLAADYKRPLDRIESTILTAIALWEKXR

SEQ ID NO: 50113 - DNA, 1446 bp, Unknown
  Obtained from environmental sample
  misc_feature (1)..(1446): n is a, c, g, or t
gtgcctgagaaagtgaactgggccgatctgcctatacctgccgatatggccccctatcaggaagaggtactggaaaaagccggggccccgcaagtttttcgcgtagtggtagaaaagataaagcacgagagcacggtaaaaaaaggccgttctcttattccaggtaaggaagagacttcagtcacatgggagaaaaaagaaacccgcgaaaaagttaatgtggacgcgaaagtccttgaagttaagtatgcggaaaaaggagcggtactgggaagcgtgagtccgcctgttcccggtaagaatggaagaagcattttcgcgcggccaattcctcctgagatacttgaaaacccgaattttttattgggaaatggaattgtcaaagaaaggaacgaacttacagctcaagtgtcgggctttgtgcggattggcgataactgggcggatatagttccgctggcaaaacattcttacaagatcaatacgggctcagacggcctgacgcttttttttaactttgagccgggcgataaacgctttaccccgcccacaggcgagcaaatcctcgccgaggcagtcgtaatgggaggcggggaagaaaactttgtcagcgcggtggaactggataacgcaattgacgaggcaataaaaaccggtacgccggtagaggcgtttgcgcttttcaatccccaggaggcggaagccagggtagatataaaccaggacaaaaccagggccgcgctttatcttcgcaaaggtgtggcgggggcgcagcctctggaaatgaaagccatcagtcaggcaataaaagattcaggcatccatggctttgatccggagaagctaaaaaccgccattcatgaattcatggaaagcaatgaaattgtacttcccgagtatgttcttgttgagggggtttcttcgacaaggggggaagataaagatgtcaaggtatctgtggaggttttttcggaggagaaaaaaaaaccggttatcaatcggcttaaggactggttcagccgtgacgtttccggggcgcctgaactggatatcgatgaatcgcttgattttgcttttgtggaaaatggccaggtaatagccaaagtcagtgaaggaaaggaggggaaagacggaaaggatgttttcggcaatataattcctggccttcccggcaacgatcctgaattaaagcttcttgccggtctggaactgcacggctcggaaatcaaggccgcccaggacgggctgctcctttttaaggcttcggaaaaaactttcattggcgaggtgattgtataccaggacgcgaaaatcggaattcacatttccgaagacgcgatgcaagtaaagggggattttttccttgaagcggggccggggattcccattactatcgagaatgtcaaaaaagtgattacctcttacgggataaaaaaagngcgttga

SEQ ID NO: 50114 - protein, 481 aa, Unknown
  Obtained from environmental sample
  misc_feature (1)..(481): Xaa is any amino acid
MPEKVNWADLPIPADMAPYQEEVLEKAGAPQVFRVVVEKIKHESTVKKGRSLIPGKEETSVTWEKKETREKVNVDAKVLEVKYAEKGAVLGSVSPPVPGKNGRSIFARPIPPEILENPNFLLGNGIVKERNELTAQVSGFVRIGDNWADIVPLAKHSYKINTGSDGLTLFFNFEPGDKRFTPPTGEQILAEAVVMGGGEENFVSAVELDNAIDEAIKTGTPVEAFALFNPQEAEARVDINQDKTRAALYLRKGVAGAQPLEMKAISQAIKDSGIHGFDPEKLKTAIHEFMESNEIVLPEYVLVEGVSSTRGEDKDVKVSVEVFSEEKKKPVINRLKDWFSRDVSGAPELDIDESLDFAFVENGQVIAKVSEGKEGKDGKDVFGNIIPGLPGNDPELKLLAGLELHGSEIKAAQDGLLLFKASEKTFIGEVIVYQDAKIGIHISEDAMQVKGDFFLEAGPGIPITIENVKKVITSYGIKKXR

SEQ ID NO: 50115 - DNA, 669 bp, Unknown
  Obtained from environmental sample
  misc_feature (1)..(669): n is a, c, g, or t
atggataatttcgcaagaggcatgtctgtttggcaatatagtaaaaagattttctatattcctcttatgacattcgaactcccaaaactgccttatgggttcaatgaccttgaacctcactatgactccgccacggtggagattcattactcaaaacatcacgctacttatgcggcaaatttgaacaaggctgtggaagcggctgggtggcagggcaaaagcataacggaaattttaaccagtttggatgcagctccagagcagcaaaaggcggctttgagaaatcacggcggcggttatcacaatcattgcttgttttgggaatcactttgcccaaaaagcacaggcataaattctggaaaattggtagaggcaataaatgcaaaatggggaaattttgaaagttttgccgaagcatttaccgcaaaagccttaggacattttggttccggctgggcttggcttgtgaaaaacaaagccggcgagttggaaattgttgacacccacgaccaaattagccccattagccttggattcaaacccataaccgtaattgatgtttgggaacacgcttattatttgaaatacaaaaatgttcgtgcagactggatcaaagcttggtggaatatagtggattggaaaaaagccgaagaaaggtttattaactaa

SEQ ID NO: 50116 - protein, 222 aa, Unknown
  Obtained from environmental sample
  DOMAIN (24)...(111): Iron/manganese superoxide dismutases, alpha-hairpin domain
  misc_feature (1)..(222): Xaa is any amino acid
MDNFARGMSVWQYSKKIFYIPLMTFELPKLPYGFNDLEPHYDSATVEIHYSKHHATYAANLNKAVEAAGWQGKSITEILTSLDAAPEQQKAALRNHGGGYHNHCLFWESLCPKSTGINSGKLVEAINAKWGNFESFAEAFTAKALGHFGSGWAWLVKNKAGELEIVDTHDQISPISLGFKPITVIDVWEHAYYLKYKNVRADWIKAWWNIVDWKKAEERFIN

SEQ ID NO: 50117 - DNA, 657 bp, Unknown
  Obtained from environmental sample
  misc_feature (1)..(657): n is a, c, g, or t
atgcttgctatggcattcacatttaactgctcatcgggcgatggcgatgacgggaacaacaacggcggtggcacgcctagcggtgggggcggcggagcgcaaggtggttgccccgatgcaactactggcagcggcactttgacttgtggcggtcaaacatacaaaactgttgtaatcggtagccaaacttggatggctcaaaacttgaactataccataggagaaagtaaatgttacggcgacagcgaagccaactgcaccacctacggtcgcctttacgactggacaaccgctcggctcgcctgtccatcgggttggcacctgccaagccacgccgaatggtctgtgctaacagatttagtaggtggctccgacgttgctggaacaaaattaaaatctacaagtttcggtggcacagacgacaaagaatttgcagcgatcggtggcggtcaaggcaacccagacggcactttcagcgatattgacgaggacggcaactggtggagtgcaacagaaaatagtgcagccgacaacagcacagcagtcacaaatgacacaaaagcaagagttcggtctatgggctacaaccgcgaaagagtgagcaagggtcaagccgataaaacttacctcttttcggttcgttgcgtgaagaattaa

SEQ ID NO: 50118 - protein, 218 aa, Unknown
  Obtained from environmental sample
  misc_feature (1)..(218): Xaa is any amino acid
MLAMAFTFNCSSGDGDDGNNNGGGTPSGGGGGAQGGCPDATTGSGTLTCGGQTYKTVVIGSQTWMAQNLNYTIGESKCYGDSEANCTTYGRLYDWTTARLACPSGWHLPSHAEWSVLTDLVGGSDVAGTKLKSTSFGGTDDKEFAAIGGGQGNPDGTFSDIDEDGNWWSATENSAADNSTAVTNDTKARVRSMGYNRERVSKGQADKTYLFSVRCVKN

SEQ ID NO: 50119 - DNA, 354 bp, Unknown
  Obtained from environmental sample
  misc_feature (1)..(354): n is a, c, g, or t
gtggaggtttttatgaaacatttgtttgctttttttgtggttcttgttatttgcagctgcgcggcgcttaccgcaaggcggggggtgagcgagggagacgggaaaatctttgagggggtggggcaggggtttcggggacctatttctgtacaggttcgtatgaatgagggcagtattacagagattgaaatagtcgattctatggaagatcgttttgtgggggaagcggctatggaggaattgatcgatcttgtcataatgtataatactgcggatattgacgcggtttcgggcgcaacggaaacaagcgaggggtttttagaggcggtaagaaatgctatacttagacaatga

SEQ ID NO: 50120 - protein, 117 aa, Unknown
  Obtained from environmental sample
  SIGNAL (1)...(24)
  DOMAIN (43)...(117): FMN-binding domain
  misc_feature (1)..(117): Xaa is any amino acid
MEVFMKHLFAFFVVLVICSCAALTARRGVSEGDGKIFEGVGQGFRGPISVQVRMNEGSITEIEIVDSMEDRFVGEAAMEELIDLVIMYNTADIDAVSGATETSEGFLEAVRNAILRQ

SEQ ID NO: 50121 - DNA, 486 bp, Unknown
  Obtained from environmental sample
  misc_feature (1)..(486): n is a, c, g, or t
ttgtggaatcagggggaagtaaccactgtcctatccggcatgaatacaaaagaacaacttgaagaaaacatctcttttgccgaaaaatcatctgtcggaatgttaaatgacaccaagctagcagtttacaagtcggcgcttgatgttataaaacgcttctgtaaaatacgctgtaccggttgtaattactgtatgccgtgtcctgttggggtaaatattcccggttctttttcagcgtataacgtgatatattcaatgggttatgtcgagggaatgaaacaatacattacgagtaccggattgacgcaggaaaaaagcggcagtccgcgactctgtataaaatgcggcaaatgtgaacctaaatgtccgcaaagtattccgattatggaagaacttgttaccgtcaaaaagaaaatggaaccgccgtttgtaaggtttatcggcttttgcgccagagtcttctttggcaataaacgcgtaaaataa

SEQ ID NO: 50122 - protein, 161 aa, Unknown
  Obtained from environmental sample
  DOMAIN (105)...(128): 4Fe-4S binding domain
  misc_feature (1)..(161): Xaa is any amino acid
MWNQGEVTTVLSGMNTKEQLEENISFAEKSSVGMLNDTKLAVYKSALDVIKRFCKIRCTGCNYCMPCPVGVNIPGSFSAYNVIYSMGYVEGMKQYITSTGLTQEKSGSPRLCIKCGKCEPKCPQSIPIMEELVTVKKKMEPPFVRFIGFCARVFFGNKRVK

SEQ ID NO: 50123 - DNA, 1029 bp, Unknown
  Obtained from environmental sample
  misc_feature (1)..(1029): n is a, c, g, or t
atgaacggaatcggcaaattttctcttaccgccggaattggcggccttttgattagctgcatggctggaacagcaaaagatgcgagttatggcaatggtttgtttgccaggataaacactgacaggggcgacattgtggtacagctggaattcccaaaaacgccgttgacagtctgcaattttgtcgctcttgcggaaggcaaaatgaatgttaccgaggggaagcctttttatgacggccttgtctttcacagggttatcccggactttatgatccagggcggcgatcctcagggaaacgggagaggcggacccggctacagctttcccgatgaaattgtcccgtcgcttaagcatgacggtcccggaatactttccatggcaaatgccgggcctggaacaaacggcagccagttctttatcacccatgtcgcgactccctggcttgacggcaagcataccgtcttggcagnngtagttgaggggcaggacgtggtcaacgcgatcaggcagggtgacaaaatcaagtctattgtaataatccgaaatggcccattggcaaaccagttcaaggcggatcaggcggcttttgacgctctgatgagagatgctaatgccgcctctgccggaaagggcaaagcgcagcgtgacgcggatattgcccaaataaacacgaagtaccccaacgcggtacagaccccttccggagttaaatatattattcaaaagaaaggaaccggcaataagcccgccgccggaaaaacggtacaggtaaattacagaggctctttcatttccggtcaggtttttgacagttccgacacgcgcggccgccctcttgaatttgtcacaggcgtcggcgcggtcattaaaggctgggacgaaatgattctggatatgcaagtcggcgaaaagcggcttgccattatcccgcctgagcttgcctatggcgagcgcggagccggcaacggcgttatccctccgaacagcttcctggtttttgaaatggagcttgttggaataaagtaa

SEQ ID NO: 50124 - protein, 342 aa, Unknown
  Obtained from environmental sample
  SIGNAL (1)...(25)
  DOMAIN (245)...(339): FKBP-type peptidyl-prolyl cis-trans isomerase
  misc_feature (1)..(342): Xaa is any amino acid
MNGIGKFSLTAGIGGLLISCMAGTAKDASYGNGLFARINTDRGDIVVQLEFPKTPLTVCNFVALAEGKMNVTEGKPFYDGLVFHRVIPDFMIQGGDPQGNGRGGPGYSFPDEIVPSLKHDGPGILSMANAGPGTNGSQFFITHVATPWLDGKHTVLAXVVEGQDVVNAIRQGDKIKSIVIIRNGPLANQFKADQAAFDALMRDANAASAGKGKAQRDADIAQINTKYPNAVQTPSGVKYIIQKKGTGNKPAAGKTVQVNYRGSFISGQVFDSSDTRGRPLEFVTGVGAVIKGWDEMILDMQVGEKRLAIIPPELAYGERGAGNGVIPPNSFLVFEMELVGIK

SEQ ID NO: 50125 - DNA, 675 bp, Unknown
  Obtained from environmental sample
  misc_feature (1)..(675): n is a, c, g, or t
atggcaaaacgccttctggtgcgcgacggcgacacggtggaagccggcgagcctctttgcgccggaaatatcaacccgcatgacgtattaagcatcatgggcgaaagttatcttcagacctatttgatggacgaaatccagcaggtataccggcttcagggcgtgtcgattaacgacaagcatatcggcgttatagtccgccagatgatgcggaaagttgagatctgctttgtgggcgacacaaggtttatctacggccaaatggtagacaagtaccgcttccacgaggaaaacgccagggttataaaagaaggcggccagcccgcgattgcccggcctttattccagggtataaccaaggcctcgctgaacatcgactcgttcctttcggcggcgagctttcaggaaaccacccgcgtgcttaccaacgccgccattgccggcagcaccgactatctgcgcggcttaaaagaaaacatcatcatcggccacccgatccccgcgggcaccggcatgaagcgttaccgcgacatcaagctttacgatgaagacagccaggatttggaaaagcagatgcaggagatccttgagcagcgcaggatagaagccgagtttatcgcggaggccgcgaaagctgcggaaatgctgcccgttgaggacgccgacgacgaatag

SEQ ID NO: 50126 - protein, 224 aa, Unknown
  Obtained from environmental sample
  DOMAIN (1)...(131): RNA polymerase Rpb1, domain 5
  misc_feature (1)..(224): Xaa is any amino acid
MAKRLLVRDGDTVEAGEPLCAGNINPHDVLSIMGESYLQTYLMDEIQQVYRLQGVSINDKHIGVIVRQMMRKVEICFVGDTRFIYGQMVDKYRFHEENARVIKEGGQPAIARPLFQGITKASLNIDSFLSAASFQETTRVLTNAAIAGSTDYLRGLKENIIIGHPIPAGTGMKRYRDIKLYDEDSQDLEKQMQEILEQRRIEAEFIAEAAKAAEMLPVEDADDE

SEQ ID NO: 50127 - DNA, 1167 bp, Unknown
  Obtained from environmental sample
  misc_feature (1)..(1167): n is a, c, g, or t
gtggtggaaacagaaggggaacttgtcgtagctgcccagaccggcaaaaaaaccccaaacggaggcgatcgtaaaacacaggattcagcggacaagatgtccgtcgacaaattgtctggggacaatttatccgtcgacagcttaattggggatgaattatccggggatatacagtccgaggacagattgtctatcgacaaaccatcaggcccagggaaaaaatcatccagcgtgatttccctccctgaggttcaggaaaacaatgaggtataccgcagttatctgaacctgatagaacgccttgacgaagtctgcaacaatatagcgtccggcgttacaatggaagcgcgttccattgacaacatttcaggccgtctcctgcaatccgtccgggaggaaaggaattcatatataggctatatcctgggcggtgaaataaaaggctacaacatggcaaaaagcctggtaaacagcgccattttatcggctttgatcgcgcttgaaatgaagatgccgaatcacaaggtattgcagatagtaaccggcgctttgctccacgatgttggtatgctcagaatgccaaaggaaattgtggagaaaaagggaggtctttcggacgcggaactccagcgtatccaggcccataccctttacacctataaaattgtgaacaaagaactcctgtatccggaagaagtgggggttatcgtcctgcaacaccacgagcgctgggacggcgagggctatcccaggcgcctttccggaacagccattgacatcggcgcacggatcgtctctgtcgccgacgctttcgaggccatggtgagtaagaagccctaccggaattccatgatgggctaccaggccatgaaaaaccttctttccgataacctgaggcgctttgacccggatgtgatcaaggcctttatccagactatggggatttacccgataggctcaatcatcctgctcaataacggcgctcttggaagagtagtagacgttcaggcaagcgccccgctccggccgacagtcaggatactcgccgatgaattcggcaattttttcaaaaatgactcaggagatctgtttgatctccttattgaaaagagcctcttcattgccagggctgtggatccaaaagaaattgccgataaagacttctag

SEQ ID NO: 50128 - protein, 388 aa, Unknown
  Obtained from environmental sample
  DOMAIN (151)...(274): HD domain
  misc_feature (1)..(388): Xaa is any amino acid
MVETEGELVVAAQTGKKTPNGGDRKTQDSADKMSVDKLSGDNLSVDSLIGDELSGDIQSEDRLSIDKPSGPGKKSSSVISLPEVQENNEVYRSYLNLIERLDEVCNNIASGVTMEARSIDNISGRLLQSVREERNSYIGYILGGEIKGYNMAKSLVNSAILSALIALEMKMPNHKVLQIVTGALLHDVGMLRMPKEIVEKKGGLSDAELQRIQAHTLYTYKIVNKELLYPEEVGVIVLQHHERWDGEGYPRRLSGTAIDIGARIVSVADAFEAMVSKKPYRNSMMGYQAMKNLLSDNLRRFDPDVIKAFIQTMGIYPIGSIILLNNGALGRVVDVQASAPLRPTVRILADEFGNFFKNDSGDLFDLLIEKSLFIARAVDPKEIADKDF

SEQ ID NO: 50129 - DNA, 459 bp, Unknown
  Obtained from environmental sample
  misc_feature (1)..(459): n is a, c, g, or t
atgaattcggcaattttttcaaaaatgactcaggagatctgtttgatctccttattgaaaagagcctcttcattgccagggctgtggatccaaaagaaattgccgataaagacttctagcataggccgtgcgggagaaaatgccgccgccctttattttgaagaaaaagggattcaggttctggaacgaaatttccgttcccgctcaggtgaagttgacattatagctctggacggagaaaccgtcatttttgccgaagtaaaaacctggtcagcatacggaattgaagcccttgaacaatccctggacgccaaaaaacagcgtaagatcatagaaacctctaagtattttctttcgttacatcgagaatataagtatatggcaatccggtttgacgtaatttttatttcccctgagggaattacccatattgcatcggcctttacggagcgtgtatga

SEQ ID NO: 50130 - protein, 152 aa, Unknown
  Obtained from environmental sample
  DOMAIN (44)...(137): Uncharacterised protein family UPF0102
  misc_feature (1)..(152): Xaa is any amino acid
MNSAIFSKMTQEICLISLLKRASSLPGLWIQKKLPIKTSSIGRAGENAAALYFEEKGIQVLERNFRSRSGEVDIIALDGETVIFAEVKTWSAYGIEALEQSLDAKKQRKIIETSKYFLSLHREYKYMAIRFDVIFISPEGITHIASAFTERV

SEQ ID NO: 50131 - DNA, 1167 bp, Unknown
  Obtained from environmental sample
  misc_feature (1)..(1167): n is a, c, g, or t
ttgatgaaaaaagacgatagttcaataagcagcaaaaaatttttctccaatcccaaaataatagaaaattatgctttactgcaaaacctcgaagtttttacttacatagaatccctggagcaggagataaacaactataaaactctttttgccggcgcgctggatattgtcggccgtactaccatcaatgaaattattgacaccaccgtctggcaaatatcagatcgctttttgccttcagtaatagcattcatctggaaacccctgcaaaacagggaaggcattactgtaaagtgttataaaaactacaagcttgtcgacctaagcttgcgggtagaaagtatcaatgtctttgagccgtttttccaaaaacatcccgaacctgtaagcttcaaacgtctttgctccgaaataaacaacgattccagccttcagccccttagccgcgcagaccctgagttaattcttcccattctgggactctccgggctatacggtatggtgcttctgggacgcagtattctgggaaacgagtattccgaaaaagaaatatcattcatacaggacatcatgtccttcgtttcaaaatctattcagaatcacctggactacgagcagaccctgcgcgatcctaaaaccgggctttacaacaacggttttttcattgacaggctaaaccaggaaataattaaagcaaaaagccctaaaaccgaaacatcgatcattattattgacgtagatcgctttaagggctttaacgatgctaacggacaaccggcaggcgacaaggttctggaaactctggcaattacattaaaacagggcataaggacaggtgatgttccatcccgctttgaaggggaaaaattcgcgatccttttgcctgaaacaactaaagatgtggcgtggatggttgcggaacggctgcgaaatgcggcggagaccatgaaggttgcctgggaaccgccgttgccgcaggtgacaatcagccttggtgttttcactatcaataagacgaccaatattaccgcggacgaagcaatcaggcgggcggatgaggcgctttgcatatccaaagaaatgggcaggaaccgcactaccacctggggaggcggccttttaagcaagattcaacatttggaagcggagtcaaagcaaaaaaaatag

SEQ ID NO: 50132 - protein, 388 aa, Unknown
  Obtained from environmental sample
  DOMAIN (203)...(365): GGDEF domain
  misc_feature (1)..(388): Xaa is any amino acid
MMKKDDSSISSKKFFSNPKIIENYALLQNLEVFTYIESLEQEINNYKTLFAGALDIVGRTTINEIIDTTVWQISDRFLPSVIAFIWKPLQNREGITVKCYKNYKLVDLSLRVESINVFEPFFQKHPEPVSFKRLCSEINNDSSLQPLSRADPELILPILGLSGLYGMVLLGRSILGNEYSEKEISFIQDIMSFVSKSIQNHLDYEQTLRDPKTGLYNNGFFIDRLNQEIIKAKSPKTETSIIIIDVDRFKGFNDANGQPAGDKVLETLAITLKQGIRTGDVPSRFEGEKFAILLPETTKDVAWMVAERLRNAAETMKVAWEPPLPQVTISLGVFTINKTTNITADEAIRRADEALCISKEMGRNRTTTWGGGLLSKIQHLEAESKQKK

SEQ ID NO: 50133 - DNA, 807 bp, Unknown
  Obtained from environmental sample
  misc_feature (1)..(807): n is a, c, g, or t
gtgatagtggtaacaccgacaaaatttcattgtgaaatcgtggttgaagcggcaaaggcaaagaagcacatactctgcgaaaaacccatggcaatgaacagggaagaatgtctgcttatgaacgaagcggctctggccaacaatgtgaatcttcaaatcggtttcatgcgccggtttgacgcaaatttcaggcgggctaaagaactcgtcgattcagaggcaatcggtcaggttgtaacggtcaagtctctgacccatggacctagtaccccccatgaatggatgtatgatatagaaaaaagcaacggtccccttgcggaagtgaacagccatgacatcgacaccttgcgctggtttaccggaagcgatgcggagagcttgtacgccatagccggaaatttccgctgcgacaacgcaaggacgaagtatcctgatttttacgatactgtactgatgaatatacgcatgaaaaacgggatgctgggaaacattgacggggcccagggagtccagtacggatataacgcaagggtagatatcatgggaactgatggtcatattgagataggaggactcgctgaaaacacaacacttttgtacacaaaagacaagcaatttcggggagacaccgtcaaaagctggacagctttattttttgaagcctatgtaaatgaggacatcagctttatcaagtccatcagggaggggaaacagcctgaaataacagggatagacggaatggcggcagtgaatatagtgcgagccggaaataaatctattaaatcgggacaaattgtcaggctgtaa

SEQ ID NO: 50134 - protein, 268 aa, Unknown
  Obtained from environmental sample
  misc_feature (1)..(268): Xaa is any amino acid
MIVVTPTKFHCEIVVEAAKAKKHILCEKPMAMNREECLLMNEAALANNVNLQIGFMRRFDANFRRAKELVDSEAIGQVVTVKSLTHGPSTPHEWMYDIEKSNGPLAEVNSHDIDTLRWFTGSDAESLYAIAGNFRCDNARTKYPDFYDTVLMNIRMKNGMLGNIDGAQGVQYGYNARVDIMGTDGHIEIGGLAENTTLLYTKDKQFRGDTVKSWTALFFEAYVNEDISFIKSIREGKQPEITGIDGMAAVNIVRAGNKSIKSGQIVRL

SEQ ID NO: 50135 - DNA, 744 bp, Unknown
  Obtained from environmental sample
  misc_feature (1)..(744): n is a, c, g, or t
gtgtgccagggtctcccgggcgcgcttccggcgcttaatcgggcggcggtggagatggcggtgcgcatggggctgtcgctcggatgccgcgtcaacaccaagtcgatcttcgcccgcaagcattacttctaccccgacctccccaagggctaccagatatcgcaactcgacatcccgatatgcgaggcggggacgctgccgatagtcgttgacgggcgggaatcgtccatccgcataaaccgcgttcacatggaggaggacgccggcaaactcgtgcacgaccaagacgccgactcgctcttcgacgtgaaccgctgcggcagcccgctcatagagatcgtctccgagccggatatgcgcagcccgcaggaggcgtacgcttatctgatggggctgaagcagatactcgagtatctcggcgtatgcgattgcaacatggaggagggcagcctgcgttgcgacgcanatatatcactgcgtcccaaaggagagagcaaactcggcaccaaaacggaaatcaagaacatgaacagtttccgcaatctcgaaaaggcgcttgaatacgaggctaagcggcaggaggaggtgctgaggtccggcgggacgcgtcgtgcagcagactttcttgtggaatccgaacgaaaaccgctccgtccccatgcggacgaaggaagacgccgacgactaccgctacttccccgatcccgacctcacgccgctggtcgtggaggcggcgtgggttga

SEQ ID NO: 50136 - protein, 247 aa, Unknown
  Obtained from environmental sample
  DOMAIN (1)...(200): PET112 family, N terminal region
  misc_feature (1)..(247): Xaa is any amino acid
MCQGLPGALPALNRAAVEMAVRMGLSLGCRVNTKSIFARKHYFYPDLPKGYQISQLDIPICEAGTLPIVVDGRESSIRINRVHMEEDAGKLVHDQDADSLFDVNRCGSPLIEIVSEPDMRSPQEAYAYLMGLKQILEYLGVCDCNMEEGSLRCDAXISLRPKGESKLGTKTEIKNMNSFRNLEKALEYEAKRQEEVLRSGGTRRAADFLVESERKPLRPHADEGRRRRLPLLPRSRPHAAGRGGGVG

SEQ ID NO: 50137 - DNA, 705 bp, Unknown
  Obtained from environmental sample
  misc_feature (1)..(705): n is a, c, g, or t
gtgcagcagactttcttgtggaatccgaacgaaaaccgctccgtccccatgcggacgaaggaagacgccgacgactaccgctacttccccgatcccgacctcacgccgctggtcgtggaggcggcgtgggttgacaaaatgagagagactttgccggaactgccctcgctccgccgccgcaggtttgagggcggctacaagatcaccccctacgccgccgaggtgctgaccggctcgcgccctttggccgactacttcgagcggtgcgtaagcggctgcggcgacgccaagtccgccgcaaattgggtgatgacggacattatgagaatgatgaacgacgcgaaaatcgaaagcccgtttgaactgaagaccaagccggagcggttgggcgggttgataaaattgataaacagcggcggcgtctcagccaaagccgcgaagagggttttggacctgatggagagcgaggacaaagaaccgggcgccgttatccgcgaacagggccttgaacaagtctcggacgcgtcggcgcttgaggcggtggtgaaaagcgtggtcgacgcccaccccgccgaggcgcagcggtacaaagacggcgataagaagctcaccggcttcttcatgggccaagtgatgaaggcctccaaaggcgccgccaatccgaaagaggccgcggccattctagacaggttgattttgggatga

SEQ ID NO: 50138 - protein, 234 aa, Unknown
  Obtained from environmental sample
  DOMAIN (14)...(82): PET112 family, C terminal region
  misc_feature (1)..(234): Xaa is any amino acid
MQQTFLWNPNENRSVPMRTKEDADDYRYFPDPDLTPLVVEAAWVDKMRETLPELPSLRRRRFEGGYKITPYAAEVLTGSRPLADYFERCVSGCGDAKSAANWVMTDIMRMMNDAKIESPFELKTKPERLGGLIKLINSGGVSAKAAKRVLDLMESEDKEPGAVIREQGLEQVSDASALEAVVKSVVDAHPAEAQRYKDGDKKLTGFFMGQVMKASKGAANPKEAAAILDRLILG

SEQ ID NO: 50139 - DNA, 912 bp, Unknown
  Obtained from environmental sample
  misc_feature (1)..(912): n is a, c, g, or t
ttgcaaggcgatttgagaatgcacgagcgtcctataaaggatttggtggatgccctgcgctctttgggggcaaacattgactatttaggaaacaacggttacccgccgctaaagataaaagcaaacgggttaaatggcggaattgttcacataaaaggtaatatatccagccagtttttatctgcgcttttaatagcagcgccgtattgcaaaaatcctttggagataattgtggacggcgaactgatatcaaaaccttatgtgtatatgacaatacgtttgatggataaatttggaataaaagttgagaataacgattataaaagttttaagatagaaaagggagtttataaagcccaaactcttaaagtagagggagacgcttcttctgcgagttatttttgggcagcagcggcaataacaaaagggaatgttattattcacggcattgaagaagacagtttgcaaggcgatgtgaaatttttggatgtgataaaagaaatgggagaggagttaactggtataaccgtggatgccacgcttttcccagatgcagctatgacaatctgccctcttgccctttacgcaaaaggcaaaacaaaaatcactggcatagcgagctggaaagtaaaggaaaccgatagaatttccgcaatggcaaacgaactccgcaaagttggtgcagagataacggctggcgatgactttatagagataaccccgccagagcagattttacccgcaaccatagaaacctataacgaccacagaatggcgatgagttttagcttgctctccttaaattcgccgcaaaaaaatggagcggaaatcacgattttaaatccagcttgcgtcaataaaactttcccaaattatttcactctgtttcatttcctctctcatcgactctag

SEQ ID NO: 50140 - protein, 303 aa, Unknown
  Obtained from environmental sample
  DOMAIN (2)...(296): EPSP synthase (3-phosphoshikimate 1-carboxyvinyltransferase)
  misc_feature (1)..(303): Xaa is any amino acid
MQGDLRMHERPIKDLVDALRSLGANIDYLGNNGYPPLKIKANGLNGGIVHIKGNISSQFLSALLIAAPYCKNPLEIIVDGELISKPYVYMTIRLMDKFGIKVENNDYKSFKIEKGVYKAQTLKVEGDASSASYFWAAAAITKGNVIIHGIEEDSLQGDVKFLDVIKEMGEELTGITVDATLFPDAAMTICPLALYAKGKTKITGIASWKVKETDRISAMANELRKVGAEITAGDDFIEITPPEQILPATIETYNDHRMAMSFSLLSLNSPQKNGAEITILNPACVNKTFPNYFTLFHFLSHRL

SEQ ID NO: 50141 - DNA, 813 bp, Unknown
  Obtained from environmental sample
  misc_feature (1)..(813): n is a, c, g, or t
ttgaaaaccgccgtgacagaaggagaagtccactttgagacagagctttatcttccgggcggcatgaaggttcttgacgttgatttcaagcgtatcccctacggtgacacttttgcgatagtcggttaccttgtcgacctgaccgatgtaagtgaaacagaaaaacaaatgatgctggcaatggaagaagcgcaggcggcaaaccgcgccaaaagcgaattcctttcaaatatgagtcacgaaatacggacgcccatgaacgcgataatcggaatgacaaacattggaaaaaattccttcaacatagatcgaaaaaattacgccttcggcaagatagaagaagcatccagccaccttctgggcataatcaatgatattcttgatatgtcaaaaatagaagccggaaaatttgaattgtcttttgtggaattcaactttgaaagaatgctaaaaagggtatccgatgttattatattcaggatggatgaaaaaaaacagagattccttgtacgcattgaccggaatatccccggaaccgttattggcgacgatcagcgtctggcgcaggtaattaccaatcttttgagcaacgcagtaaaatttacaccggaagacggcagaataaccctggatgcgtttttcgtggaagaaaaagacgccatcgtaacattgcgtattgaagtacgcgattcgggtataggaatcagcaaggaacagcaggcgcggttattcaatatgttccaacaggcggaaagcggcactacgcgcaaattcggaggtacgggactggggctggcatttccaaacggatag

SEQ ID NO: 50142 - protein, 270 aa, Unknown
  Obtained from environmental sample
  DOMAIN (182)...(270): Histidine kinase-, DNA gyrase B-, and HSP90-like ATPase
  misc_feature (1)..(270): Xaa is any amino acid
MKTAVTEGEVHFETELYLPGGMKVLDVDFKRIPYGDTFAIVGYLVDLTDVSETEKQMMLAMEEAQAANRAKSEFLSNMSHEIRTPMNAIIGMTNIGKNSFNIDRKNYAFGKIEEASSHLLGIINDILDMSKIEAGKFELSFVEFNFERMLKRVSDVIIFRMDEKKQRFLVRIDRNIPGTVIGDDQRLAQVITNLLSNAVKFTPEDGRITLDAFFVEEKDAIVTLRIEVRDSGIGISKEQQARLFNMFQQAESGTTRKFGGTGLGLAFPNG

SEQ ID NO: 50143 - DNA, 939 bp, Unknown
  Obtained from environmental sample
  misc_feature (1)..(939): n is a, c, g, or t
atgatggacgggaaaatctggatagagtcagaactcggtcagggcgccgcgtttatctttaccgtaagactggaaaaaacgttctctgacgaacggcatattctggccagcagcgtcaatatgtcaaatatacgcgtccttgcggtcgatgatatgccggaggtacgcgaatattttgtggatgtcgcccagcgcctgaacttccattgcgatgtcgcaggctccggcgaagaagcgctggaaatgatcagaaaaaaaggaaattacaatatttgcttccttgactggaagatgcccggtttagaccactttgaactgtcgcaattaataaacaaaaacggccataatgattcggtaatattcatgatgtctaccgctgaattgaacagtctggaagctgaagcaaaagcggttgggattaaacgttttctctcaaaaccgctgttcccgtcgttaatttccgattgtattaatgattatcttgggtttggaaatatcaaaaaggaagataaaaacgacataagcaagaaaggtgagttcagaggccggcatatactccttgtggaagatattgaaataaatcgcgaaatcgtacttacgctgctggaaccgacagaactcgctatagactgcgcggaagacggaaaaaccgcctttgatatgtaccgcagaacgccggatgcctataacttgatctttatggatatacagatgcctaacatggacggatatgaagcaaccagactcatcagggagtacgagctggaaaaatctgaactgtctcaaatacggttaaaaagagtgccaattgttgccatgacggccaatgttttccgcgaggatgttgaaaaatgcattctcgccggtatggacgaccatatcggcaaaccgcttgtccttacagaagtaattgaaatactgcggaaatacctgggttaa

SEQ ID NO: 50144 - protein, 312 aa, Unknown
  Obtained from environmental sample
  DOMAIN (44)...(158): Response regulator receiver domain
  misc_feature (1)..(312): Xaa is any amino acid
MMDGKIWIESELGQGAAFIFTVRLEKTFSDERHILASSVNMSNIRVLAVDDMPEVREYFVDVAQRLNFHCDVAGSGEEALEMIRKKGNYNICFLDWKMPGLDHFELSQLINKNGHNDSVIFMMSTAELNSLEAEAKAVGIKRFLSKPLFPSLISDCINDYLGFGNIKKEDKNDISKKGEFRGRHILLVEDIEINREIVLTLLEPTELAIDCAEDGKTAFDMYRRTPDAYNLIFMDIQMPNMDGYEATRLIREYELEKSELSQIRLKRVPIVAMTANVFREDVEKCILAGMDDHIGKPLVLTEVIEILRKYLG

SEQ ID NO: 50145 - DNA, 1191 bp, Unknown
  Obtained from environmental sample
  misc_feature (1)..(1191): n is a, c, g, or t
ttgagctccatttttcccgaaactctgccagacagcaccacggtaccgatagttgtctgcgatgataccgccaccagccacgaggcggtttttcaggcgctttatgccgttgatataatggcggtaataggcgcgccgctttatgttgacggccacttatggggtgtaatgtgcgtggaacagagtcttacgccgcgcaagtggacgcaaaatgaaaagagatttgtcgccatgacggcaagcaccatcgcgggcgtaatcatgcgcgacatctataccataaagcttaaagaagcgctgaataaggcgatggaagcaagcaaggcaaaaagcgatttcctctccaacatgagccatgaaatacgcacgcccctgaacgcgataaccggcatgactacaatcggcaagaacgcgaaagatatggaacgcaaagactacgcgctggacaagatagaaggcgcgtcaacgcacctgcttggcgttataaacgatgtgcttgatatgtcaaaaatcgaggcgaatatgctggagctgtcgccctgtgaatttaattttgaaaagatgctgcaaaaagtggtctcggtaatcaatttccgcgtggacgaaaagcggcaggaccttgtagtacatcttgacagtaaaattcccaagaccctgatagccgatgaccagcgtctggcccaggtagttacaaatcttttgagcaatgccgttaaattcacgcctgaagaaggcaccattattcttaacgcaaactttattgaggaaaacaaaggtctttgtaccatacaggtttcagtaaccgacacggggattggaataagcgccgaagatcaaaacgacctgttcaattccttcaacaggaggaatccagcacaacacgcaaaatatggcggtacggggctgggtctcgcgatttccaaaagcattgtagaaataatgggcggctcaatatgggttcagtcagaactcgaaaaagggtctgtttttatctttaccattcaggcgcggcgcggtacgggagaaaaaccggaagtgatcaatgaacattctggcgtgggcaaacaacaggaggaagaaacgcagactgcggaagtagagggtgtctttgccgggcaacgcatactactggttgaagatgtggatattaaccgcgaaattgtaaagagcgtgcttgaaccggcacagtag

SEQ ID NO: 50146 - protein, 396 aa, Unknown
  Obtained from environmental sample
  DOMAIN (109)...(174): His Kinase A (phosphoacceptor) domain
  misc_feature (1)..(396): Xaa is any amino acid
MSSIFPETLPDSTTVPIVVCDDTATSHEAVFQALYAVDIMAVIGAPLYVDGHLWGVMCVEQSLTPRKWTQNEKRFVAMTASTIAGVIMRDIYTIKLKEALNKAMEASKAKSDFLSNMSHEIRTPLNAITGMTTIGKNAKDMERKDYALDKIEGASTHLLGVINDVLDMSKIEANMLELSPCEFNFEKMLQKVVSVINFRVDEKRQDLVVHLDSKIPKTLIADDQRLAQVVTNLLSNAVKFTPEEGTIILNANFIEENKGLCTIQVSVTDTGIGISAEDQNDLFNSFNRRNPAQHAKYGGTGLGLAISKSIVEIMGGSIWVQSELEKGSVFIFTIQARRGTGEKPEVINEHSGVGKQQEEETQTAEVEGVFAGQRILLVEDVDINREIVKSVLEPAQ

SEQ ID NO: 50147 - DNA, 600 bp, Unknown
  Obtained from environmental sample
  misc_feature (1)..(600): n is a, c, g, or t
ttgatagacgtactgcttggaacccagatggtagccaaaggccttaactttcccggcgtgcgcctcgtgggcgtggtctttgcggacaccggcctgcacctgcccgatttccgcgccgccgagcgcactttctcgctgattgtgcaggtcgccggcagagcggggcgttattttcccgacggcaaggttatagtccagaccttccgcatgggcgatcctgtgattgcccgctcctgcgcgattgacgtgaaaggcttttttgaagcggaacttagtcagcgtgaagctctcaatttcccgccctatacccgccttatacgtttcagcgcccgcagccgtaactgtgcgcgcgccgatgccgcaatcaagcggcttgccgcgctcgccgcgccgcttatccccccgggcgccgacatgctggggcccgctgaatgtcccatagggattatcaacggaaaccaccgccgccagcttatcctgcgcggcaaatcaatgggcactctgcacggggccgcccgcgtccttttggaacgctatgaaaaaggccgtgacagccaggtatatatggaagtggacgtggatccggtgaatttgttataa

SEQ ID NO: 50148 - protein, 199 aa, Unknown
  Obtained from environmental sample
  misc_feature (1)..(199): Xaa is any amino acid
MIDVLLGTQMVAKGLNFPGVRLVGVVFADTGLHLPDFRAAERTFSLIVQVAGRAGRYFPDGKVIVQTFRMGDPVIARSCAIDVKGFFEAELSQREALNFPPYTRLIRFSARSRNCARADAAIKRLAALAAPLIPPGADMLGPAECPIGIINGNHRRQLILRGKSMGTLHGAARVLLERYEKGRDSQVYMEVDVDPVNLL

SEQ ID NO: 50149 - DNA, 885 bp, Unknown
  Obtained from environmental sample
  misc_feature (1)..(885): n is a, c, g, or t
atggccgagaggacgctactttttggcctcggcgtcgaacaccgacaaactgcctttaaccggctttccgcctgtccggtagatcacggcttcgccgaacgcctttacggggttcgggcctaccactactccgcccgacgacgacctcaccggcgctaccgcgacgacttcctcagacgcgccgccgctcggaatctctcggttcggcgacgacaccgatatggactctccgaacgacaccgttactacagccgcgtcggacagacccgcgtgaacgtacgtgaagaaggtgtctaccacctccgcgccgtttatcgtccagcgggacacgctgtaaccgtcggcgggaaccgccgtgaacacgatgtccttgccgatgcccaccgaatcgccggaggctatcggcttgccgtctaccgtcaccctcaatgtcccgttcgctccggcgctgaacgtcaccttcgcgtgggtgaacagcgaccacctcgcgtagattaccgcgtcgtcctcgaacaccgtgctcgtcgtcaccttgacgccgaactccgcgtccgtgaaccagcctacgaaagtgtaatccttcaacataggcgtgggcaatgtggcgagtttgccgcccggaaccgtattggcggacgccgccgaaaccgcgccgccgttggggtcgaacgttatcgtgaaagtgagcgccgtccaattcgccgtgtagttcttcgcgccggtactcccctgcggaatagtcacgtccgtctgcttggccgagccgttcgatccagtccaaccgtcgaacgtgtaagcgggcctgacagggttgttcagtacgatgtccgccgtctccacagtgtaactcagaggattcgcgggcgtggacgtgccgccgtttaa

SEQ ID NO: 50150 - protein, 294 aa, Unknown
  Obtained from environmental sample
  misc_feature (1)..(294): Xaa is any amino acid
MAERTLLFGLGVEHRQTAFNRLSACPVDHGFAERLYGVRAYHYSARRRPHRRYRDDFLRRAAARNLSVRRRHRYGLSERHRYYSRVGQTRVNVREEGVYHLRAVYRPAGHAVTVGGNRREHDVLADAHRIAGGYRLAVYRHPQCPVRSGAERHLRVGEQRPPRVDYRVVLEHRARRHLDAELRVREPAYESVILQHRRGQCGEFAARNRIGGRRRNRAAVGVERYRESERRPIRRVVLRAGTPLRNSHVRLLGRAVRSSPTVERVSGPDRVVQYDVRRLHSVTQRIRGRGRAAV

SEQ ID NO: 50151 - DNA, 1923 bp, Unknown
  Obtained from environmental sample
  misc_feature (1)..(1923): n is a, c, g, or t
ttggtaaacgccggcgacggcaagctcccgtatttgcccgtgcctaagctcaatctttacgcctttgacgcctggtacaccgcgccgacgggaggtactaagataacgctgaacacggtgttcaccggagacgaggctgttttcgcccattggatccctctctacattataaggttcaacgccaacggcggcacggtttccatcgcggcggacacaaccggcgcggacgggaaattggcggctctgcctacgcctgtccccgccaacaacggcgagacgttcaagggttggttcaccgcgcccgcgagcggcgagagggtgacggcaagcacggtgttcaccggcgacgccacgctctacgcccagtggtcgcccgccgcggtgtcttacactgtgacgttcaacgctaacggtggtttggtaaatccgacctcccgcgtaacgaccggcgacggaacactcgcggcgctgccgataccggcgagagagaattacgcctttaccggctggttcacgtcggcgacggtaggcagcacggaggtgacgacggattacgtattcaccggaaacacgacgatctacgcccgttggacgcctatctatactgtaacgttcaaccccaacaacggcactgtctctccgacatccgccccgataggcacggacggaacgatcgcgattttccccatgcctatgcgggccggttacgcctttgacggctggtacacggcagcgaccggcggtacagaggtattggcggataatatcttcaccgcgaataccacaatctacgctcattggacgcccgtaagttatataataacgttcaaccccaacggcggcacggtctctatattgtccggcgttacgggaaccggcggcaaactcgcgtctttgcctgtgcctacggggaaaaccggctacacgttcagcggctggtataccgagccttcgtcaaccggcggcgagcaggtaacgacaagcacggcgttcacggaggacgcggtaatctacgcccgttatacgcttacgagttacgcgataacctacacattaaacggcggcacgtccacgcccgcgaatcctctgagttacactgtggagacggcggacatcgtactgaacaaccctgtcaggcccgcttacacgttcgacggttggactggatcgaacggctcggccaagcagacggacgtgactattccgcaggggagtaccggcgcgaagaactacacggcgaattggacggcgctcactttcacgataacgttcgaccccaacggcggcgcggtttcggcggcgtccgccaatacggttccgggcggcaaactcgccacattgcccacgcctatgttgaaggattacactttcgtaggctggttcacggacgcggagttcggcgtcaaggtgacgacgagcacggtgttcgaggacgacgcggtaatctacgcgaggtggtcgctgttcacccacgcgaaggtgacgttcagcgccggagcgaacgggacattgagggtgacggtagacggcaagccgatagcctccggcgattcggtgggcatcggcaaggacatcgtgttcacggcggttcccgccgacggttacagcgtgtcccgctggacgataaacggcgcggaggtggtagacaccttcttcacgtacgttcacgcgggtctgtccgacgcggctgtagtaacggtgtcgttcggagagtccatatcggtgtcgtcgccgaaccgagagattccgagcggcggcgcgtctgaggaagtcgtcgcggtagcgccggtgaggtcgtcgtcgggcggagtagtggtaggcccgaaccccgtaaaggcgttcggcgaagccgtgatctaccggacaggcggaaagccggttaaaggcagtttgtcggtgttcgacgccgaggccaaaaagtag

SEQ ID NO: 50152 - protein, 640 aa, Unknown
  Obtained from environmental sample
  misc_feature (1)..(640): Xaa is any amino acid
MVNAGDGKLPYLPVPKLNLYAFDAWYTAPTGGTKITLNTVFTGDEAVFAHWIPLYIIRFNANGGTVSIAADTTGADGKLAALPTPVPANNGETFKGWFTAPASGERVTASTVFTGDATLYAQWSPAAVSYTVTFNANGGLVNPTSRVTTGDGTLAALPIPARENYAFTGWFTSATVGSTEVTTDYVFTGNTTIYARWTPIYTVTFNPNNGTVSPTSAPIGTDGTIAIFPMPMRAGYAFDGWYTAATGGTEVLADNIFTANTTIYAHWTPVSYIITFNPNGGTVSILSGVTGTGGKLASLPVPTGKTGYTFSGWYTEPSSTGGEQVTTSTAFTEDAVIYARYTLTSYAITYTLNGGTSTPANPLSYTVETADIVLNNPVRPAYTFDGWTGSNGSAKQTDVTIPQGSTGAKNYTANWTALTFTITFDPNGGAVSAASANTVPGGKLATLPTPMLKDYTFVGWFTDAEFGVKVTTSTVFEDDAVIYARWSLFTHAKVTFSAGANGTLRVTVDGKPIASGDSVGIGKDIVFTAVPADGYSVSRWTINGAEVVDTFFTYVHAGLSDAAVVTVSFGESISVSSPNREIPSGGASEEVVAVAPVRSSSGGVVVGPNPVKAFGEAVIYRTGGKPVKGSLSVFDAEAKK

SEQ ID NO: 50153 - DNA, 621 bp, Unknown
  Obtained from environmental sample
  misc_feature (1)..(621): n is a, c, g, or t
atgcggctaattgctcaagtgtgcccccaattcgaccccggcgcaaggtggcgggacaggaacagccaagcaatagctaagacacgtattttcagcctgatggagattcagagggaatccccctacagccaagcagcgggggccttttacaggctcgactgccccgagtgggtgcacgtgattccattcaccgcaaaagtagcggggctagagcttttggccgtggagcaatatcggcacggggttgactgtgcatcgctggaagcgccaggcggagtgtgcgatgcaggggaagacccactggctgccgcaaagagggaactgctggaagagacgggctatgcctcagacaattgggtctgcttaggttcctgcagcccgaaccccgcaatccagacaaaccactgccatttttttctggcgctggactgcgaaaaattgcacgatttagcgctggatccaactgaagagctgcgggtgtgggcactgacctattttgaatgggaggccaagctgaaatcgggcgaaatacaccacgccctgacgcttgccgcgttcagccgcctgcactccagcaaggcttggcagccactgcaaaagcagattaacgaagtgggctag

SEQ ID NO: 50154 - protein, 206 aa, Unknown
  Obtained from environmental sample
  DOMAIN (57)...(189): NUDIX domain
  misc_feature (1)..(206): Xaa is any amino acid
MRLIAQVCPQFDPGARWRDRNSQAIAKTRIFSLMEIQRESPYSQAAGAFYRLDCPEWVHVIPFTAKVAGLELLAVEQYRHGVDCASLEAPGGVCDAGEDPLAAAKRELLEETGYASDNWVCLGSCSPNPAIQTNHCHFFLALDCEKLHDLALDPTEELRVWALTYFEWEAKLKSGEIHHALTLAAFSRLHSSKAWQPLQKQINEVG

SEQ ID NO: 50155 - DNA, 498 bp, Unknown
  Obtained from environmental sample
  misc_feature (1)..(498): n is a, c, g, or t
atgaacattgccgaggcggtgcgtattcttgatgagagtatcactgataggacagtggggctccccgatgatattttttatttcatcagccggactacgcccttggtaaacgttgatttactggtaaaagatgaaattggccgtacgcttctttcatggcgtgacgatgagtattgtaagaaaggatggcacattcccggcggtatcatacggtatatggaaacgtttgagcagcgcatacaaaaaacggcggagagagaattcggtatcaacgtatcgtttgaccccgtaccgttaagtgtggaggagatcatccttccggaacttagaaaccgcgggcactttatatcgtttttgtataaatgcgccgttccaatgggttacactcttgataacggcgataagagccaggaaacgccggggtaccttatgtggcatgacgggtgtccgaagaacttgattaaggtgcatgagaggtataggaagtttattggatag

SEQ ID NO: 50156 - protein, 165 aa, Unknown
  Obtained from environmental sample
  misc_feature (1)..(165): Xaa is any amino acid
MNIAEAVRILDESITDRTVGLPDDIFYFISRTTPLVNVDLLVKDEIGRTLLSWRDDEYCKKGWHIPGGIIRYMETFEQRIQKTAEREFGINVSFDPVPLSVEEIILPELRNRGHFISFLYKCAVPMGYTLDNGDKSQETPGYLMWHDGCPKNLIKVHERYRKFIG

SEQ ID NO: 50157 - DNA, 600 bp, Unknown
  Obtained from environmental sample
  misc_feature (1)..(600): n is a, c, g, or t
atggaaggaaaaatgcaaataatatttggaattttaacggggcttttgggattgtactccctgttgatagtcatcaggattattcttacctggttctcgggcggggagtttggcaggccggtggaaattttggcccgtattaccgatccgtatcttgactggtggcggcggaggctcaacctgagggccggctacctggatctctcccctattgtcgccatggcggccctctctgtagcgcagacgatctgttccgcgattgcccaaacgggaaggatcagcctggggcttttgcttgccgtatgtctttccgcgctgtggtcggctgtttcctttatacttggcttctgcctcatcattcttgtcctccgcctgattgcctatcttatcaacgccgatatgttcggcatgttctggcgggtcatagattccatatcacggcccctcctttaccgcgtcagccggatcgtttttagaaatcgcatagtccgttttacaacaagtatcataatttcaatccttcttctgaccgttctctggattggaggaaaagtcgtcgtacagtttgtttccggcatcttattcaggctgccattataa

SEQ ID NO: 50158 - protein, 199 aa, Unknown
  Obtained from environmental sample
  DOMAIN (5)...(87): YGGT family
  misc_feature (1)..(199): Xaa is any amino acid
MEGKMQIIFGILTGLLGLYSLLIVIRIILTWFSGGEFGRPVEILARITDPYLDWWRRRLNLRAGYLDLSPIVAMAALSVAQTICSAIAQTGRISLGLLLAVCLSALWSAVSFILGFCLIILVLRLIAYLINADMFGMFWRVIDSISRPLLYRVSRIVFRNRIVRFTTSIIISILLLTVLWIGGKVVVQFVSGILFRLPL

SEQ ID NO: 50159 - DNA, 798 bp, Unknown
  Obtained from environmental sample
  misc_feature (1)..(798): n is a, c, g, or t
atggcttatgctgcattggaagactacaacggagaaattgaagttacatttttctccaggacatgggaagcctgcgaggacaagatccaggatgataaagtcgccatattaaggggaaaaattgagtaccagagaaacaaagacaagtacggtttcattgccgacagttggattgatgtccgtgaagcgcaagcggcgatagaagaggaagaagctttacaaaaaaagcgggaaaaattccgcaatgtctggctttatatggcggacctgaaaagcggcggacttgccaaagcggggaagggcagctacacagttattgggcagcttagctccttaagggaaagccaggataaaaacggcgaggagatggcattcggcaccatacaggactttgagggtgatattgatctggtgttctgggcaaaaacgtggaaggaaagccgcgaattactgaacctgggtgagtttgttgcccttaaagggagccttgatcccgaaaaagaccgcaacccgcaaaggccgagccttaaagtgagcaaggttgacgaccttgcggctctaagccgttccgcggcgcgaaaagcggaagccggggaacagccgcgaatcccggcacagggaatgcaaacagcaataaaagaaaattctcctgacacagggcagccagcccctgtgttaaacgaaatccatatcaggctggaaaacggagccgccgacagggacgaaaccatacaacccctgcggaattaccttacgggtaacccagggcccctgtccggtttatatacacattggtga

SEQ ID NO: 50160 - protein, 265 aa, Unknown
  Obtained from environmental sample
  DOMAIN (103)...(184): OB-fold nucleic acid binding domain
  misc_feature (1)..(265): Xaa is any amino acid
MAYAALEDYNGEIEVTFFSRTWEACEDKIQDDKVAILRGKIEYQRNKDKYGFIADSWIDVREAQAAIEEEEALQKKREKFRNVWLYMADLKSGGLAKAGKGSYTVIGQLSSLRESQDKNGEEMAFGTIQDFEGDIDLVFWAKTWKESRELLNLGEFVALKGSLDPEKDRNPQRPSLKVSKVDDLAALSRSAARKAEAGEQPRIPAQGMQTAIKENSPDTGQPAPVLNEIHIRLENGAADRDETIQPLRNYLTGNPGPLSGLYTHW

SEQ ID NO: 50161 - DNA, 990 bp, Unknown
  Obtained from environmental sample
  misc_feature (1)..(990): n is a, c, g, or t
atggaagtggcaaaaataatagcgggttacagcatgggaaaagcggatattctccgcagggcaatgggaaaaaagaaaaaagaagatattgataaagaaaaaatcccgttcatgcaaggcgccgcaaaacagggatactccgcgcaaaaggccggggaaatttacgacatacttgttccttttgcgggctacggatttaacaaaagccatgccgccgcttattcggtactggcgtaccagaccgcttatctaaaagcgaatttccccgcggaatatatggcggccgcgttgatagtcgaaataaaaagcgccgacaggcttttatacaccattgtcgaaacccgtaaaatgggaataagcgtcgatcctcccaatattaattattccgataaactttttacggtagtggacggcagaattgtatacggctttctgggcataaaaggcgtaggcgatattcccgcggaagaaatcgtgcggggcaggcaaaacggccattataaaaattttatggactttctggacagggtagatataaaagccgtaagtaaaaaagttatagaattgcttattcatacgggcgcgtttgatgattttaaggtatcacgcgaaacgcttgcgggtaatatggagaaagcgatagactacgcgcaaaaaatgaaagaagacaggctgcttggacagtcaaacctgtttggagattcagatgaatccggcatgcccgattttaagtttacggaatttccgcctgtaagcagatccgaaagattgaatattgaaaaaaaattaataggcttttatttttccggccacccgctggatgaataccggcagttatgggaaaaagccgtgaaagccgatcttgcccgccctgaaaccatacagccggggaaccatattctgattggattaataaaaatgttaaaacaatatttccaagagcggaaaaatggcttatgctgcattggaagactacaacggagaaattga

SEQ ID NO: 50162 - protein, 329 aa, Unknown
  Obtained from environmental sample
  misc_feature (1)..(329): Xaa is any amino acid
MEVAKIIAGYSMGKADILRRAMGKKKKEDIDKEKIPFMQGAAKQGYSAQKAGEIYDILVPFAGYGFNKSHAAAYSVLAYQTAYLKANFPAEYMAAALIVEIKSADRLLYTIVETRKMGISVDPPNINYSDKLFTVVDGRIVYGFLGIKGVGDIPAEEIVRGRQNGHYKNFMDFLDRVDIKAVSKKVIELLIHTGAFDDFKVSRETLAGNMEKAIDYAQKMKEDRLLGQSNLFGDSDESGMPDFKFTEFPPVSRSERLNIEKKLIGFYFSGHPLDEYRQLWEKAVKADLARPETIQPGNHILIGLIKMLKQYFQERKNGLCCIGRLQRRN

SEQ ID NO: 50163 - DNA, 1188 bp, Unknown
  Obtained from environmental sample
  misc_feature (1)..(1188): n is a, c, g, or t
gtgaaggtgtctgcgggcgatcgtcaggaagacagtgctcatgctgccctgctgacgcttcaggcagaactccggacgctggagaagcatgccggagcaaatgagaaaatcagccagcagcgccgggatttgtggaaggcggagagtcagttcgcggtactggaggaggcggcgcaacgtcgccagctgtctgcacaggagaaatccctgctggcgcataaagatgagacgctggagtacaaacgccagctggctgcacttggcgacaaggttacgtatcaggagcgcctgaacgcgctggcgcagcaggcggataaattcgcacagcagcaacgggcaaaacgggccgccattgatgcgaaaagccgggggctgactgaccggcaggcagaacgggaagccacggaacagcgcctgaaggaacagtatggcgataatccgctggcgctgaataacgtcatgtcagagcagaaaaagacctgggcggctgaagaccagcttcgcgggaactggatggcaggcctgaagtccggctggagtgagtgggaagagagcgccacggacagtatgtcgcaggtaaaaagtgcagccacgcagacctttgatggtattgcacagaatatggcggcgatgctgaccggcagtgagcagaactggcgcagcttcacccgttccgtgctgtccatgatgacagaaattctgcttaagcaggcaatggtggggattgtcgggagtatcggcagcgccattggcggggctgttggtggcggcgcatccgcgtcaggcggtacagccattcaggccgctgcggcgaaattccattttgcaaccggaggatttacgggaaccggcggcaagtatgagccagcggggattgttcaccgtggtgagtatgtcttcacgaaggaggcaaccagccggattggcgtggggaatctttaccggctgatgcgcggctatgccaccggcggttatgtcggtacaccgggcagcatggcagacagccggtcgcaggcgtccgggacgtttgagcagaataaccatgtggtgattaacaacgacggcacgaacgggcagataggtccggctgctctgaaggcggtgtatgacatggcccgcaagggtgcccgtgatgaaattcagacacagatgcgtgatggtggcctgttctccggaggtggacgatga

SEQ ID NO: 50164 - protein, 395 aa, Unknown
  Obtained from environmental sample
  misc_feature (1)..(395): Xaa is any amino acid
MKVSAGDRQEDSAHAALLTLQAELRTLEKHAGANEKISQQRRDLWKAESQFAVLEEAAQRRQLSAQEKSLLAHKDETLEYKRQLAALGDKVTYQERLNALAQQADKFAQQQRAKRAAIDAKSRGLTDRQAEREATEQRLKEQYGDNPLALNNVMSEQKKTWAAEDQLRGNWMAGLKSGWSEWEESATDSMSQVKSAATQTFDGIAQNMAAMLTGSEQNWRSFTRSVLSMMTEILLKQAMVGIVGSIGSAIGGAVGGGASASGGTAIQAAAAKFHFATGGFTGTGGKYEPAGIVHRGEYVFTKEATSRIGVGNLYRLMRGYATGGYVGTPGSMADSRSQASGTFEQNNHVVINNDGTNGQIGPAALKAVYDMARKGARDEIQTQMRDGGLFSGGGR

SEQ ID NO: 50165 - DNA, 384 bp, Unknown
  Obtained from environmental sample
  misc_feature (1)..(384): n is a, c, g, or t
ttgaatttaggggggcaaaaaatggaaaagcaaacaggggctatggatttttctgatttggaaaaagtcatcgtatcggtcaaagggcagaatgttatcattgacagcgacgtggcgcggctttatgtcacggaaacaagggaaataaacaaggcgatcaagaataatcccggaaaattcccaacaggttatattattgaagccgacaagggcgaactggtggaaaatttccaccggttcaaaaacctgaaacattctaccgtacaaccaaaggcttttaccgaaaaaggcttatatatgcttgcaactatcttgaaaagcccacaagcaacagcggcgactatcgccataatggtaaaaactaacttatggcaatcaaactaa

SEQ ID NO: 50166 - protein, 127 aa, Unknown
  Obtained from environmental sample
  misc_feature (1)..(127): Xaa is any amino acid
MNLGGQKMEKQTGAMDFSDLEKVIVSVKGQNVIIDSDVARLYVTETREINKAIKNNPGKFPTGYIIEADKGELVENFHRFKNLKHSTVQPKAFTEKGLYMLATILKSPQATAATIAIMVKTNLWQSN

SEQ ID NO: 50167 - DNA, 471 bp, Unknown
  Obtained from environmental sample
  misc_feature (1)..(471): n is a, c, g, or t
atgaaatctgcggagatagcagatgcaatgatagaagcactcaaaagcggcaaatatagcaccctgcgttgcaattttgcaaacggcgatatggttgggcacacgggttctttccgcgctgcaactatggctgttgaagcggtggatttggctattgctcgcattttgcccgttcttgacgctatgggcggagttgctttaatcaccgcagatcacggcaatgcagatgagatgtatgagatagataaaaagactaaagagcctgcgagaaataaagatggttcttttaaggcgaaaacggctcataccctaaaccctgttccatttattctttacgataatgcaactggtggaaaactaaagctaaaaaacattccaaatgctggtctttcaaatattgcggctacaactgctaaccttctcggttttgaaaagcacgagagttgggatgagtcgttgttgcaggtttaa

SEQ ID NO: 50168 - protein, 156 aa, Unknown
  Obtained from environmental sample
  DOMAIN (1)...(134): Metalloenzyme superfamily
  misc_feature (1)..(156): Xaa is any amino acid
MKSAEIADAMIEALKSGKYSTLRCNFANGDMVGHTGSFRAATMAVEAVDLAIARILPVLDAMGGVALITADHGNADEMYEIDKKTKEPARNKDGSFKAKTAHTLNPVPFILYDNATGGKLKLKNIPNAGLSNIAATTANLLGFEKHESWDESLLQV

SEQ ID NO: 50169 - DNA, 1119 bp, Unknown
  Obtained from environmental sample
  misc_feature (1)..(1119): n is a, c, g, or t
atgaaagtgccgttttacgacgctgcaagagaatataatatttataaaaatgaatttgacaaggccattgccgatgtcatcgcttcaggcgcttttattcttggaaaacaggtacaggagtttgaacaggcggtttgcaagtataccggcgcaaaatatgccgttggcgttgccaatggcagcgacgcgttggtaatcgcttccgatatattaggctataaaaacggcgccgaggttcttaccccggttttcactttttttgcctcaacatcctgtatagcccgcctgaacgggaagccggtattttgcgatgttgaagaagatactttctgtatgaacatgaaggatgctgaaaaacgtataaccggaaaaacaaaaggtatactgccggttcatctttttctgcagactgcggacatgaacgcttgcatggaacttgcgaaaaaacatcacctgacagtactggaagacgcggcggaagcttttggcatgaggacaatgtacaatggtgaatacaaacacgccgggctaataggcgattttggcgttttttcgtttttccctaccaaaacaatcggcggatacggcgacggagggatgattgttacaaacaatgaggaattgtaccaaaaagcgaaaagttacagaacgcatggctcttcaaaaaaatatcatcatgattatgttggttacaattcacggcttgacactttacaggctgggatattaaatgtcaaactgtcccgcgttgacaacgcaattcaaaaacgggcggctcacgccgcgcattaccgtgaaatgcttaaaaacattaccggtattaaactgcctgtcattaaagatggcaataaagaagtgaactatgtgttttgcataaaagcggaaaagcgcgacgcccttgaaaaacatctgcaatcaaaagaaatcggcacatcagtttattacccgattccgcttcatctgcaaaaatgttttgattatttagggtataaaaaaggcgattttcccgtcgcggaaaaattatgcgaaactgtgcttgccctccccatgtttcctgaattgacagaagatgaagtcaattttgtatgcgaaagcgtaaaagagttttgtaataaatga

SEQ ID NO: 50170 - protein, 372 aa, Unknown
  Obtained from environmental sample
  DOMAIN (13)...(367): DegT/DnrJ/EryC1/StrS aminotransferase family
  misc_feature (1)..(372): Xaa is any amino acid
MKVPFYDAAREYNIYKNEFDKAIADVIASGAFILGKQVQEFEQAVCKYTGAKYAVGVANGSDALVIASDILGYKNGAEVLTPVFTFFASTSCIARLNGKPVFCDVEEDTFCMNMKDAEKRITGKTKGILPVHLFLQTADMNACMELAKKHHLTVLEDAAEAFGMRTMYNGEYKHAGLIGDFGVFSFFPTKTIGGYGDGGMIVTNNEELYQKAKSYRTHGSSKKYHHDYVGYNSRLDTLQAGILNVKLSRVDNAIQKRAAHAAHYREMLKNITGIKLPVIKDGNKEVNYVFCIKAEKRDALEKHLQSKEIGTSVYYPIPLHLQKCFDYLGYKKGDFPVAEKLCETVLALPMFPELTEDEVNFVCESVKEFCNK

SEQ ID NO: 50171 - DNA, 771 bp, Unknown
  Obtained from environmental sample
  misc_feature (1)..(771): n is a, c, g, or t
atggccctgtctacaaaagacgcggataagatgatagccgccgcaaaaaagaataaacggaagcttgccgtatgttttcaaaaccggttcaacgcgcctgtacaaagactgcgaacagctcttgaagagggacgttttggcagaatattacacggcatggttcagatacgctggaaccggaatgaagcctactatgccgaagcgccctggcgtggtacatgggcacaggacggcgggacgctgatgaaccaatgtacccacggcattgatctcctgcagtggatgatgggtgaaaacgcggcacgggtgcaggcccagacaaggcgttttatgcgccctatcgaagcggaagattttggcgccgctatagtagagttcaaaagcggcgcagtgggaattattgagggtactgcggatgtttttcccgtgaatataaacgaaacactatccatattcggcgagaaaggttctgttgtaataggcgggcttgctgttaataaattggaaacatggcgttttgccgatgcccaactggtcggtgatactgaggaaagagtattaaaccccaacgagaaagatccgcccacagtatatggctttggtcataccgcgttatttgaaaattttattgattcaatcgaaacagacagcgaaccgttagtgtcaggggaaagcggcaagaaagcgctggagataatccttgcaatatataaatcccaaaaaacaggcaaacctgtcgatttaccgtgtgattttctacgcttgatatga

SEQ ID NO: 50172 - protein, 256 aa, Unknown
  Obtained from environmental sample
  DOMAIN (38)...(152): Oxidoreductase family, C-terminal alpha/beta domain
  misc_feature (1)..(256): Xaa is any amino acid
MALSTKDADKMIAAAKKNKRKLAVCFQNRFNAPVQRLRTALEEGRFGRILHGMVQIRWNRNEAYYAEAPWRGTWAQDGGTLMNQCTHGIDLLQWMMGENAARVQAQTRRFMRPIEAEDFGAAIVEFKSGAVGIIEGTADVFPVNINETLSIFGEKGSVVIGGLAVNKLETWRFADAQLVGDTEERVLNPNEKDPPTVYGFGHTALFENFIDSIETDSEPLVSGESGKKALEIILAIYKSQKTGKPVDLPCDFLRLI

SEQ ID NO: 50173 - DNA, 318 bp, Unknown
  Obtained from environmental sample
  misc_feature (1)..(318): n is a, c, g, or t
atgggcgtatcgacggagcagggcgtctggagcgaacggtgtcagggctgcggagaatgtattctgcatctgaccggcggcgtctgtcctgtcgcgcgctgcgcaaagagcatttttaacggcccctgcggtggttcggctaaaggcgtttgcgaagtcaacaaggacaccgactgcgcatggcagttgattattgaccggctgaaaggccagggcaaacttgaaaattacgaaaagattattgacatgaaagactggtcgacagccagagacggcggaccgcgcaccagaatcagagaagatttgcggcacgtataa

SEQ ID NO: 50174 - protein, 105 aa, Unknown
  Obtained from environmental sample
  misc_feature (1)..(105): Xaa is any amino acid
MGVSTEQGVWSERCQGCGECILHLTGGVCPVARCAKSIFNGPCGGSAKGVCEVNKDTDCAWQLIIDRLKGQGKLENYEKIIDMKDWSTARDGGPRTRIREDLRHV

SEQ ID NO: 50175 - DNA, 960 bp, Unknown
  Obtained from environmental sample
  misc_feature (1)..(960): n is a, c, g, or t
atggtgtcgccgtcggggatcagcgtggagatcggcaacgttgacaagagctatatcttggatagggagaggatggacgccgacctcgtaaagatggccgtcgaggcgggggcggagcttcgggtgtcttctccggcggtgcgggccgaagagacgccgtcggggcggtacaaggtggtatgcggggacggcaaggcggggaaacggctagagtttgaggcctcttgtttaatcttggcggacggcgtggagagccgattggcgcggtgtttcgggtgggggacggcgctgcgtcttgaggacatagagacggcggcctttgccagggttgaggcggcggggatagagggcgactgctgtacgttctataccggcagcgccgttgcgcccggcggatatctttgggtattcccgcgcggcgacggggcggccaacgtggggctcggcgttatcgggtcgcggtgccggtcggggctgcccaaggagctattgcttgattttatatcgcgccggtatccggggggacgcgttaccgacctgcactgcggcggggttccggtggctaagtgggtaaggccgcttgtccgcggcggcgtgatgcttgtgggggacgcggcgcggcaggtcaacgcgataaacggcgcggggattgcctattcgctctacgcggggaggcttgcgggcgcggtcgcggcgggagcgttccgcggagacgggagcttaaaccgtaaggcgcttctcgagtaccagcgcgggtgggctaagagtttcggcaagcagcaggagcgttctttcgcgcttaaagagttcataatgtcggcggacgacgccttcttggacaagatcgccgactcgctctccaaggagccgccgggcgccatgagctatttgcgggtattcatgaggacgttttcgtctagaccgctgcttctgttcaaggcatttagattatttcggtga

SEQ ID NO: 50176 - protein, 319 aa, Unknown
  Obtained from environmental sample
  misc_feature (1)..(319): Xaa is any amino acid
MVSPSGISVEIGNVDKSYILDRERMDADLVKMAVEAGAELRVSSPAVRAEETPSGRYKVVCGDGKAGKRLEFEASCLILADGVESRLARCFGWGTALRLEDIETAAFARVEAAGIEGDCCTFYTGSAVAPGGYLWVFPRGDGAANVGLGVIGSRCRSGLPKELLLDFISRRYPGGRVTDLHCGGVPVAKWVRPLVRGGVMLVGDAARQVNAINGAGIAYSLYAGRLAGAVAAGAFRGDGSLNRKALLEYQRGWAKSFGKQQERSFALKEFIMSADDAFLDKIADSLSKEPPGAMSYLRVFMRTFSSRPLLLFKAFRLFR

SEQ ID NO: 50177 - DNA, 810 bp, Unknown
  Obtained from environmental sample
  misc_feature (1)..(810): n is a, c, g, or t
gtgactccggaagcaccgttcctgaaaaaacaaaaggaggatattatgtttggtgatgaaataacagcggtgtctaatgctgccaaagaaaaaaataatttattgaataataacccgggagggtatattcttgctgccattcttgccggtatttttatcgggttgggcgtacttcttgcgtttacgacaggcggtttgttaaccggtaatccctttgccagacttttgatgggctgtacttttggcattgctcttagtttggttgtaatagcgggaggagaactgtttaccggcaacaattttataataatggtcggccttgttaaaaaaaccatttcaacaggcgcatgtcttaaaatttgggtggttagttatctcggcaatctgattggctcggttattcttgcggtaatttttgtgtggtgcggtcttgcggcaggaagtaccggggaatttatatcaagcgcggcggcgacaaaaatgtcacttgcgcctcttgcgctgatttcccgcggcttattgtgtaatatgctggtatgcctcgcggtctggtgctccttccgctgtaaatcggaagcggcaaagctcataatgattttctggtgtctgctggcattaatgactaccggctatgaacactgtgttgtcaacatgacggttttatcagtcagtctgctttcaccggcagccggagccgccgtctcattgggcggctggatatacaatatcgctttatcaacacttggcaacatgataggcggaatcgtctttgtggcgcttccgtattcggtgattagcaggcagagataa

SEQ ID NO: 50178 - protein, 269 aa, Unknown
  Obtained from environmental sample
  DOMAIN (16)...(269): Formate/nitrite transporter
  misc_feature (1)..(269): Xaa is any amino acid
MTPEAPFLKKQKEDIMFGDEITAVSNAAKEKNNLLNNNPGGYILAAILAGIFIGLGVLLAFTTGGLLTGNPFARLLMGCTFGIALSLVVIAGGELFTGNNFIIMVGLVKKTISTGACLKIWVVSYLGNLIGSVILAVIFVWCGLAAGSTGEFISSAAATKMSLAPLALISRGLLCNMLVCLAVWCSFRCKSEAAKLIMIFWCLLALMTTGYEHCVVNMTVLSVSLLSPAAGAAVSLGGWIYNIALSTLGNMIGGIVFVALPYSVISRQR

SEQ ID NO: 50179 - DNA, 510 bp, Unknown
  Obtained from environmental sample
  misc_feature (1)..(510): n is a, c, g, or t
gtgacaggcggcgttatggaggcggcggttcgcagcgcctacttctttgtcaacaacaaggagcttccgaatgtggagtttaagccggtgcgcgggcttgaaggcgtcaagtcggccgaagttgattttggcgtgcccattccgaacggcgccggaaccaaaatccgcatagcggtagcccatcagatgggaaacatcgccgcggtgctggagcaaatcaaagcggccaaacaagccgggaaggagactccgtatcactttgtggaggttatggcctgcaggggcggatgcgtggcgggcggcggccagccttacggcgccaccgacgaagtccgcggcaaacgcgcgaagggcatttatcttgacgatgaaaaatccaagtaccgctgttcgcatcaaaatccctgcatcacccaggtgtacaaggaattccttgaggagccgaacggccataaggcgcatcaactcctgcacaccaaatatacggaacgggagctttatataaagtaa

SEQ ID NO: 50180 - protein, 169 aa, Unknown
  Obtained from environmental sample
  DOMAIN (1)...(104): Iron only hydrogenase large subunit, C-terminal domain
  misc_feature (1)..(169): Xaa is any amino acid
MTGGVMEAAVRSAYFFVNNKELPNVEFKPVRGLEGVKSAEVDFGVPIPNGAGTKIRIAVAHQMGNIAAVLEQIKAAKQAGKETPYHFVEVMACRGGCVAGGGQPYGATDEVRGKRAKGIYLDDEKSKYRCSHQNPCITQVYKEFLEEPNGHKAHQLLHTKYTERELYIK

SEQ ID NO: 50181 - DNA, 807 bp, Unknown
  Obtained from environmental sample
  misc_feature (1)..(807): n is a, c, g, or t
gtgcagaacgtctgggcgcttgaattcctgggaagaggcattaagggaaagatcgccagcgccgccgacgttccgttaggtgagggcccgtgcatcaagtgcggccagtgttccgcccactgcccggtcggcgcgatctacgagcgcgatgacacggcgaaagtctggaaagccctgcacaatcccgaactccatacggtggtgcagatcgcaccggccatacgcgtcgccctcgcggaggaattcgggcttgagcccggcacggttttcaccaaaaagatctacgccgcgctcaggcggctcggtttcaaaaccgtgtttgacacaaacttttccgccgatcttacgatcatggaagaaggcagcgagctgaaaaaacgcctggttacaaaaggcagcaccatcccgctgatcacctcctgctgtcccgcctgggtcgattatatggaaaaatactacccggacatgatcgacaacttctccacagcgaaatccccgcagcagatgatgggcgcgatgataaaggcgtattgggcgaagaaagccggcgtcgctccggaaaaagtgtactcggtttcggtgatgccctgcacggcaaagaaatgggaaacccaccgcaatgatgacatgaagagcgccgggaaattcctcggccttgacacgggctacgatgtggatatttccatcacaacccgcgagcttgcccgtatgataaaacaagcgggtattgacatattgaagctttccgatgaggaagcggacagccccctggggccgtatacgggcgcgggaacattttcggcgtga

SEQ ID NO: 50182 - protein, 268 aa, Unknown
  Obtained from environmental sample
  DOMAIN (24)...(47): 4Fe-4S binding domain
  misc_feature (1)..(268): Xaa is any amino acid
MQNVWALEFLGRGIKGKIASAADVPLGEGPCIKCGQCSAHCPVGAIYERDDTAKVWKALHNPELHTVVQIAPAIRVALAEEFGLEPGTVFTKKIYAALRRLGFKTVFDTNFSADLTIMEEGSELKKRLVTKGSTIPLITSCCPAWVDYMEKYYPDMIDNFSTAKSPQQMMGAMIKAYWAKKAGVAPEKVYSVSVMPCTAKKWETHRNDDMKSAGKFLGLDTGYDVDISITTRELARMIKQAGIDILKLSDEEADSPLGPYTGAGTFSA

SEQ ID NO: 50183 - DNA, 990 bp, Unknown
  Obtained from environmental sample
  misc_feature (1)..(990): n is a, c, g, or t
atggcgaggcaagatcgggaaagccgttctgtgctgggacttacagagcgtatgctcattcaggagatacgcaaggatacggatcggcagatccgtgaaaaagaaatccagataagcgacgtgcttttaagacttcaggcagttgacgccgaatacaaagatttgcaagtctcggttgaaaacatgacggcggcgcaaaagcagagggctgcgtcccttttggttctatctgaggaataccagcgtatgcttctgggtcttaatgatgaaaaggccaggatacttgaagattccaggcagcgcgaagctgatttatgggcgcaggcaggagaaaaggccaaagcgcttaccttcggcacggagcaggactggtctgagcttgatgaggccttggaggagcttaaaaagcttggcactgagcaggagcggataaacagggctgaaagggagatgaacggtttttacgttaccctgaacagccagattgaaagcggcaggctggatgaagcgagagccaccattaattcaataagggaattccttgacgccccctccctacgaggcatcagcgtttttgaaacaagaaggcagacccaccttgcggctattgacgctatggaaaaagcgatagcctcatccaccggaggcgtggttattcagaacagcgctcaggaagaaaccatcgccgagctgacggctctggccgccgctcaggaacgtatgctcgccgccttcacagccgagggcgccggtcaaaacaagatcattgcggaatacacggctgctttaagccagcttgaaagcagcaatgccgatcagaaagatacccttgataaaaaggacagcgagattcaaacgctaaaaacggaaatagcccagcgggagcagaagatgtccgacttaaacagcagcatggcagttcttcaggcgcagtatgatgatcttcagcgcaggatggaagcggctataagggcgttcaacggcgaataa

SEQ ID NO: 50184 - protein, 329 aa, Unknown
  Obtained from environmental sample
  misc_feature (1)..(329): Xaa is any amino acid
MARQDRESRSVLGLTERMLIQEIRKDTDRQIREKEIQISDVLLRLQAVDAEYKDLQVSVENMTAAQKQRAASLLVLSEEYQRMLLGLNDEKARILEDSRQREADLWAQAGEKAKALTFGTEQDWSELDEALEELKKLGTEQERINRAEREMNGFYVTLNSQIESGRLDEARATINSIREFLDAPSLRGISVFETRRQTHLAAIDAMEKAIASSTGGVVIQNSAQEETIAELTALAAAQERMLAAFTAEGAGQNKIIAEYTAALSQLESSNADQKDTLDKKDSEIQTLKTEIAQREQKMSDLNSSMAVLQAQYDDLQRRMEAAIRAFNGE

SEQ ID NO: 50185 - DNA, 489 bp, Unknown
  Obtained from environmental sample
  misc_feature (1)..(489): n is a, c, g, or t
atgcgggagacgcggtttacatcaccggggaaaatttacaccgccagagacgcggctcataagaagatagcggagctaatagaagcggaaaaaagcccgcatggaaagaaacttcccttcgatttcagcgggcaggcggtgttttacgctgggccaagtcccgcaaagccgcccagaccaatcggctgcattgggccgacaacctcaggaagaatggacaagtactcgcctctttttatttcaaagggcttaaagattatgatcggaaaaggaaaccgaagcgaagcggttattgacgctatcgtaaaacaccgcggcctttatttagcggccattggcggcgttgcggctttgatggcgaaaaccgtaaaatccgccaaagttatcgcttttgaggaacttggaaccgaggccgtgatggaacttgaagtagagaatttccccgccattgttgcgattgactgcaggggaagaaacatatactgctga

SEQ ID NO: 50186 - protein, 162 aa, Unknown
  Obtained from environmental sample
  DOMAIN (1)...(161): Fumarase C-terminus
  misc_feature (1)..(162): Xaa is any amino acid
MRETRFTSPGKIYTARDAAHKKIAELIEAEKSPHGKKLPFDFSGQAVFYAGPSPAKPPRPIGCIGPTTSGRMDKYSPLFISKGLKIMIGKGNRSEAVIDAIVKHRGLYLAAIGGVAALMAKTVKSAKVIAFEELGTEAVMELEVENFPAIVAIDCRGRNIYC

SEQ ID NO: 50187 - DNA, 468 bp, Unknown
  Obtained from environmental sample
  misc_feature (1)..(468): n is a, c, g, or t
gtgaagtacaatcacaaaattccctccgcgtgcctgntggcgtggcagccgatatttaccgctacgggaagtccggctatatgggtggggaaggtttcaatgttcacgctcagggctgttgtttttccaccgaaacctgcggggcctatgccaagcgagtttattttttcaagcaattctttttccacgccgcgccaaaatgtgtcggcgctgacggagccgacgggccgcaaaagcgctttcttgcttaatagcgcgcatttctccattgtccctccgactcctacgccgacgataaccggagggcagggattgccgccggcctttaatagcgtgtcgacaataaacttttttattccctcaatgccgtcagatggagttaacattgtcagggcgctcatgttttcacttccgaaaccttttggcgcgacagtgatttttaatttatcgcctgatgtgattgaataa

SEQ ID NO: 50188 - protein, 155 aa, Unknown
  Obtained from environmental sample
  SIGNAL (1)...(20)
  misc_feature (1)..(155): Xaa is any amino acid
MKYNHKIPSACLXAWQPIFTATGSPAIWVGKVSMFTLRAVVFPPKPAGPMPSEFIFSSNSFSTPRQNVSALTEPTGRKSAFLLNSAHFSIVPPTPTPTITGGQGLPPAFNSVSTINFFIPSMPSDGVNIVRALMFSLPKPFGATVIFNLSPDVIE

SEQ ID NO: 50189 - DNA, 852 bp, Unknown
  Obtained from environmental sample
  misc_feature (1)..(852): n is a, c, g, or t
gtgacaaaagcgatgaaagaaattaaaagcagtcaggtaatcgatctggtcgaaaaattatgcatcgacgcaaactgttatcttaacaaggacatagaagaagaactgtcaaaacgttttgacagcgaagaatcgcccctggggaaaaacgtaattgagacaatcatcgagaacgcgaaaatcgcaagggaagagcaagttccaatctgtcaggatacgggcatggctgttgtttttgtagagcttggaaccgacgtgcatttttcaggtgatctggaagaagcgataaacgaaggcgtccgccgtggatacaaaaaaggctatttaagaaattccgtggtaagggatccgattgacagactcaatacgaatgataacaccccggcggtaattcattattcaatcacatcaggcgataaattaaaaatcactgtcgcgccaaaaggtttcggaagtgaaaacatgagcgccctgacaatgttaactccatctgacggcattgagggaataaaaaagtttattgtcgacacgctattaaaggccggcggcaatccctgccctccggttatcgtcggcgtaggagtcggagggacaatggagaaatgcgcgctattaagcaagaaagcgcttttgcggcccgtcggctccgtcagcgccgacacattttggcgcggcgtggaaaaagaattgcttgaaaaaataaactcgcttggcataggccccgcaggtttcggtggaaaaacaacagccctgagcgtgaacattgaaaccttccccacccatatagccggacttcccgtagcggtaaatatcggctgccacgccancaggcacgcggagggaattttgtga

SEQ ID NO: 50190 - protein, 283 aa, Unknown
  Obtained from environmental sample
  DOMAIN (13)...(283): Fumarate hydratase (Fumerase)
  misc_feature (1)..(283): Xaa is any amino acid
MTKAMKEIKSSQVIDLVEKLCIDANCYLNKDIEEELSKRFDSEESPLGKNVIETIIENAKIAREEQVPICQDTGMAVVFVELGTDVHFSGDLEEAINEGVRRGYKKGYLRNSVVRDPIDRLNTNDNTPAVIHYSITSGDKLKITVAPKGFGSENMSALTMLTPSDGIEGIKKFIVDTLLKAGGNPCPPVIVGVGVGGTMEKCALLSKKALLRPVGSVSADTFWRGVEKELLEKINSLGIGPAGFGGKTTALSVNIETFPTHIAGLPVAVNIGCHAXRHAEGIL

SEQ ID NO: 50191 - DNA, 561 bp, Unknown
  Obtained from environmental sample
  misc_feature (1)..(561): n is a, c, g, or t
atgcgtgtattttctcttgaacacagatggggcagcacttccacggtttcaacaggagcctctgttgatattaccgaagggcttataaccgtggattttgcagttagagaagttccaagttgtttttgccaaaacaaggagcaagacggcgaggctgtttgggaagattcttgcgtagaagtatttttgaaattgccttggggcaaagaatatctaaattttgaatttaactcaaaaggcgtatgctacgcagcaagaggtgaaagaagagaaaacagaaaagagttttcaaaaagcgaatatgcaaaaataataagaaaaccaagcggcgttttagaagacggcaagttttacagatggatgctttctgtggaaattccaagcaccttgctcgggaacatcaaagatttgcggattgttgaagtagaaggtaatttatacaaatgcgcagaccttgcacaagagcctcactggctcactgcctttccaataaacacaccaaaaccggacttccacaggccagaggcttttttaccatttattccttttgtggataaataa

SEQ ID NO: 50192 - protein, 186 aa, Unknown
  Obtained from environmental sample
  misc_feature (1)..(186): Xaa is any amino acid
MRVFSLEHRWGSTSTVSTGASVDITEGLITVDFAVREVPSCFCQNKEQDGEAVWEDSCVEVFLKLPWGKEYLNFEFNSKGVCYAARGERRENRKEFSKSEYAKIIRKPSGVLEDGKFYRWMLSVEIPSTLLGNIKDLRIVEVEGNLYKCADLAQEPHWLTAFPINTPKPDFHRPEAFLPFIPFVDK

SEQ ID NO: 50193 - DNA, 306 bp, Unknown
  Obtained from environmental sample
  misc_feature (1)..(306): n is a, c, g, or t
ttgctagacgatatttacattgaaacttcgcagtgtttgcagcaaacggaaaatctctcaaatattctctctagcatgatggatgccagggctagcattgttagcaataatttgaataccatgatgaaaacgctcacagtgctgaccattggaataatggtgccaacatttgtggttagctcattttccatgaatttgaaatacccgctttatatggaatctgactgggcgttttgggttgttatgtctttagtgatacttgtgacacttgggtttttatttatccacaaaaggaataaatggtaa

SEQ ID NO: 50194 - protein, 101 aa, Unknown
  Obtained from environmental sample
  misc_feature (1)..(101): Xaa is any amino acid
MLDDIYIETSQCLQQTENLSNILSSMMDARASIVSNNLNTMMKTLTVLTIGIMVPTFVVSSFSMNLKYPLYMESDWAFWVVMSLVILVTLGFLFIHKRNKW

SEQ ID NO: 50195 - DNA, 345 bp, Unknown
  Obtained from environmental sample
  misc_feature (1)..(345): n is a, c, g, or t
atgtgcgacaaatccgtattagacgagataacgtcaagggtctgcgccgccgccaaagaggtcttgggcgagaagttggagaaggtgatcctcttcggttcatacgcaaggggcgactacgacgaggagtcggacattgatatcatggtgatagccgacatagcgttggaggaggcgaacgagacgcgggataagattaatgccaaaacaagagaccttgatatgaaatatgatgttcttgtttatttgagtatggattgcagttatatattccacagatataaagatgcttcgggtttctatataaacgtccagaaagacggggtgatattgtatgccgcctga

SEQ ID NO: 50196 - protein, 114 aa, Unknown
  Obtained from environmental sample
  DOMAIN (11)...(101): Nucleotidyltransferase domain
  misc_feature (1)..(114): Xaa is any amino acid
MCDKSVLDEITSRVCAAAKEVLGEKLEKVILFGSYARGDYDEESDIDIMVIADIALEEANETRDKINAKTRDLDMKYDVLVYLSMDCSYIFHRYKDASGFYINVQKDGVILYAA

SEQ ID NO: 50197 - DNA, 330 bp, Unknown
  Obtained from environmental sample
  misc_feature (1)..(330): n is a, c, g, or t
gtgtacccgtcagtttcgtctaaaaacgccgctaaccgctcttattattgtatatttaacgccatgcgcgcggttttggcgcttgaccgattcgactccaaaaaacattccggcgtaatctccgcctttcgtaagaactacgtaagaaccggaatctttccgacgagtttttcggatattattaaaaaatcatttgaaatccgaggcgacagcgattacaaggaattctatcttgtatccaaagccgacatcgccactcaaattgaaaacgccgaaacctttttagaggcggtggagaagtacgttggcgagagaatcaagcacccatga

SEQ ID NO: 50198 - protein, 109 aa, Unknown
  Obtained from environmental sample
  DOMAIN (4)...(106): Protein of unknown function DUF103
  misc_feature (1)..(109): Xaa is any amino acid
MYPSVSSKNAANRSYYCIFNAMRAVLALDRFDSKKHSGVISAFRKNYVRTGIFPTSFSDIIKKSFEIRGDSDYKEFYLVSKADIATQIENAETFLEAVEKYVGERIKHP

SEQ ID NO: 50199 - DNA, 663 bp, Unknown
  Obtained from environmental sample
  misc_feature (1)..(663): n is a, c, g, or t
gtgcttcgtcgccccctcgcacgacccgttgcgcgacgacgtcgaagcgccgtcgcttgccgccgagagtctgctctcaaacggcccgtccgtcaaaaaaggccacttcgccgttcccaaggtcatcgggggcgcgtgaggcggctcaacgccgtctctgttctcaccctcattttaagcatagggaccctcgtaataaccgcagccggtacggggagcataaggtcgggcggcaagccgcaaccgaggttgtcgccgttgttgtcttcgcctatcgttataggtgcggacggacaagagacggcgcctctaagcgacattgtcggcgccggggaggtaggggtgatgttgtttggggagaggccggattcatcggtatcaaaatcctcatcgtcgaatacgcctaagttgtcgtcaaaaaaatctaagccgtcgtctgcatcgacaaggtcagaaccgtctgtattgacggaatgtgtcaatataaataccgcctccgagaccgccttgaccgcgctaaaaggcgtaggcccgtcccttgccgctaaaatagcggaatatagaaccaacgccggtcggtttaataagaaagaggatctgatgaaggtcaaaggtatagggcaggccaagttcgcggctatcgaaccgtttatttgtttgtga

SEQ ID NO: 50200 - protein, 220 aa, Unknown
  Obtained from environmental sample
  DOMAIN (158)...(187): Helix-hairpin-helix motif
  misc_feature (1)..(220): Xaa is any amino acid
MLRRPLARPVARRRRSAVACRRESALKRPVRQKRPLRRSQGHRGRVRRLNAVSVLTLILSIGTLVITAAGTGSIRSGGKPQPRLSPLLSSPIVIGADGQETAPLSDIVGAGEVGVMLFGERPDSSVSKSSSSNTPKLSSKKSKPSSASTRSEPSVLTECVNINTASETALTALKGVGPSLAAKIAEYRTNAGRFNKKEDLMKVKGIGQAKFAAIEPFICL

SEQ ID NO: 50201 - DNA, 408 bp, Unknown
  Obtained from environmental sample
  misc_feature (1)..(408): n is a, c, g, or t
atggccgcttctcctgaattttctgcgggaacgataaattcggtaattccttctgaaagacctgcggcaatagccgcaagtacaccgcgtaccggtcttatttttccggaaagttcaagttcgcccatcacaagcagattccctgaaacaggcgcagttcccgccgccgccataaccgataaagcaatgggcagatcaagcgcggctccgtctttttttaaccccgcaggcgcgagatttattaaaatcctgtccagtggaaaactaaacccggaatttctgaacgccgctcgaaccctgtcccgcgcttccctaaccgctccttcagcaagccctgaaatatcaacgccgggaatgccccgtctaatatccgcttcaaccctgatgatgattccgcctgctccatag

SEQ ID NO: 50202 - protein, 135 aa, Unknown
  Obtained from environmental sample
  misc_feature (1)..(135): Xaa is any amino acid
MAASPEFSAGTINSVIPSERPAAIAASTPRTGLIFPESSSSPITSRFPETGAVPAAAITDKAMGRSSAAPSFFNPAGARFIKILSSGKLNPEFLNAARTLSRASLTAPSASPEISTPGMPRLISASTLMMIPPAP

SEQ ID NO: 50203 - DNA, 1227 bp, Unknown
  Obtained from environmental sample
  misc_feature (1)..(1227): n is a, c, g, or t
atgcacaacgattttactttgttttccagggtggttccttcggggaaaaaggtggtttattactacgcttatgacggcgagggtaaacgcttggggccgtggactaccggacagactaccaggacggcggccaggaattactgtaacttgctgaaccggaaggggaaattgttaccggaattgaaagggataccgacttttgccgaatttgcagctttgttttgggattgggataaaagcgaatacctgaaagaacgccggaaacgccggaagctgacgcaatcctatacggacaaaaataaaaaagtggtcgaaaatattctagttccgtattttgggaaaatgaagctggacgctataaccggaaaggaaattgacgcatggctggattacctgatttccaaaaagtacaagaactcgaccgctaacggcttttacggctctttgcaaactatgttgaaatgggcggttaaaaaacacattatcgagcgtgatccgtttaatgacgtggaaaaactgctgcaagagcaaaaaaagaaaaagattattacccctaaagaattttgggctttgttttctgacgattggaaaaaggtgtgggataataatttcctgatgtgtacggctcataagttggcggggctgaccggaattcggtgttgtgagattttggggctaaagggggaatatgtgtttgatgaccatatctatatttgcgcacaatacgatgagatatacggctatcgggaaacgaaaactaaaacagaacacaatatccctttgacagaggaagttatagcggatttgaaaaaactgatgaatgtaaacggacagggttttgtgttttcggagactggcggcgataagcctgtaaaacgcaactatctttataacggcttgcggaaagcgttgcaaaatatcggcataagcgaaaaggaaattgacgagagggggcttaatgttcatgcgtggcggcatttctgcaatacggtactgcaagacgggggattgaacgttaagcaggtacaggctgttatagggcataagacggaaaaaatgaccgaacattatacccattttgaccctatggaatttggagatgtcccgaaaatacaggcggcattgctgacgggtaacccgaaggaaaggaatacagaacgccctgccttgtctttggttaaaacgccgaatgatgaaaaaacagaaaagcgtaaaaaggcttcctag

SEQ ID NO: 50204 - protein, 408 aa, Unknown
  Obtained from environmental sample
  DOMAIN (195)...(367): Phage integrase family
  misc_feature (1)..(408): Xaa is any amino acid
MHNDFTLFSRVVPSGKKVVYYYAYDGEGKRLGPWTTGQTTRTAARNYCNLLNRKGKLLPELKGIPTFAEFAALFWDWDKSEYLKERRKRRKLTQSYTDKNKKVVENILVPYFGKMKLDAITGKEIDAWLDYLISKKYKNSTANGFYGSLQTMLKWAVKKHIIERDPFNDVEKLLQEQKKKKIITPKEFWALFSDDWKKVWDNNFLMCTAHKLAGLTGIRCCEILGLKGEYVFDDHIYICAQYDEIYGYRETKTKTEHNIPLTEEVIADLKKLMNVNGQGFVFSETGGDKPVKRNYLYNGLRKALQNIGISEKEIDERGLNVHAWRHFCNTVLQDGGLNVKQVQAVIGHKTEKMTEHYTHFDPMEFGDVPKIQAALLTGNPKERNTERPALSLVKTPNDEKTEKRKKAS

SEQ ID NO: 50205 - DNA, 912 bp, Unknown
  Obtained from environmental sample
  misc_feature (1)..(912): n is a, c, g, or t
gtgcttgctatggcttttatctttggttgttcttccaacgatgaacagatttcgcctactggcgaaacaacgaactctacagcaactaagtattgcgtttatgaagaaatgcgaacttgccattccacatcccaattaagttgcccagcaggcggcgaatggagcgatttttgcccttatggtactccccctgttgtgccttcgtcttcaagttattcctttgttacacaaagttcgtctagcattattccgaataattccagcggttcaacgcaagccaatgttgtttacggagctgatgaaatttatcagagtgagacttacaagacgattaagataggcacacaaacttggttccagcgtaatttgaattatgccgttgatggcagcaagtgcggtgttggcggcactaacggtaatgtaggttctttaagcgatgtgaatattacgacttgcgatacttacggcaggctttacgactgggctacggcaatggcacttccttccaaatgcaatagcactctttccacaagtgatgtggattgtactataggaactccacatcaaggtatatgccccagcggttggcatataccaaatgatgcggattgggatgcattgatgacggcagtaggtggttcctcaacagctggaaccaaattgaaagccaattctgatttgtggagcagcaacggcaaaggcacggacaattacgggttttccgctctgccgggcggctattccggtggcagtttcagcggtgttggctactacggcttctggtggagtgcctcggagggcggtgctagccgcgcctacctccggagcatgggctacgacgacgagtacgtcgactggaacagctactataagggcagcaacttgttcagtgttcgttgcctccaaggctga

SEQ ID NO: 50206 - protein, 303 aa, Unknown
  Obtained from environmental sample
  misc_feature (1)..(303): Xaa is any amino acid
MLAMAFIFGCSSNDEQISPTGETTNSTATKYCVYEEMRTCHSTSQLSCPAGGEWSDFCPYGTPPVVPSSSSYSFVTQSSSSIIPNNSSGSTQANVVYGADEIYQSETYKTIKIGTQTWFQRNLNYAVDGSKCGVGGTNGNVGSLSDVNITTCDTYGRLYDWATAMALPSKCNSTLSTSDVDCTIGTPHQGICPSGWHIPNDADWDALMTAVGGSSTAGTKLKANSDLWSSNGKGTDNYGFSALPGGYSGGSFSGVGYYGFWWSASEGGASRAYLRSMGYDDEYVDWNSYYKGSNLFSVRCLQG

SEQ ID NO: 50207 - DNA, 312 bp, Unknown
  Obtained from environmental sample
  misc_feature (1)..(312): n is a, c, g, or t
gtgccagaccaaaccgtagattactcagaacaagagctgcacgaaataggcatggatatagaatccaagctggacaacttcaaggttaagggcaaggtgaccggcattatgactggccccgttataatacgttttgaaatagaacctggcccaggcataaaggtctccagattcgaaagcctggcagacgatttggctttgctgctcaaaaccgcttccgtaagggtcatctcttctatacctggcaaatccgctgtgggcatagaaatccccaaccgaaagccgcaacagttttttgcagagaaattctga

SEQ ID NO: 50208 - protein, 103 aa, Unknown
  Obtained from environmental sample
  misc_feature (1)..(103): Xaa is any amino acid
MPDQTVDYSEQELHEIGMDIESKLDNFKVKGKVTGIMTGPVIIRFEIEPGPGIKVSRFESLADDLALLLKTASVRVISSIPGKSAVGIEIPNRKPQQFFAEKF

SEQ ID NO: 50209 - DNA, 978 bp, Unknown
  Obtained from environmental sample
  misc_feature (1)..(978): n is a, c, g, or t
gtgccgacgattgcaggctccgttgtgctgacgcttgacgttacggcgaccggagggaactacgataatacggtaggatcgtcgattaccctcagttctgcgtttgtgtttgacgccgctccgaccgtcgctctcgatgccggagatttcgctataaccggcggaaagaatcaggaagagtacaccggatcggcggcgacgccacctgcgcatgccaatatccaatacagcggtactgaagatgtgacaaattgcacctttagttctgcgataagcggcggcggggtgaatgccggtgactatgatttagtaataacgtgggcaggctgcgatgaagcgtttacgaatgatgcaagtggcgtaacgttgaccgatggatttacagtaacgaaacataccttagtgacaggggacttcaacattccggcgaaaggcgtggcagggacggcgccgacgattgggctgaaggcgccgttggacgccacaggttttacgtatacgttgaaatatgatggattaaccgccgtgccgacgattgcaggctccgttgtgctgacgcttgacgttacggcgaccggagggaactacgataatacggtaggatcgtcgattaccctcagttctgcgtttgtgtttgacgccgctccgaccgtcgctctcgatgccggagatttcgctataaccggcggaaagaatcaggaagagtacaccggatcggcggcgacgccacctgcgcatgccaatatccaatacagcggtactgaagatgtgacaaattgcacctttagttctgcgataagcggcggcggggtgaatgccggtgactatgatttagtaataacgtgggcaggctgcgatgaagagtttacgaatgatgcggtcggcgtaacgttgaccgatggatttacagtaacgaaacataccttagtgacaggggacttcaacaccccgtcaaacttatggaggcgatcctcctga

SEQ ID NO: 50210 - protein, 325 aa, Unknown
  Obtained from environmental sample
  misc_feature (1)..(325): Xaa is any amino acid
MPTIAGSVVLTLDVTATGGNYDNTVGSSITLSSAFVFDAAPTVALDAGDFAITGGKNQEEYTGSAATPPAHANIQYSGTEDVTNCTFSSAISGGGVNAGDYDLVITWAGCDEAFTNDASGVTLTDGFTVTKHTLVTGDFNIPAKGVAGTAPTIGLKAPLDATGFTYTLKYDGLTAVPTIAGSVVLTLDVTATGGNYDNTVGSSITLSSAFVFDAAPTVALDAGDFAITGGKNQEEYTGSAATPPAHANIQYSGTEDVTNCTFSSAISGGGVNAGDYDLVITWAGCDEEFTNDAVGVTLTDGFTVTKHTLVTGDFNTPSNLWRRSS

SEQ ID NO: 50211 - DNA, 312 bp, Unknown
  Obtained from environmental sample
  misc_feature (1)..(312): n is a, c, g, or t
ttgaaaatgggcatcacaaaagttccgcttccggtaaggcttattgtgggcattttagccgcaaatatggaacttgcaggcaaggcaaaacaaaaactcaccgagcgttttggcgcggtggatttggaaatgccgcccgttccgtttgcacacaccaattattatgaaaacgaactcggcagctcgccaattcgctcatttttgtcttttgaagataaaattgagcgcgaaaccattgctgctataaaactcgaaaccaacgaaatggaaaaaatctggaacagggctgtaaatcagaccccggctatatga

SEQ ID NO: 50212 - protein, 103 aa, Unknown
  Obtained from environmental sample
  misc_feature (1)..(103): Xaa is any amino acid
MKMGITKVPLPVRLIVGILAANMELAGKAKQKLTERFGAVDLEMPPVPFAHTNYYENELGSSPIRSFLSFEDKIERETIAAIKLETNEMEKIWNRAVNQTPAI

SEQ ID NO: 50213 - DNA, 471 bp, Unknown
  Obtained from environmental sample
  misc_feature (1)..(471): n is a, c, g, or t
ttgtcgcaggcattgatgcaacgccctcaattgcaattggatgtatatggaaacgcagactccattcaagacggcaatgtcttgaaagaaacgcagcttttaaaagccattggtcacaacgtgcctgcaaaattaacacccactgcccttgaaaaaccgcccttgcgcgacaccctttttgcctactacgagcgcacagagaaaaaagactggcgtaccgcactgcaaaacccaaatgctcagacccaagatgaatcatcactcgtgcaagccgcccgccgaatttggaacgatttgctagctcgtcaaactttgccaccaaatactttgcagcaactcgcactcacccgcgcacagaatattaaagttgaactggtaaacataaaccccactttgggagagcgtgtttttgtggtaaacgagggcaccctttccgaaactgcttcgcgtttgaaaatcagagaatattga

SEQ ID NO: 50214 - protein, 156 aa, Unknown
  Obtained from environmental sample
  misc_feature (1)..(156): Xaa is any amino acid
MSQALMQRPQLQLDVYGNADSIQDGNVLKETQLLKAIGHNVPAKLTPTALEKPPLRDTLFAYYERTEKKDWRTALQNPNAQTQDESSLVQAARRIWNDLLARQTLPPNTLQQLALTRAQNIKVELVNINPTLGERVFVVNEGTLSETASRLKIREY

SEQ ID NO: 50215 - DNA, 951 bp, Unknown
  Obtained from environmental sample
  misc_feature (1)..(951): n is a, c, g, or t
atgcgcggacaggacaagctttggataattccggcggaaggacacggagataaaaaggcgataaatgcatgggtagtaggtgagcgcggaagagttactctggtagacggcaatttggaaccggcgcagggttttcccgttcttacggggcttagactttcatccgcgcctgtggcgtataacggcaaactctacctttgcgatgaagataaaaaaattcacactgttgacgcaagcggcacgcaaaatgtttgggaaacggcatttaatacgccattgcgttcgtccccttcttttatgacattttcggcaaagggcggcgtgcgacattatgcggcggtttatccaaagagtttttttggcgaattatggcttcttgacgcggacgggaaagtttttcccggctggcctgtgccgctgacgaaagcagatgaagacggttttcctgtaaacgcgggcattagttttggctcgccgcttttatttgcaaataacaaccgtgtgtatatcgcctttgtcagccagtcgggagatctttttatttttgatgaaaatgggaaaggagtttctccgtttccggttgctcttaacggcgtgttttttgttcagcctgtttttgacggaaatttcctctggcttgtttcatcggaaggaaatttattcagggtaagcctggacggcgaagttttatatcagaatatcgcgggtttttccgcaaaggaagaagggtacataacggtatttgacagcgacggagataagattcctgaaatctatatcacaggcgaaggtaacgcgctttatgcctatacgcgtaatttccgttctcttgggggattccctcttcccgcatggggcagacctttattcattccggcgcagggcggcaagaaagcggaaatttttggcatgggaatggataagcgtttatatcgctggcaatttaaataa

SEQ ID NO: 50216 - protein, 316 aa, Unknown
  Obtained from environmental sample
  misc_feature (1)..(316): Xaa is any amino acid
MRGQDKLWIIPAEGHGDKKAINAWVVGERGRVTLVDGNLEPAQGFPVLTGLRLSSAPVAYNGKLYLCDEDKKIHTVDASGTQNVWETAFNTPLRSSPSFMTFSAKGGVRHYAAVYPKSFFGELWLLDADGKVFPGWPVPLTKADEDGFPVNAGISFGSPLLFANNNRVYIAFVSQSGDLFIFDENGKGVSPFPVALNGVFFVQPVFDGNFLWLVSSEGNLFRVSLDGEVLYQNIAGFSAKEEGYITVFDSDGDKIPEIYITGEGNALYAYTRNFRSLGGFPLPAWGRPLFIPAQGGKKAEIFGMGMDKRLYRWQFK

SEQ ID NO: 50217 - DNA, 684 bp, Unknown
  Obtained from environmental sample
  misc_feature (1)..(684): n is a, c, g, or t
atgattaccgttacctgcgaagactgcatggacctgattgcaagatacccggacaagcatttcgatttggccgttgcggatcctcctttcggcataggacaggaatggaagaaaaggacgcatactaaaaacaaccgtttttcttgtacgtcttacaagaatgaaagcatccctcctaaaaaatactttgacgaaattttccgcgtttcaaaggagcaaattattttcggctacaattacttcgtagagcatcttggtccgacaaactatttgattgtctgggacaagctatccggcaacaatgaatcttatttttattccagggcagaaatagcatacacatcattccgtatccctttatttattatccgcgtcccctgggacggttttcgcatgggcagggaaaccggggagcgcaagatccaccctcaccagaagcccgtggagctttacctaaaaatactgaagaagtacgcgaagccgggatggcacgtgctcgacacgcacatgggatcgggatcgtcggcaatcgcctgccacaggctcgggcttggcatgaccgcctgcgaaatcgacccgcactatttcaacgccgcaaaaaagagaatagacgcggaaacagcgcagcgggagctttttttgccggaactgcaacggttccgggagagccatttgttcgagtag

SEQ ID NO: 50218 - protein, 227 aa, Unknown
  Obtained from environmental sample
  DOMAIN (21)...(201): DNA methylase
  misc_feature (1)..(227): Xaa is any amino acid
MITVTCEDCMDLIARYPDKHFDLAVADPPFGIGQEWKKRTHTKNNRFSCTSYKNESIPPKKYFDEIFRVSKEQIIFGYNYFVEHLGPTNYLIVWDKLSGNNESYFYSRAEIAYTSFRIPLFIIRVPWDGFRMGRETGERKIHPHQKPVELYLKILKKYAKPGWHVLDTHMGSGSSAIACHRLGLGMTACEIDPHYFNAAKKRIDAETAQRELFLPELQRFRESHLFE

SEQ ID NO: 50219 - DNA, 357 bp, Unknown
  Obtained from environmental sample
  misc_feature (1)..(357): n is a, c, g, or t
atgaaaacgcagtactgtaaatcactccccccgcactggcatccggtagccgcgatattcgcggccttgggcgacgaaacccggcagcgcatcctcctgcttttcgacgagggggaagagctgtccattaaagacatagcttcccgcttcgatctcagccgaaccaccgtggttcatcatctggcaatgctggaaagggcggacattctggctgtccgccgcgcgggcaaacacacgttatattccgtgcggcccggcatcatactcgacgccctggaaaagcttcatctatatattgaagaagagtaccccgccacgtaccgggaatacaggagaatcagccatgaacccaagtaa

SEQ ID NO: 50220 - protein, 118 aa, Unknown
  Obtained from environmental sample
  DOMAIN (27)...(78): HTH domain
  misc_feature (1)..(118): Xaa is any amino acid
MKTQYCKSLPPHWHPVAAIFAALGDETRQRILLLFDEGEELSIKDIASRFDLSRTTVVHHLAMLERADILAVRRAGKHTLYSVRPGIILDALEKLHLYIEEEYPATYREYRRISHEPK

SEQ ID NO: 50221 - DNA, 954 bp, Unknown
  Obtained from environmental sample
  misc_feature (1)..(954): n is a, c, g, or t
atgtcagcaattgcagcagtcgcggaaatgaccgataccgccgtcgacgcaagtaccgataccgacggggcgaaatcgccgtccgttcttgaatacatatatcagacgatgaacatcgctcctccgagcggcacggtcgccatctcgaagtaccgcaacccgcaggcccttgccgagagcggagccgacgagcgcataggcgcggcgcttgctctttttgtggacagcgtgatagccgaatccgtatcgatagataaaatcgacaaggcggtgctggactgccggatagcggatatcgaccgccgcatatcgctgcagctcgacgagatactccacgcggagccttttcagcggttggagtcggtctggcgcagtttggattttttagtgcagaggactgacttcaggaagaacgtgaagatcaacatcctcgacgtttccaaagaggaattggccgaggatttcgaggacgttcccgagacgatccagtcggggctgtacaagcacgtctacacggacgagtacgacacgccgggcggcgagccctacgcggcgataatcagcggcttcgagttcaactcaagcgcggcggacgtttcgctcctgcaggagctgtcgaaggtggcggcggcttgccactgcccgtttatcggcgcggccacttctaagttcttcgccaaggagagggcggtagacctcaccaagatagaggacttgcacaactacatggagcgttcggagtttttgcgttggaactctttcagaaatacggaagacagccgctacgtgggcctcacgctcccgcgtttctcattgcgtctgccgtacggccccgacactctgccggtcaggagttcgtgtacaaggagaacgtggccgggccgaacagcgacaaatacctgtggggcagcgcggccttcgcgttcgcctccaacatggtcaggtcattcatag

SEQ ID NO: 50222 - protein, 317 aa, Unknown
  Obtained from environmental sample
  DOMAIN (43)...(317): Protein of unknown function (DUF877)
  misc_feature (1)..(317): Xaa is any amino acid
MSAIAAVAEMTDTAVDASTDTDGAKSPSVLEYIYQTMNIAPPSGTVAISKYRNPQALAESGADERIGAALALFVDSVIAESVSIDKIDKAVLDCRIADIDRRISLQLDEILHAEPFQRLESVWRSLDFLVQRTDFRKNVKINILDVSKEELAEDFEDVPETIQSGLYKHVYTDEYDTPGGEPYAAIISGFEFNSSAADVSLLQELSKVAAACHCPFIGAATSKFFAKERAVDLTKIEDLHNYMERSEFLRWNSFRNTEDSRYVGLTLPRFSLRLPYGPDTLPVRSSCTRRTWPGRTATNTCGAARPSRSPPTWSGHS

SEQ ID NO: 50223 - DNA, 807 bp, Unknown
  Obtained from environmental sample
  misc_feature (1)..(807): n is a, c, g, or t
ttggaactctttcagaaatacggaagacagccgctacgtgggcctcacgctcccgcgtttctcattgcgtctgccgtacggccccgacactctgccggtcaggagttcgtgtacaaggagaacgtggccgggccgaacagcgacaaatacctgtggggcagcgcggccttcgcgttcgcctccaacatggtcaggtcattcatagataacggttggtgtgttcagattcgcggtcccgaagcgggaggaaaggtagacaaccttccggtgcatgtatttgacgccggacgcgggacggaggtgaaaataccaaccgaaattttaatccccgaaacccgggagttcgagttcgcccaagaggggttcattcccctctcattctacaagaacagggactacgcctgcttcttctcggcaaactcggcgcagaagccgcaggagttcgacaacccgatagtcacggccaatatgcgcataaactcccggttgccctacatcttcctgatatcgcgcatagcccactaccttaaagtgatccaacgcgaaaacatcggctcgacaaagagccgcaaaatgttgcaggaggagctgacgcggtggataaagaagttggtgacagagatgaaagacccaggcccggaactcatagccacgcatccgctaaaggacgccgacgtggatgtgagcgagattgaagacaacccgggcttcttcagggtcagcctgtctgtcatcccgcacttccagatagaggggatagacataaacctgtcgcttgtgtctaagttgccgaaggggaaagaataa

SEQ ID NO: 50224 - protein, 268 aa, Unknown
  Obtained from environmental sample
  DOMAIN (1)...(265): Protein of unknown function (DUF877)
  misc_feature (1)..(268): Xaa is any amino acid
MELFQKYGRQPLRGPHAPAFLIASAVRPRHSAGQEFVYKENVAGPNSDKYLWGSAAFAFASNMVRSFIDNGWCVQIRGPEAGGKVDNLPVHVFDAGRGTEVKIPTEILIPETREFEFAQEGFIPLSFYKNRDYACFFSANSAQKPQEFDNPIVTANMRINSRLPYIFLISRIAHYLKVIQRENIGSTKSRKMLQEELTRWIKKLVTEMKDPGPELIATHPLKDADVDVSEIEDNPGFFRVSLSVIPHFQIEGIDINLSLVSKLPKGKE

SEQ ID NO: 50225 - DNA, 615 bp, Unknown
  Obtained from environmental sample
  misc_feature (1)..(615): n is a, c, g, or t
ttgccgtcccgccggccgctaacgtccgtccttccaggagtcggaggcttgcaggttcccgtcggcgtaggtccaggtgatcctctggtagcgcagctgcacctcttccaagtgttcgtagcgttccttagacgcgtctttgacgttgtgcattatcgggtgtatcgagcagactttcaccccttccagcagatgggtgaagtactcggtctccgaaccggcgtcgtcgatctgataccaccggatcgtcacctcgttgaaggtctgcccctcgcacgccgctttgtagagatacggagacgaagcgtctatcgctttgaggatgcgtatggcctcgtgcttgcgcgttccggtgagcttgccggtgtccgggtcggtggggatgcgcacctcgtgctcaaactcaaatatctccacgctcttctcacgcccttcaatgtccacagagccctccaccggatttccggaattgtcggtcatccacatatatgcaggtgtcggcatttttttgtcctttcttttttggtttatgttattgtaaagccaggcttcgacttcgctcagccaccggacttcgactccgctcagccaccgggcaacccgaaaggtcgctga

SEQ ID NO: 50226 - protein, 204 aa, Unknown
  Obtained from environmental sample
  misc_feature (1)..(204): Xaa is any amino acid
MPSRRPLTSVLPGVGGLQVPVGVGPGDPLVAQLHLFQVFVAFLRRVFDVVHYRVYRADFHPFQQMGEVLGLRTGVVDLIPPDRHLVEGLPLARRFVEIRRRSVYRFEDAYGLVLARSGELAGVRVGGDAHLVLKLKYLHALLTPFNVHRALHRISGIVGHPHICRCRHFFVLSFLVYVIVKPGFDFAQPPDFDSAQPPGNPKGR

SEQ ID NO: 50227 - DNA, 486 bp, Unknown
  Obtained from environmental sample
  misc_feature (1)..(486): n is a, c, g, or t
atgccgacacctgcatatatgtggatgaccgacaattccggaaatccggtggagggctctgtggacattgaagggcgtgagaagagcgtggagatatttgagtttgagcacgaggtgcgcatccccaccgacccggacaccggcaagctcaccggaacgcgcaagcacgaggccatacgcatcctcaaagcgatagacgcttcgtctccgtatctctacaaagcggcgtgcgaggggcagaccttcaacgaggtgacgatccggtggtatcagatcgacgacgccggttcggagaccgagtacttcacccatctgctggaaggggtgaaagtctgctcgatacacccgataatgcacaacgtcaaagacgcgtctaaggaacgctacgaacacttggaagaggtgcagctgcgctaccagaggatcacctggacctacgccgacgggaacctgcaagcctccgactcctggaaggacggacgttag

SEQ ID NO: 50228 - protein, 161 aa, Unknown
  Obtained from environmental sample
  DOMAIN (4)...(147): Protein of unknown function (DUF796)
  misc_feature (1)..(161): Xaa is any amino acid
MPTPAYMWMTDNSGNPVEGSVDIEGREKSVEIFEFEHEVRIPTDPDTGKLTGTRKHEAIRILKAIDASSPYLYKAACEGQTFNEVTIRWYQIDDAGSETEYFTHLLEGVKVCSIHPIMHNVKDASKERYEHLEEVQLRYQRITWTYADGNLQASDSWKDGR

SEQ ID NO: 50229 - DNA, 1560 bp, Unknown
  Obtained from environmental sample
  misc_feature (1)..(1560): n is a, c, g, or t
atgccaataaaaccagaacttatagaagaattaaatgccagacgctccgaggcaaagctcggaggtggcgcagacaaaattgcaaaacggcacgaaaagggtcaactgtctgcacgtgagcgcgtggaaaccctctgcgataacagttcctttcaagaagctggaatgcacgtggatcaagcaaagcccacagcaaaaagattgccgggcgatggtgttataaccggagtgggcaatgtggatggtcgcccagttgcggtgttcagccaagatttcacggttagcggtggtagcctttctcaaatgcacgctcaaaaaatttgcgacattcaagatcaagcctgcgagctaggcttccccataataggcataaacgattccggtggagctagaattcaagaaggtatatggggactaagcggctacgggcaggtattttaccgcaatgttcaggcttccggtcttgttcctcaaatttcaattatagcaggtccttgcgcaggtggagcagcatatagtcccgctttaacagattttttaattcaaactcgcaaaaatgcagaaatgtatatatgcggtccaagcgttattaaagcagccacaggtcaagaagctcctgttgagcaattcggcacagccgaggctcacgcaagcgttagtggaaacattcattttgttgccgaagacgataaagatgcaatagtcataacaaaaaaattgctcagctttttgccttcaaacaacctgcaagaccctccgcataacataccagctacaatatccgaaaccaaaaaccctagcctcaacgagcttgtacctgtagattctaaatctggctttgatgtgtataaggttatagaagccataacggacaaaggacagtggctagaagttcaaagggagtttgcaaaaaacatagtggttggttttgccagaatagaaggcatggttgttggcataatagcaaaccagcccgctgtgaaagccggttgcctagatatagacagctccgacaaaggcgcaagattcatacgtttttgcaatgcctttaacattcctgttgtaaatttagttgatgttccgggttttatgcccggtcttgctcaagagagaggtggcataataaggcacggagcaaaaatgctttttgcttatgcagcttgcacagttccaaaagtcaccgttattatgcgcaaggcttatggcggttcttaccttgcaatgtgttcaaaagacatgggcgcagattttgtttacgcttggccctgcgcagaaattgcggttatgggtgcagagggtgcaattcccgttgtgtataaaaaagaaatagatgcggcaaaagaagctggcggcgaagcagcagccaaagccaaaaaagcagagcttattgaaaaataccgcaccaaattcgcaagcccttggcaggctgcagaaacaaatatgctaacagatgttatagagccttcggaaaccagaaaccacatagcactcgctttgcgcttttcaattaccaaacgctctacgcgcccacctaaaaaacacggacttatacccttatga

SEQ ID NO: 50230 - protein, 519 aa, Unknown
  Obtained from environmental sample
  DOMAIN (25)...(517): Carboxyl transferase domain
  misc_feature (1)..(519): Xaa is any amino acid
MPIKPELIEELNARRSEAKLGGGADKIAKRHEKGQLSARERVETLCDNSSFQEAGMHVDQAKPTAKRLPGDGVITGVGNVDGRPVAVFSQDFTVSGGSLSQMHAQKICDIQDQACELGFPIIGINDSGGARIQEGIWGLSGYGQVFYRNVQASGLVPQISIIAGPCAGGAAYSPALTDFLIQTRKNAEMYICGPSVIKAATGQEAPVEQFGTAEAHASVSGNIHFVAEDDKDAIVITKKLLSFLPSNNLQDPPHNIPATISETKNPSLNELVPVDSKSGFDVYKVIEAITDKGQWLEVQREFAKNIVVGFARIEGMVVGIIANQPAVKAGCLDIDSSDKGARFIRFCNAFNIPVVNLVDVPGFMPGLAQERGGIIRHGAKMLFAYAACTVPKVTVIMRKAYGGSYLAMCSKDMGADFVYAWPCAEIAVMGAEGAIPVVYKKEIDAAKEAGGEAAAKAKKAELIEKYRTKFASPWQAAETNMLTDVIEPSETRNHIALALRFSITKRSTRPPKKHGLIPL

SEQ ID NO: 50231 - DNA, 321 bp, Unknown
  Obtained from environmental sample
  misc_feature (1)..(321): n is a, c, g, or t
ttgtgcttctgggttcataagggtataagtccgtgttttttaggtgggcgcgtagagcgtttggtaattgaaaagcgcaaagcgagtgctatgtggtttctggtttccgaaggctctataacatctgttagcatatttgtttctgcagcctgccaagggcttgcgaatttggtgcggtatttttcaataagctctgcttttttggctttggctgctgcttcgccgccagcttcttttgccgcatctatttcttttttatacacaacgggaattgcaccctctgcacccataaccgcaatttctgcgcagggccaagcgtaa

SEQ ID NO: 50232 - protein, 106 aa, Unknown
  Obtained from environmental sample
  misc_feature (1)..(106): Xaa is any amino acid
MCFWVHKGISPCFLGGRVERLVIEKRKASAMWFLVSEGSITSVSIFVSAACQGLANLVRYFSISSAFLALAAASPPASFAASISFLYTTGIAPSAPITAISAQGQA

SEQ ID NO: 50233 - DNA, 531 bp, Unknown
  Obtained from environmental sample
  misc_feature (1)..(531): n is a, c, g, or t
atggtatatgagataattggatttgtcaatataaataaaatggcagcttttgttaagacttatgcttctctttacaatttactgtatttatgtaatgattttattagaggaaaaattatgggtactgtttttactgaaattactttgaaaaacggaactgatcttgttttggtacaaaacgggcatattactgaacaaaatgtccgttcagtcaccgttaacgctctcgttgataccggcgcattgacacttgttattaatgaaaaaatatgcagggaattagggctgtcaatcgtaggtactcgtacagctttccttgcgggaggtatagaaactccctgtaatattacagaaacggttcacatttattggaaaaaccgtgacgccgcatgccgcgcttgggttcttccgggtgaagaacatatcctgctaggcgctatcccgctggaagaaatggatcttgcggttgatcctgtaaaccaaaaactctttggcattcacggcgatgaaccaattgggatgatatattaa

SEQ ID NO: 50234 - protein, 176 aa, Unknown
  Obtained from environmental sample
  misc_feature (1)..(176): Xaa is any amino acid
MVYEIIGFVNINKMAAFVKTYASLYNLLYLCNDFIRGKIMGTVFTEITLKNGTDLVLVQNGHITEQNVRSVTVNALVDTGALTLVINEKICRELGLSIVGTRTAFLAGGIETPCNITETVHIYWKNRDAACRAWVLPGEEHILLGAIPLEEMDLAVDPVNQKLFGIHGDEPIGMIY

SEQ ID NO: 50235 - DNA, 654 bp, Unknown
  Obtained from environmental sample
  misc_feature (1)..(654): n is a, c, g, or t
gtgcgcgtgccggaggacgtggcggtcaccggattcgacgacatagaggagagcgaactgaccacgccgccgctcaccacggtacggcagccgctctacgaaatcgggcgcaccgccgtagaactcttggttacaaaaatgaacggcaaagaggtcccgcggcgcacatctttgccgacgccgctctccatacggcaatcctgcggctgcttcatcaaccccaaccacgcgctggacagacgcacgttctccatcatccagcgcctgtccaacaacatcgaccacctgaaagagcacctcacgtcggaactcttctctttcgtggcgatggagatgggggcgtccatagacgacgaggacttgagggagatcgcctcctcgttcttcgacgaggtggaggggacgagaaccggcgtcttcctgtcggcgctcaaccgcatggtccgcgccgccacgctcgccgcggcggagagcgacgacatcctccaatggcagaagatactggtgaccatacgcaaattcacgcaggggttggacgccgcgaagagcgagaccgccgacaacctcctgcacgacagttacaatctgttcagcgaggcggcggcgaggcagcaggcccacaaacgcctgcaagccgaacaaaggccgccctga

SEQ ID NO: 50236 - protein, 217 aa, Unknown
  Obtained from environmental sample
  misc_feature (1)..(217): Xaa is any amino acid
MRVPEDVAVTGFDDIEESELTTPPLTTVRQPLYEIGRTAVELLVTKMNGKEVPRRTSLPTPLSIRQSCGCFINPNHALDRRTFSIIQRLSNNIDHLKEHLTSELFSFVAMEMGASIDDEDLREIASSFFDEVEGTRTGVFLSALNRMVRAATLAAAESDDILQWQKILVTIRKFTQGLDAAKSETADNLLHDSYNLFSEAAARQQAHKRLQAEQRPP

SEQ ID NO: 50237 - DNA, 1401 bp, Unknown
  Obtained from environmental sample
  misc_feature (1)..(1401): n is a, c, g, or t
atggcagaagatactggtgaccatacgcaaattcacgcaggggttggacgccgcgaagagcgagaccgccgacaacctcctgcacgacagttacaatctgttcagcgaggcggcggcgaggcagcaggcccacaaacgcctgcaagccgaacaaaggccgccctgatgcgctcggtcggccactccatcgccaattctttcgacatcccgacgctctcgcaagccattgtcaagatgttcccgaagctggagataaacgatttctccctctcgctctacgacaagtcgaccaaggagtttctcaattccaagccgataatcgccttgaagcgcgggaagaaagacgtccccacgcaggatatgttcttccccacgaaagacttggtgctaggcgggctcaagtattcggaacagccgtaccacgtgatcgtccagccgctacacttcaagaacgaacagctggggatggccgtgttcagggacggcccgctcacgggctacatctacgacatcttgggcgagcatttgagcggcgcccttcaaggcgcgctccttatgaaaaagatccaggagcagtccctcgaccttgaagagaaaaacaaggagctggaggtgctccggcaaaaggaacacctgcgcttagaggccatacagcgcgaacttcaaatagggcgcacgatacaggagagctttctgccggaatccatgccgcaaccggagggctgggagtcgcgcgcgctcttcatgccggcccgcgaagtatcgggcgacttctacgacgctttcgccttggaagacgggcggatcgcgtttgtcatagccgacgtctccggcaaagacgtaggggcggcgctcttcatgtccctgatacgcagccttatccgcgcgttctccgagcactccgtggagggcgcgggcacccgctcacgccgtggaactggacaacgctacatcgtccacaaccacacacctccaagggacgcttcatgtacgccacgatgtttcttcgccctggtagatccccaaagcggcgaggtagcctacatcaacgccggccacaaccctccggcgttgctgcaacctaacggcaaaatcgcaagatggcttagtcctaccggccccgcagtcggcgtcggcataaaagacgatctcaagtaccgccaagaaaaattaaccctgcaacccggcgagatactgttgctctataccgacggcgtcattgaggcgaaaaacgagaagggcgagttcctccagcaaaaacgcttcgcggaactgatagagagaccgtactccgcgctcgacgacgtggttgacagagtgaaagacgcgcttaaagaacactgcgccggagcggatccttacgatgatgttacgatggtgggaatttatcgaaagggctga

SEQ ID NO: 50238 - protein, 466 aa, Unknown
  Obtained from environmental sample
  DOMAIN (265)...(465): Stage II sporulation protein E (SpoIIE)
  misc_feature (1)..(466): Xaa is any amino acid
MAEDTGDHTQIHAGVGRREERDRRQPPARQLQSVQRGGGEAAGPQTPASRTKAALMRSVGHSIANSFDIPTLSQAIVKMFPKLEINDFSLSLYDKSTKEFLNSKPIIALKRGKKDVPTQDMFFPTKDLVLGGLKYSEQPYHVIVQPLHFKNEQLGMAVFRDGPLTGYIYDILGEHLSGALQGALLMKKIQEQSLDLEEKNKELEVLRQKEHLRLEAIQRELQIGRTIQESFLPESMPQPEGWESRALFMPAREVSGDFYDAFALEDGRIAFVIADVSGKDVGAALFMSLIRSLIRAFSEHSVEGAGTRSRRGTGQRYIVHNHTPPRDASCTPRCFFALVDPQSGEVAYINAGHNPPALLQPNGKIARWLSPTGPAVGVGIKDDLKYRQEKLTLQPGEILLLYTDGVIEAKNEKGEFLQQKRFAELIERPYSALDDVVDRVKDALKEHCAGADPYDDVTMVGIYRKG

SEQ ID NO: 50239 - DNA, 441 bp, Unknown
  Obtained from environmental sample
  misc_feature (1)..(441): n is a, c, g, or t
gtgctcggagcgtatcacttttttcatttgaattatgacggcgcggagcaggcggagaattttattaatacggtaggcggtgttattgacttgcctcctgtgatagattttgagtttaccggaaatccgaaaacgttcggcaaaagcgaggcagagttaataaatgagttaagaaagtgtgccagcaaattggaagagcgctataaacacaaagtaataatttatacaacaccggacgcgtacaactttataataaaggataacatcggaaatccgttgtggtatcgttcaattatattgccgttaaacaaagatatgccgaatgtgctgttttggcaatatcataatagcgcaaaggtcagcgggataaataagcctgttgatttgaatgtatttagggggagtatggaagaattaagtaacttaattatgaagaaatga

SEQ ID NO: 50240 - protein, 146 aa, Unknown
  Obtained from environmental sample
  DOMAIN (2)...(123): Glycosyl hydrolases family 25
  misc_feature (1)..(146): Xaa is any amino acid
MLGAYHFFHLNYDGAEQAENFINTVGGVIDLPPVIDFEFTGNPKTFGKSEAELINELRKCASKLEERYKHKVIIYTTPDAYNFIIKDNIGNPLWYRSIILPLNKDMPNVLFWQYHNSAKVSGINKPVDLNVFRGSMEELSNLIMKK

SEQ ID NO: 50241 - DNA, 1356 bp, Unknown
  Obtained from environmental sample
  misc_feature (1)..(1356): n is a, c, g, or t
gtggccgtgaatacaagcatactggaagaacgcaagacatccatatcccagaaacgcgggaccggcctgtactgtgagcgcgagagcgtatccggcgcggtcagccagcgggcctgtgtgtactgcggggcgagggtggtgttgaatccaattaccgacgcttaccatatcgttcacgggccaatcggctgcgccagttatacatgggacatccgcggttctcttacatccggcgcggagactttccgcagcagcttttccaccgacttgcgggagaccgacatcgtgttcggcggcgtaaaaaagttaagcgccgcggttgacgagttgatggaaaaagcgcaccctgcgccgaaactgatttttgtatacgccacctgtatagtgggcgttatcggcgatgacgtggacgcggtatgccgcgcggcggaagcaaagtacggtatccgcgtgatccccgtaaaggcccccggtttttcaggaaccaagtcacagggctacaaactcgcctgtgacgcgataatgacattgattaagccgcacaaggacagagccaaacgctttggggtgaatatattgggcgattacaacctcgccggtgaaatgtggattatcaaaggatatttggagcaaatcggcataccggtcatctccaccgtcacgggcgattcttcttacgaaaaactgattaacgcgccgtccgcggcgatgaacattgtgcagtgcgccgggtcatcggcgtatcttgccgagcggatgagcgaggaaatgggcataccttacgtcaaagtcagtttcttcggcattgaggacaccgccgcgtctctgcttcacgtcgccgacgcgctgggaaagccggaattgacggaaaaagcgcggcgcttctccgagtcgcggatagcggatgttttgccgcttatcgaaaaatacaagccgcgcctggaaggaaaaaaggcggcgatattcgtcggcggcgggtttaaggcgatttccctgatccggcagtttgacgggcttggaatgaaaacggtggttgtcgggacgcagacgggcaagaaggacgaatatgagattatcaattcgctcgttgacggggatgccgtcgtgctggacgacgccaaccccgcggagctggaacggtttatgcttgaaaaacaggccgatatcctggtaggcggcgtgaaggaacgcccgctcgcgtacaagctgggcgtggcgttctgcgatcataaccatgagcgcaagcatcccctggcgggctttgagggaatcgaaaattttgtgaaagaaattcaccggtccattaacagccccgtctggaaatatgtaaagaaacatgaagcgggcgcggtatga

SEQ ID NO: 50242 - protein, 451 aa, Unknown
  Obtained from environmental sample
  DOMAIN (31)...(437): Nitrogenase component 1 type Oxidoreductase
  misc_feature (1)..(451): Xaa is any amino acid
MAVNTSILEERKTSISQKRGTGLYCERESVSGAVSQRACVYCGARVVLNPITDAYHIVHGPIGCASYTWDIRGSLTSGAETFRSSFSTDLRETDIVFGGVKKLSAAVDELMEKAHPAPKLIFVYATCIVGVIGDDVDAVCRAAEAKYGIRVIPVKAPGFSGTKSQGYKLACDAIMTLIKPHKDRAKRFGVNILGDYNLAGEMWIIKGYLEQIGIPVISTVTGDSSYEKLINAPSAAMNIVQCAGSSAYLAERMSEEMGIPYVKVSFFGIEDTAASLLHVADALGKPELTEKARRFSESRIADVLPLIEKYKPRLEGKKAAIFVGGGFKAISLIRQFDGLGMKTVVVGTQTGKKDEYEIINSLVDGDAVVLDDANPAELERFMLEKQADILVGGVKERPLAYKLGVAFCDHNHERKHPLAGFEGIENFVKEIHRSINSPVWKYVKKHEAGAV

SEQ ID NO: 50243 - DNA, 792 bp, Unknown
  Obtained from environmental sample
  misc_feature (1)..(792): n is a, c, g, or t
ttgccgactactttttttccggatcaaagcggcgtgctggacgccccaatgaccggcaagtatctgatgtatccggagggcggcacgacgattgaagaaatccgcggcctgggcgacagcgacgctctgattgcattaggcgaaataataagcattgagccggccgaacttttaaagaaaaaatggaaggtggactttatcctcctgccgctgcctgtaggcgtcacgtttactgaccaatatgtgcttgccctgcgaaaacaatcgaaaaatccggttccccccgcattggagcgtgagcgcgggcagttggttgatttgctgctggattcccaccagtacacctatcaaaagaaggcggcgatattcggcgacccggacgtggtaatagggcttacctcgcttgctttggaaatgggtatgacgccgaaatacgtaatcacgggaacgccgaaagaagaatttacaatcaaggttaattcgctgctcgcgcagtacggcgtgatcggttctacggtaaaggcaaacgcggatttgttcgagctgcaccagtggattaagaatgagcctgtggatttactgattggcacaacctacggcaagcagattgcgaaggccgaggatattccttttatccgcgccggcttcccggtgcttgaccggtacggcggccccttacagccgattgtaggctacacaggggcaatccgcctggttgaacaaataacaaacgcgtttcttgacaggttcgaccgcgacgccgcggacgaggactttgaaatcgttctgtaa

SEQ ID NO: 50244 - protein, 263 aa, Unknown
  Obtained from environmental sample
  DOMAIN (2)...(248): Nitrogenase component 1 type Oxidoreductase
  misc_feature (1)..(263): Xaa is any amino acid
MPTTFFPDQSGVLDAPMTGKYLMYPEGGTTIEEIRGLGDSDALIALGEIISIEPAELLKKKWKVDFILLPLPVGVTFTDQYVLALRKQSKNPVPPALERERGQLVDLLLDSHQYTYQKKAAIFGDPDVVIGLTSLALEMGMTPKYVITGTPKEEFTIKVNSLLAQYGVIGSTVKANADLFELHQWIKNEPVDLLIGTTYGKQIAKAEDIPFIRAGFPVLDRYGGPLQPIVGYTGAIRLVEQITNAFLDRFDRDAADEDFEIVL

SEQ ID NO: 50245 - DNA, 819 bp, Unknown
  Obtained from environmental sample
  misc_feature (1)..(819): n is a, c, g, or t
atgttttcaccgacccaagggatggcaaaaaaatacaaatttgaaatagctcccaatgggaaaatttggatgagcgaaaacttaaactattcgagagacaacacgctcggctggtgctatggagtgaatataaacggcaccaatccgcataaggattccacaagctgcggcagtggctacggcaggatttacgaatggtctgtggctatggacggcaatagtccgcaggggctatgcccaaagggatggcatattcctagcacggcggaatggagcggcatagtgagcaccggagccagaaaaatgtcaagcggtttttatatatatccagggaactacaacctcaacactgagtttcctccccctggctggaaagaaagagacaaaagcggcttttattggactagcagcgggaataggtattttaccggcttttttaataaaagtgaatgcacaagcgggagcggaagtacgtgcttagtggaagccaagactgatgcatccaatatagacaatttttccgtccgttgcatagcagatgaagatctcaaatttacctgcggcgcggaaacatatagcccatcaacccatttctgttccagcactggagttttgcctctttgcggcaacaaggaatataagcccaaaacccactttttgctctggcaccgaaatcatacctctctgcggcggcaaaaccttcaatccgacaacgcagagatgcggcaaagacaacatagtggaaaacaaatgcggcagcaactattacaacccagcaaccgctttctgctctggaaattcaatatactccaaatgtag

SEQ ID NO: 50246 - protein, 272 aa, Unknown
  Obtained from environmental sample
  misc_feature (1)..(272): Xaa is any amino acid
MFSPTQGMAKKYKFEIAPNGKIWMSENLNYSRDNTLGWCYGVNINGTNPHKDSTSCGSGYGRIYEWSVAMDGNSPQGLCPKGWHIPSTAEWSGIVSTGARKMSSGFYIYPGNYNLNTEFPPPGWKERDKSGFYWTSSGNRYFTGFFNKSECTSGSGSTCLVEAKTDASNIDNFSVRCIADEDLKFTCGAETYSPSTHFCSSTGVLPLCGNKEYKPKTHFLLWHRNHTSLRRQNLQSDNAEMRQRQHSGKQMRQQLLQPSNRFLLWKFNILQM

SEQ ID NO: 50247 - DNA, 651 bp, Unknown
  Obtained from environmental sample
  misc_feature (1)..(651): n is a, c, g, or t
ttgaatggagaacaaattgtgaaaaacttttccctaataaccatcgcagcggcactttgcgccttgctgcttttctcttgcacttccgaccttgaaatgccgccaccaccagatgaccctatttcatcctctgcacaggtatggaactattgcgtttatccaaaagacaaaaagtgctactcaggctcttattccgtttgcccaggcaccggcggcgaattgagaaacgattgtccttatagcagttcaagtctcgcacaaagcaagtccagttccagcggcggcactgcggacaattccagctcaagccaaaatgggcagggcaatgaacaggaatatgattattgcgtttttgatgtggaaaaaaactgtttgtctggtcccttgactgattgcccttctggaggaaaacttagcaatacttgcccctacaatagctcaagttctgcacaaactggttcgtctagcagttctagccaaggtatttcgtctagcagctccagcggcattgcaggtggtagttccagtagctctagcagttctagtagttctagccaaggtactaaaaactcatccagttcgcaaataattgggcaagtagaaggcaatgttttcaccgacccaagggatggcaaaaaaatacaaatttga

SEQ ID NO: 50248 - protein, 216 aa, Unknown
  Obtained from environmental sample
  SIGNAL (1)...(26)
  misc_feature (1)..(216): Xaa is any amino acid
MNGEQIVKNFSLITIAAALCALLLFSCTSDLEMPPPPDDPISSSAQVWNYCVYPKDKKCYSGSYSVCPGTGGELRNDCPYSSSSLAQSKSSSSGGTADNSSSSQNGQGNEQEYDYCVFDVEKNCLSGPLTDCPSGGKLSNTCPYNSSSSAQTGSSSSSSQGISSSSSSGIAGGSSSSSSSSSSSSQGTKNSSSSQIIGQVEGNVFTDPRDGKKIQI

SEQ ID NO: 50249 - DNA, 1578 bp, Unknown
  Obtained from environmental sample
  misc_feature (1)..(1578): n is a, c, g, or t
ttgacgagacgaggcgctcaactgcttgccggcatgctcgagtcgccgcaaatagacaagatcggccacgacctaaagcacctctcaatggcgcttaggagcgagggggttacgttgcgaggcgtctccttcgacgtaatgctggccgcttacgtgatagaccccgggaaacgccgctacgatctggctgaactttcaggcgaacatttgggtgtcgatataaaatccggcgacgattggcgcgacgatagcggattcatcgacccgctctccgacaacacgcctttcgccgacgcggcctgcgccgccctgctcctacgggagaaactccgccccatcatagacgagcgcggctgcgcaaacctattcaaggacatcgaactctcattagaagcggtattggcggagatggagtggaacggcgtgctcatagacaccgagcttctatcccgcctatcctccgaatacgccgccgagatagagcggattacacgcggcatatacgccttcgccggcgttgaattcaacctcaactcgccgaaacaattggcggaaatactcttcggcaagctcggtttgcacggcgggaaaaaaacaaagggcggctcgcagtcgacaagcgtggaagtgctggagggtctggcggccgacaatccggtgattatgtctatacttgactaccgcgaaaagcaaaagctgctctccacctacatagacgcaataccgtcgcaggtgctgccgcaaacggggcgcgttcatacctctttcaatcaagcgataacggccacaggccgcctatcgagcacaaatcccaatttgcagaatatccccatacgcaccgagaacggacgcaaaatcagggaggccttcattgcgccgccgggctgcctgctggtctccgccgactattcgcagatagaactgcggatattggcgcacttctccggcgatccgtctcttgtgcaggcgtttacggacgacaaagacgtccacgcccaaacagcgtcggccatctacggcgtgcatccggaactcgtaacgccggagatgcgccgcgccgccaaaaccataaacttcggcctaatgtacggcatgggccctatcaacctcgccaaacagatcggcatctcctttgcggaagcgaaaagattcatagaatcatatttcaaccaattcccgtctatcagggcgttcatagacacggagatacagaagacgcgcgaccacggctacgcggaaacgatattcgggcgcaaacgctacctgccggagatcaactctatgacccgaaccgtaaaagaggccgccgaacgcacggcgatcaacacgccggtgcaaggaacggcggcggatattataaaggtcgcgatgataaatctatacaaaaagatgccggaggtttggccgcagtccaaaatgttactgcaagtccacgacgaattggtatttgaaactccggaagataacgcggaaggattcgcgctgtgggcgaaaggagaaatgagcggggcgtgcgaacttaaagttcccttaaaagttgacgcgggaataggcagacattggggggaagcgcattaa

SEQ ID NO: 50250 - protein, 525 aa, Unknown
  Obtained from environmental sample
  DOMAIN (144)...(524): DNA polymerase family A
  misc_feature (1)..(525): Xaa is any amino acid
MTRRGAQLLAGMLESPQIDKIGHDLKHLSMALRSEGVTLRGVSFDVMLAAYVIDPGKRRYDLAELSGEHLGVDIKSGDDWRDDSGFIDPLSDNTPFADAACAALLLREKLRPIIDERGCANLFKDIELSLEAVLAEMEWNGVLIDTELLSRLSSEYAAEIERITRGIYAFAGVEFNLNSPKQLAEILFGKLGLHGGKKTKGGSQSTSVEVLEGLAADNPVIMSILDYREKQKLLSTYIDAIPSQVLPQTGRVHTSFNQAITATGRLSSTNPNLQNIPIRTENGRKIREAFIAPPGCLLVSADYSQIELRILAHFSGDPSLVQAFTDDKDVHAQTASAIYGVHPELVTPEMRRAAKTINFGLMYGMGPINLAKQIGISFAEAKRFIESYFNQFPSIRAFIDTEIQKTRDHGYAETIFGRKRYLPEINSMTRTVKEAAERTAINTPVQGTAADIIKVAMINLYKKMPEVWPQSKMLLQVHDELVFETPEDNAEGFALWAKGEMSGACELKVPLKVDAGIGRHWGEAH

SEQ ID NO: 50251 - DNA, 366 bp, Unknown
  Obtained from environmental sample
  misc_feature (1)..(366): n is a, c, g, or t
atgattgttgatgattccagaattatgagaaacaccgtaaaaggtgtgttttccggtgtggagtccgcctgtaattttgttgaagctaaagacggtgaggaagcttttgcgctgctggattcccagcgcgtggatttaattttgcttgactggaatatgcccagattatcgggaattgatttcctgaagcaaatcagggctatggatcagtacaaggatttacccattatcatggtaaccagcgaggcgtccaaaattaacgttatcgaagcgttaaagaacggcgccactgattatattacaaagccgattaaacttgacttgttcaaaagtaaattggcaaaacttcgtttatttaggatataa

SEQ ID NO: 50252 - protein, 121 aa, Unknown
  Obtained from environmental sample
  DOMAIN (1)...(114): Response regulator receiver domain
  misc_feature (1)..(121): Xaa is any amino acid
MIVDDSRIMRNTVKGVFSGVESACNFVEAKDGEEAFALLDSQRVDLILLDWNMPRLSGIDFLKQIRAMDQYKDLPIIMVTSEASKINVIEALKNGATDYITKPIKLDLFKSKLAKLRLFRI

SEQ ID NO: 50253 - DNA, 489 bp, Unknown
  Obtained from environmental sample
  misc_feature (1)..(489): n is a, c, g, or t
atggcagtagaactcaacaattacgtagaaccctttgtggaagtaaccgtcaacacctttaaggaatttgtcggtttagacgtgagcccaaggcatcctcattttctggatccggaaaaaggaatggaatgggacatatcggccgtcatcggcctttccggcgccgtcaagggagccgtaattgtctccatgaaggcggagttggcgattaaactgaccaacattctcgccggcgaggggcatacggaagttgacgccgatgttgtcgacgcgataggtgaaataaacaacatcattgcgggcaacatcaagcccaaagtgccgaacggagaaaagatagttatttctattcctactatcattaaaggaaaagaacattcaatcgcctggcccagcaaacaaacgcggatattgtgcattcctcataaggcttatgagaatgacatatttcacctgatggtggccattgaattggaacctgagaaataa

SEQ ID NO: 50254 - protein, 162 aa, Unknown
  Obtained from environmental sample
  misc_feature (1)..(162): Xaa is any amino acid
MAVELNNYVEPFVEVTVNTFKEFVGLDVSPRHPHFLDPEKGMEWDISAVIGLSGAVKGAVIVSMKAELAIKLTNILAGEGHTEVDADVVDAIGEINNIIAGNIKPKVPNGEKIVISIPTIIKGKEHSIAWPSKQTRILCIPHKAYENDIFHLMVAIELEPEK

SEQ ID NO: 50255 - DNA, 942 bp, Unknown
  Obtained from environmental sample
  misc_feature (1)..(942): n is a, c, g, or t
atgaaaattcaagcattagtttttttagccgttgccgcaagtttgtttgcgcaagaagccacaatcccttgcagagcttcttttgatgctgtaaaaaatatttatccgcgtgactttgcctcagggcgtttttatgcctcaacagaagcgagaatccgcaatttggaagccgtagcaaaagaaagtcgcaacggtgcaatttacgaagcggagttgaaaaactgcgatttggcagtagagcattataaaatgcagctttcaaatgtagcactccgcaaaagcgtagattccttaacccaaagcgatttggctattcatagaagcatttccataataaaagattctcttattgaattgtggagcaacgatgctcacggagctaaatctttgaacgcggctttgaatgaagaacgcaaccgtcttgaaaagctgaataaggagaagttggcggagcttgccgcaaagcagaaagccattgaagatgcgcaaaaagcccttgccgaaaaagattccctgcttgcagcacaaaaagccgaggcacaaaaaaagctggatgccttgagcagtaaagccataagcgtttacagagatgccagaggcacaatcctctccatgagcgatattctgtttgaaactggaaaagcagatttgaaacatgagctaagggaaaatctatcggcaataggtgcaattctccagagcttgctaaccgaatctaaagttattgtggaagggcatactgataatgtaggttctgccgacttcaatcaaaaacttagcgagcaaagagccaaagctgttatgcaatatttaattgaaagaggagttgccgcaaatcgtttgcaatccgtaggctacgggctaacaaaacctgttgcagacaacaaaactgaagaaggtcgtgccaaaaaccgcagggttgaacttgtgatagaaaattaa

SEQ ID NO: 50256 - protein, 313 aa, Unknown
  Obtained from environmental sample
  SIGNAL (1)...(17)
  DOMAIN (209)...(305): OmpA family
  misc_feature (1)..(313): Xaa is any amino acid
MKIQALVFLAVAASLFAQEATIPCRASFDAVKNIYPRDFASGRFYASTEARIRNLEAVAKESRNGAIYEAELKNCDLAVEHYKMQLSNVALRKSVDSLTQSDLAIHRSISIIKDSLIELWSNDAHGAKSLNAALNEERNRLEKLNKEKLAELAAKQKAIEDAQKALAEKDSLLAAQKAEAQKKLDALSSKAISVYRDARGTILSMSDILFETGKADLKHELRENLSAIGAILQSLLTESKVIVEGHTDNVGSADFNQKLSEQRAKAVMQYLIERGVAANRLQSVGYGLTKPVADNKTEEGRAKNRRVELVIEN

SEQ ID NO: 50257 - DNA, 585 bp, Unknown
  Obtained from environmental sample
  misc_feature (1)..(585): n is a, c, g, or t
ttgcgttacagtacgtcgaggtttttgattaactcgtcttccttttttaatagcccatcttcatcttttagcagcttgtcttcatttttgattagctcgtcttcatcttttaatagcccgtcttccttttttaatagctcgtcttcactttttagtagctcgtcttcactttttagtaactcgtcttcactttttagtagctcgtcttcatctttgattagctcgtcttcactttttttgaggatgtcttggttttttattgggttattaagcgtttttgggtgtttttattcttttataatgccttcttcactttctttgaattcggcggtgtctttaattgtttcgtctatgactttgtgtacgcctgcggttactttgggtttgatgttttctatgacgattttgccgtcacgttttccccgctggagggcgttaaagtcacgtttgatttgttttttggtcggttcggctccgtcttcgcctgtgtgggttcctcttgatttgaagaaaacggataaatcgttgaagatggtttcggcggggtcaacacggcgttttgcggcttctcgcactgatgcgtag

SEQ ID NO: 50258 - protein, 194 aa, Unknown
  Obtained from environmental sample
  SIGNAL (1)...(24)
  misc_feature (1)..(194): Xaa is any amino acid
MRYSTSRFLINSSSFFNSPSSSFSSLSSFLISSSSSFNSPSSFFNSSSSLFSSSSSLFSNSSSLFSSSSSSLISSSSLFLRMSWFFIGLLSVFGCFYSFIMPSSLSLNSAVSLIVSSMTLCTPAVTLGLMFSMTILPSRFPRWRALKSRLICFLVGSAPSSPVWVPLDLKKTDKSLKMVSAGSTRRFAASRTDA

SEQ ID NO: 50259 - DNA, 1557 bp, Unknown
  Obtained from environmental sample
  misc_feature (1)..(1557): n is a, c, g, or t
atgcccccaaaaccactcatcatatttttatgcgtaatagccattttctttatttcgttgcttatacctgtaaaaaataacgatgattacagcaaaattttattttcttcgcaaggcgagcttttgcgggtttggctgaataaagatgagcaatatcaatttccaaaaaatgaaaaaatttcggagaaatacaaaacagcggttctgcattttgaagacaaaaggtttaactggcattttggaatagaccccgttgcaataatccgtgccataaagcaaaatgtaaaagcagggaaagttgaaagcggtgcaagcaccataactatgcaggtagcgaggttgaagaaacccaaaaagcgaacatttttcgcaaaacttatggaagcccattttgcctttagaatggaactctggaaaagcaaaaacgaaatttttgcagaatacgcgagtttggctcctatgggcgggaatatagttggggcagaaacggcttgctggagattttttgggcacggggcggaggaaatcacctgggcggaagccgctcttttggctctgcttcccaatcgcccctctgcgttgaatttggaaaaggaaagggaaaaacttttggagcgaagaaataacctgcttaaatcgcttgcaaaagctggttacataagcacggaagttttaaattccgctttgcaagaatccttgccaaaggtgaacgcagactggagattcaaaaccccgcactatgcagaagccgttctctctctattccccaaccaaaacgtttttcacggaacaatagacagcaaaattcaagctcggctggagggacttgcaagaaaatacgggcatagaataagggaatactcaaatgtaaacatatccgttttaataacagaaaccaaaactggaaaaatcataggctacctcggctcgctcgattattacgattcgctctccaaaggaatgatagacggagtgcgtgctaaccgtagcacgggaagtattatgaaaccatttttatacgcacttgcgatggaacgcgggccttacactccggaaagtttaattgatgatgttccaacttggtttaaaggtttctctccccaaaacgcagacaaaagtttcagcgggattttgccttataaagaagcccttgttcgctccctcaatgttcctgcggttaagattttgtcggattacggagttgaggattttcactcttggcttaaaaacgcaggggttgctggtttatcccgctcatcggagagttatgggctttctttgattttaggcggcggagaggcatctttgcaggaacttgttcctctctattcaatgctgatgaacgaaggcaaaagaaccgatttgaaatggctggaagacagtattccccaaaaaaacgaacaattattgcagagcatcacggcttatcatattaaggaaattttgacatcggttaagagaccggattttgagcagtatcatttgcaattcaacaaccatattccagttgctggaaaacaggcactagctatggttcaagagatgcttgggcaatag

SEQ ID NO: 50260 - protein, 518 aa, Unknown
  Obtained from environmental sample
  SIGNAL (1)...(27)
  DOMAIN (292)...(517): Penicillin binding protein transpeptidase domain
  misc_feature (1)..(518): Xaa is any amino acid
MPPKPLIIFLCVIAIFFISLLIPVKNNDDYSKILFSSQGELLRVWLNKDEQYQFPKNEKISEKYKTAVLHFEDKRFNWHFGIDPVAIIRAIKQNVKAGKVESGASTITMQVARLKKPKKRTFFAKLMEAHFAFRMELWKSKNEIFAEYASLAPMGGNIVGAETACWRFFGHGAEEITWAEAALLALLPNRPSALNLEKEREKLLERRNNLLKSLAKAGYISTEVLNSALQESLPKVNADWRFKTPHYAEAVLSLFPNQNVFHGTIDSKIQARLEGLARKYGHRIREYSNVNISVLITETKTGKIIGYLGSLDYYDSLSKGMIDGVRANRSTGSIMKPFLYALAMERGPYTPESLIDDVPTWFKGFSPQNADKSFSGILPYKEALVRSLNVPAVKILSDYGVEDFHSWLKNAGVAGLSRSSESYGLSLILGGGEASLQELVPLYSMLMNEGKRTDLKWLEDSIPQKNEQLLQSITAYHIKEILTSVKRPDFEQYHLQFNNHIPVAGKQALAMVQEMLGQ

SEQ ID NO: 50261 - DNA, 807 bp, Unknown
  Obtained from environmental sample
  misc_feature (1)..(807): n is a, c, g, or t
gtgccgcctccggtttattttacctataattctgaattgctaaaacaggcaaaaaaatttgtctttggccttttaaaaactaacagcaaattcgtagagaatattcaggacatgatagtaaatgatgacgatttaaatgaaaaactaaatgtttcttttaacgaattaagaaaatatcttttaagcattgttgacgatgcaaataatttccagcaggaaaaatatgtcaattattccaagttcattagaatttggaatgacaagtttaaagcggataaaacggcaaaaaaagagtatcctgccgatataagttggcatgtaatacggacatacattgaaggcataagcccggaagattatcttgaaccggaagagtatattggacttgaaaaggatcaaaagaccgtaagtccggaattgtatcaaaaaatttacaaaactgtctgggagtggtacaaacaattaaaagaagagcaaagcttgtgggatgatcaggatttagttcgatatatcattgaaaacgatcttgcaaccccaagattttcgggtattttttgtgacgaatcccaggattttaccagaatagaaatggaactaatataccgtttgtcaattttttcagaaagggatgtttcctttcaacatgtttcgcaaataccttttgcttttgtcggcgatgagctacaaacaataaatcctactggattcaggtgggatgcaattacagcattgttcacggagaaattcatcctttcggtttatcctgataaacataaatttcccgcaaaaccaaatttcaaagagtaa

SEQ ID NO: 50262 - protein, 268 aa, Unknown
  Obtained from environmental sample
  misc_feature (1)..(268): Xaa is any amino acid
MPPPVYFTYNSELLKQAKKFVFGLLKTNSKFVENIQDMIVNDDDLNEKLNVSFNELRKYLLSIVDDANNFQQEKYVNYSKFIRIWNDKFKADKTAKKEYPADISWHVIRTYIEGISPEDYLEPEEYIGLEKDQKTVSPELYQKIYKTVWEWYKQLKEEQSLWDDQDLVRYIIENDLATPRFSGIFCDESQDFTRIEMELIYRLSIFSERDVSFQHVSQIPFAFVGDELQTINPTGFRWDAITALFTEKFILSVYPDKHKFPAKPNFKE

SEQ ID NO: 50263 - DNA, 432 bp, Unknown
  Obtained from environmental sample
  misc_feature (1)..(432): n is a, c, g, or t
atggagtaccctataaacttagagttgacagtaagggtatacaacataaacaagggtcgtaacattgaaatggcgcgccggagcgagacgctcaacggatacggggtatttacggctaaagtccgcgaataccgtaaaaccatgagcctcggacttgcggttgaccgggctacggaagagtgtataaaagagggtattttagtggattacctatcatcccatagaaaggcggttagaaatatgttgacggcagaatggaagttagaagacgcggtcaaggtgagcaggatggaaggcgagaagaggggcgaggagaagggcatggagatcgcggcggagaaaatcgcccgcgccatgaaagaagagggggcggacgtaaacttcatcgccaaagtaaccaatctcactatcgacaccatccagagactgtga

SEQ ID NO: 50264 - protein, 143 aa, Unknown
  Obtained from environmental sample
  misc_feature (1)..(143): Xaa is any amino acid
MEYPINLELTVRVYNINKGRNIEMARRSETLNGYGVFTAKVREYRKTMSLGLAVDRATEECIKEGILVDYLSSHRKAVRNMLTAEWKLEDAVKVSRMEGEKRGEEKGMEIAAEKIARAMKEEGADVNFIAKVTNLTIDTIQRL

SEQ ID NO: 50265 - DNA, 456 bp, Unknown
  Obtained from environmental sample
  misc_feature (1)..(456): n is a, c, g, or t
ttgggtatattnggcggtgttatagacttattttcgcgcatgtgggtaggatgggacataagcggcgacntaggcgccgggatggttctgaacgcgctgaaccgcgcggtaaagagccgcggcttgcaatccggtgcgatgattcataccgatcagggcatccaatacgccagcgacgcgttccgggaagcgttacggaagcacggtttcgtccaaagcatgtcccgcaggggtaactgctgggacaacgcggtcgcggaatcattcttccgcatttataagacggaactggcgtatcaccgtaaattcaaggacttagcagatgtttggcataaaagttttgagtatatcgagtgttactataaccggaaaagaatccatggaagtctaaattacttgactccggttgagttcgaaaaccagttttataagaaggacgtcaagagggtggggtaa

SEQ ID NO: 50266 - protein, 151 aa, Unknown
  Obtained from environmental sample
  DOMAIN (1)...(140): Integrase core domain
  misc_feature (1)..(151): Xaa is any amino acid
MGIXGGVIDLFSRMWVGWDISGDXGAGMVLNALNRAVKSRGLQSGAMIHTDQGIQYASDAFREALRKHGFVQSMSRRGNCWDNAVAESFFRIYKTELAYHRKFKDLADVWHKSFEYIECYYNRKRIHGSLNYLTPVEFENQFYKKDVKRVG

SEQ ID NO: 50267 - DNA, 459 bp, Unknown
  Obtained from environmental sample
  misc_feature (1)..(459): n is a, c, g, or t
ttgcaaaagctcctgcacaggacgattgaaaaagtgacaaaagacaccgcaacccttaaggttaacaccgcaatcagcgcgatgatgatctactcaaccgagcttgccaaattagctgaaattccgcgcgccatgtgggagccgtttgtgataatggcgggggcttatgctccgcaccttggcgaggaactatgggagaaactaggatacaaaaaatctgtttccctaagccaatggccctcttttgatccaaaattgactgtttttgacgaagtgaccattgtagtccaggtgggcggtaaaatccgcgagaaatttaccgccgccgccggaacggcgaaagaagagcttgaaaaaacagctcttgccctgcccggaacgcaaaaatggcttgaggggcagacaatagcgaaggttattacagtaccggataaattagtgaatattgttttgaaataa

SEQ ID NO: 50268 - protein, 152 aa, Unknown
  Obtained from environmental sample
  DOMAIN (1)...(123): Anticodon-binding domain
  misc_feature (1)..(152): Xaa is any amino acid
MQKLLHRTIEKVTKDTATLKVNTAISAMMIYSTELAKLAEIPRAMWEPFVIMAGAYAPHLGEELWEKLGYKKSVSLSQWPSFDPKLTVFDEVTIVVQVGGKIREKFTAAAGTAKEELEKTALALPGTQKWLEGQTIAKVITVPDKLVNIVLK

SEQ ID NO: 50269 - DNA, 864 bp, Unknown
  Obtained from environmental sample
  misc_feature (1)..(864): n is a, c, g, or t
gtggaggtcaaattgattagaggatggtatactgccgccagcggaatgcgcgcgcagcaatggcgattggacgctgtggctaataaccttgccaacgtgaacaccgacggttataaacgggacgtggcggcttttaaggcattcccggaactgcttatacgcaggatggacgatgacggggtctatttacaccccttcggatccggcgacgcggcccccatcattggaaaaatgggcaccggggtcgagttaaacgagctttataccgcctttgaacaaggctcgttcaaggaaacaaactctgattttgacattgcactggacgggaaaggcttttttgccgtttccacgccctggggcgagcgctatacccgcaacggctcttttcagcttggcaaagaaggctatctggaaaccaaagaaggttatccggtgcttggggaatacggccccatcaaggtaaaagccaacaatttcctggttgacaaggacggcagggtatgggtgaacgcggcaatcagcgatgacccggaagtaatggtaagcgtcacaagcaatacatgggaagacaccgtacaacttgacaccctcaaactcgtcgagttcgagcttgaccgctaccttgaaaaacagggcaccagcctgtaccgggaaagtgacacatcaggaccggccactataattgagaaagggaacaggccanaagttatacagggctttgtcgaggcggcgaatgttgaccccgtggtcgagatggtacagatgatcgaggtaaaccgctcttacgaggcgaatcagaaggttatccagtcggaagattccatgctgggtactttgataaaccaagtggcaaaattcggttaa

SEQ ID NO: 50270 - protein, 287 aa, Unknown
  Obtained from environmental sample
  DOMAIN (9)...(39): Flagella basal body rod protein
  misc_feature (1)..(287): Xaa is any amino acid
MEVKLIRGWYTAASGMRAQQWRLDAVANNLANVNTDGYKRDVAAFKAFPELLIRRMDDDGVYLHPFGSGDAAPIIGKMGTGVELNELYTAFEQGSFKETNSDFDIALDGKGFFAVSTPWGERYTRNGSFQLGKEGYLETKEGYPVLGEYGPIKVKANNFLVDKDGRVWVNAAISDDPEVMVSVTSNTWEDTVQLDTLKLVEFELDRYLEKQGTSLYRESDTSGPATIIEKGNRPXVIQGFVEAANVDPVVEMVQMIEVNRSYEANQKVIQSEDSMLGTLINQVAKFG

SEQ ID NO: 50271 - DNA, 573 bp, Unknown
  Obtained from environmental sample
  misc_feature (1)..(573): n is a, c, g, or t
atggcgtgcagaggcatgagcgtggacgcgattcattttcacgcgtatccttatacttcgcttgaggcaaaacaaaaagtaattcagctttcgcgtattatcggcgcttattgcataggagtacgcctttatacattgaactttaccaaagttcaacagcgcataaaggaacgcactccggcagaatggactactgttatattgcgtatggccatgatggaggcggcgcaaaaagccgccggtaaaataaaaagcaagtgccttatcaccggagaaagtctgtcgcaggtggcaagccagactatagaaaatttacgctgtacagaaagcagaataaaacttcctgtccttcgccccttaatcggcatggacaaggaatacatcatcaggaaagcggaaaaaatcggcacctatgacgtatccatactgccgcatgccgactgctgtacgctgttttctccggaacaccctattcttcacggcgacgttgaaaaagccctcgctatttacggctctcttgaaattgagccgctgattgacgacgcgctgggcagctatgaaatgtacgaataa

SEQ ID NO: 50272 - protein, 190 aa, Unknown
  Obtained from environmental sample
  DOMAIN (1)...(175): Thiamine biosynthesis protein (ThiI)
  misc_feature (1)..(190): Xaa is any amino acid
MACRGMSVDAIHFHAYPYTSLEAKQKVIQLSRIIGAYCIGVRLYTLNFTKVQQRIKERTPAEWTTVILRMAMMEAAQKAAGKIKSKCLITGESLSQVASQTIENLRCTESRIKLPVLRPLIGMDKEYIIRKAEKIGTYDVSILPHADCCTLFSPEHPILHGDVEKALAIYGSLEIEPLIDDALGSYEMYE

SEQ ID NO: 50273 - DNA, 657 bp, Unknown
  Obtained from environmental sample
  misc_feature (1)..(657): n is a, c, g, or t
atgaaatatcttaataacaaagcatggtggcggcatgtcggaaaaaccttaaggtactcgctttatgtgtctacccatcctcttgacggattttgggatttaacccatgaaaaacgcggttctattgccgccgcgaatattattgcggtaaccgccgttattgtggaagtattgcgcttaacgcttacaaattttcaatttgttacaattaatatggaatattttaactcggttattgttgcgctccgtattcttctgccaatcgggttgtggactgtggcaaactggagccttacgacacttatggacggcaagggaagaatgtttgaaatttacatgggtgtttgttatgcgcttactccttatgtgataataaacgttatcatgatagtgttaagccagtttattacattcgaggaaggcgcgatttactgggtgcttgccggtttttcggcattatggacgggcttgttaatacttgcggcaatgatgatgattcacgattacagtattattaaaaccgtgctttccagttttttaaccgttataggaatgggagtaatggtgtttgtttttgtaatctttttcagccttgtaagcgacgcggtcgcttatttcatatcgttgtataaagaaatattgttcagggtggtatag

SEQ ID NO: 50274 - protein, 218 aa, Unknown
  Obtained from environmental sample
  misc_feature (1)..(218): Xaa is any amino acid
MKYLNNKAWWRHVGKTLRYSLYVSTHPLDGFWDLTHEKRGSIAAANIIAVTAVIVEVLRLTLTNFQFVTINMEYFNSVIVALRILLPIGLWTVANWSLTTLMDGKGRMFEIYMGVCYALTPYVIINVIMIVLSQFITFEEGAIYWVLAGFSALWTGLLILAAMMMIHDYSIIKTVLSSFLTVIGMGVMVFVFVIFFSLVSDAVAYFISLYKEILFRVV

SEQ ID NO: 50275 - DNA, 1005 bp, Unknown
  Obtained from environmental sample
  misc_feature (1)..(1005): n is a, c, g, or t
atgaaccccgttttcagggagttctatagcgagcgcagcgttatccttgaagaaagaaaacaaaccttggaatcaaggggcgggggcttggggcgcgtaaacgagcactttaacgccatgaactgggtcgcggctccgtacacatgggaagtgattggctggcccagcgacatctcctacgtgaccagggaggacgcaaatcagttttacgccacatactatgcgccaaacaacatcacagccatcttggtgggcgacttcaaaaccaacgacgccattgcgctgatggaaaaatattttgagcgcatccctggcaatccaaggggcgtgccggaaatatatacagaggaacctccaagggttggccaaaagcgaatgtacgccgtgacagaggcgcagcccagcatcaggatcaatttccatgctgtttcagcagtccacaaagacgctcccgcgcttaccatattggcttcaatccttggtggcggtggaggttttggccggggcggcggtggaggaagttcctctggaaggctctccaaaagtttagtcttggaacaaggcgccgccctttccgcctcggcgaactttagcggcatgaaatatggcgggtcattttatttgagcgcgtcgccgacgccgggcaagacccccgaagagatggaaccgctcctctacgccgaaatccaaaaaatagttgacgaaggggtgaccgacgccgagctgcaacggataaagatatccagagaaaattccatgctgatgatgcaggaaagcaacaccggcataaggtctgtcctcgaatccgcagaagccactggcacataccaggatttcttggacagcattacaaagttcaaggccgtcaccaaagaagacgtccagcgcgtggccaaggagtacatcgtgaaagacagggccaacgttttggtaactacccaagccgcgccagccgctggtggccgccgtgcaaatccatctactccatctagggaggcaaactaa

SEQ ID NO: 50276 - protein, 334 aa, Unknown
  Obtained from environmental sample
  DOMAIN (60)...(249): Peptidase M16 inactive domain
  misc_feature (1)..(334): Xaa is any amino acid
MNPVFREFYSERSVILEERKQTLESRGGGLGRVNEHFNAMNWVAAPYTWEVIGWPSDISYVTREDANQFYATYYAPNNITAILVGDFKTNDAIALMEKYFERIPGNPRGVPEIYTEEPPRVGQKRMYAVTEAQPSIRINFHAVSAVHKDAPALTILASILGGGGGFGRGGGGGSSSGRLSKSLVLEQGAALSASANFSGMKYGGSFYLSASPTPGKTPEEMEPLLYAEIQKIVDEGVTDAELQRIKISRENSMLMMQESNTGIRSVLESAEATGTYQDFLDSITKFKAVTKEDVQRVAKEYIVKDRANVLVTTQAAPAAGGRRANPSTPSREAN

SEQ ID NO: 50277 - DNA, 438 bp, Unknown
  Obtained from environmental sample
  misc_feature (1)..(438): n is a, c, g, or t
atgattacgtctacttccgcctgcatcgcgatgcgggcaagaagctcattgtacggctcgcctgagactgagaaaatcggcaatttctgcgacactaccaacgtgttgaacagatcgatcatcgggatgccggtgcggatcatgttacgtggaataatgcgctgggagggatttaccgaaggaccgccaatcgggattttattttcagttaattcggggccgttatcgcgcggtttgcctgaacctgtaaataccctgcccatcaggttttctgaaaacgccacctgcatcgggcggcccaagaaacggattgtatcgcctgttgagataccgcgaccgcccgcgaaaacctgtagcgataccgtatcgccctgcaacctgtttacttcggcaagagatgtgccgaataccgtatcgacttccgccaagtcaccgtaa

SEQ ID NO: 50278 - protein, 145 aa, Unknown
  Obtained from environmental sample
  SIGNAL (1)...(19)
  misc_feature (1)..(145): Xaa is any amino acid
MITSTSACIAMRARSSLYGSPETEKIGNFCDTTNVLNRSIIGMPVRIMLRGIMRWEGFTEGPPIGILFSVNSGPLSRGLPEPVNTLPIRFSENATCIGRPKKRIVSPVEIPRPPAKTCSDTVSPCNLFTSARDVPNTVSTSAKSP

SEQ ID NO: 50279 - DNA, 1335 bp, Unknown
  Obtained from environmental sample
  misc_feature (1)..(1335): n is a, c, g, or t
atggaaggggcctttacccacaggatcatggttcctttcaatctgtacggcaattatacagtgtcgaaaatctcaaaagccggctcttacactattaaagacacggccgccgagcttaaagacgaaaaaggcaagactgttaccgtaaaattcagcttccgttggcccgtaaaacgcgccgtggactgttatgaggaaaggcttaaaccggaagaacccatggttacgagggtacgccttatcgacaccttcttcccggttgcccgcggcggcacctactgtatccccggcccattcggcgcgggcaagacggtactacagcagataaccagccgtttcgccgacgttgacatcgttatcgtagcggcctgcggtgagcgcgcaggtgaggttgttgagaccctcaaagaattcccagaacttaaagacgaaagaacagggcgctccctcatggaacgcaccattatcatttgtaacacatcctcaatgcccgtagccgcccgcgaagcttctgtatacacggctgtaaccctcgccgagtactacaggcagatgggacttaacgtcctgcttctcgccgactcgaccagccgctgggcgcaggccatgcgcgaaatgtccggccgccttgaggaaataccaggtgaggaagccttcccggcgtaccttgaatcgacgatcgccagcttctacgaaagggccggtatcgtaaaacttaaagacggcagccttggctccgtaacaatcggcggaacggtcagcccggccggcggtaactttgaagaaccggtaacccaggccaccctgaaagtagtcggggcttttcacggcctttccagtgagcgttcagatgcgcgtaaattacccgctattcacccgctggattgctggtcaaaatacaagggaatcattaaaagtgaaaaagtcggctatgcccacggttttatgcgtcgaggtacagaagttgaacagatgatgaaggtcgtcggtgaagaaggaaccagcatcgaagattacatcatctacctgaaaggtgatttgatcgactcggtgtactttcagcaaaactcatttgacgaagtggacgcggcggttaagcctgatagacaaaaatatgtctttgccaaattgttgtttattcttggttctaaatttacttttacggacaagaatgaagcgcgtacttggtttaacaaactcaggcaaaaattcctcgattataacggcagtccgtggaagagcgagcgttttgacaaacttgaatccgaaattgattcggcggtaaagggtcaatcaaagggtcttgataaaacggccgaaaaaattatttattag

SEQ ID NO: 50280 - protein, 444 aa, Unknown
  Obtained from environmental sample
  DOMAIN (76)...(298): ATP synthase alpha/beta family, nucleotide-binding domain
  misc_feature (1)..(444): Xaa is any amino acid
MEGAFTHRIMVPFNLYGNYTVSKISKAGSYTIKDTAAELKDEKGKTVTVKFSFRWPVKRAVDCYEERLKPEEPMVTRVRLIDTFFPVARGGTYCIPGPFGAGKTVLQQITSRFADVDIVIVAACGERAGEVVETLKEFPELKDERTGRSLMERTIIICNTSSMPVAAREASVYTAVTLAEYYRQMGLNVLLLADSTSRWAQAMREMSGRLEEIPGEEAFPAYLESTIASFYERAGIVKLKDGSLGSVTIGGTVSPAGGNFEEPVTQATLKVVGAFHGLSSERSDARKLPAIHPLDCWSKYKGIIKSEKVGYAHGFMRRGTEVEQMMKVVGEEGTSIEDYIIYLKGDLIDSVYFQQNSFDEVDAAVKPDRQKYVFAKLLFILGSKFTFTDKNEARTWFNKLRQKFLDYNGSPWKSERFDKLESEIDSAVKGQSKGLDKTAEKIIY

SEQ ID NO: 50281 - DNA, 813 bp, Unknown
  Obtained from environmental sample
  misc_feature (1)..(813): n is a, c, g, or t
gtgaacagaatgctcagtttcgaagcatataaaatgcgcatggagacagggctctcttttatcgaatttaattaccagcttttacaaagctacgactttctggagctttaccgccgtcacggctgccgtctgcaaatcggcggggatgatcaatgggggaacatagtcgcgggcgtagaactgatacgccgcatcgagggtgcggaagttttcgggcttaccttcccgcttgttacgaccgcggacggcaagaaaatgggcaagaccgaaaaaggcgcgctcttccttgaccccgctattaccgccccttacgaatttttccagtactggcgcaatgtgcaggatcaggatattctccgctttttgttgatgttcacttttctgcccgttgatgaatgtaacgcgctatgcgcccaagacaaaaatcccaacgacgcgaaggagcggcttgcgtgggaagtaacttctcttattcacggcaaagacgaggcggataaggcactaagcggcgcaaaggcggctttcggcggcggcggcgataaatcggccatgccgaacaaacagcttgcccgctctcaatttgaagccggctacaatgtcgtagatctttttttcgacgcgggacttgtttccacaaagagcgaaggccgccgccttgttgaccaggggggggcttttgtttcctcagcgaacggtgaattttcgggaattaattctccggcggcggtaataggcgcggacaggctgaatacagagggagaattgatattacgagccggaaaaaagaagttttgtctggttattgcaaagtaa

SEQ ID NO: 50282 - protein, 270 aa, Unknown
  Obtained from environmental sample
  DOMAIN (1)...(176): tRNA synthetases class I (W and Y)
  misc_feature (1)..(270): Xaa is any amino acid
MNRMLSFEAYKMRMETGLSFIEFNYQLLQSYDFLELYRRHGCRLQIGGDDQWGNIVAGVELIRRIEGAEVFGLTFPLVTTADGKKMGKTEKGALFLDPAITAPYEFFQYWRNVQDQDILRFLLMFTFLPVDECNALCAQDKNPNDAKERLAWEVTSLIHGKDEADKALSGAKAAFGGGGDKSAMPNKQLARSQFEAGYNVVDLFFDAGLVSTKSEGRRLVDQGGAFVSSANGEFSGINSPAAVIGADRLNTEGELILRAGKKKFCLVIAK

SEQ ID NO: 50283 - DNA, 381 bp, Unknown
  Obtained from environmental sample
  misc_feature (1)..(381): n is a, c, g, or t
ttgcaaaatgcaattattgtacagtcgcaatttacggattgctacaaacacattgaccaaaatacttttgtgtattttgatccgccgtatcggccaattagccaaacatcaagttttacatcttatataggcagtgtttttagcgacaagcagcaaattgaactggcaaatttttatcgtaaattagaccatgaaaaaggcgcaaaattaatgttgtcaaattcagagactcaaaatgataatcctaatgatgttttttttgaaagggcttatcaaggatacaatatatataaagtatctgcttccagagctgtaaattgtaagggaaacaaacggggtaaaattaatgaattgctaataataaattataacactttttaa

SEQ ID NO: 50284 - protein, 126 aa, Unknown
  Obtained from environmental sample
  misc_feature (1)..(126): Xaa is any amino acid
MQNAIIVQSQFTDCYKHIDQNTFVYFDPPYRPISQTSSFTSYIGSVFSDKQQIELANFYRKLDHEKGAKLMLSNSETQNDNPNDVFFERAYQGYNIYKVSASRAVNCKGNKRGKINELLIINYNTF

SEQ ID NO: 50285 - DNA, 1188 bp, Unknown
  Obtained from environmental sample
  misc_feature (1)..(1188): n is a, c, g, or t
atgaggaatattatgaacaaagcgtacattgcggcgcttgtcagaggcgggtgtattgatcttgcggggaagccgcagaccgttgtgtgcgaacccgcagcgcagggaaaaattcccgccggtgctatgagggcggaaattgcgccggaggatgacgagggcaaaaccgcagaaaagctccgcgccgcgtatgcagtgtggaagaaggagaaccgcgcggaaaaccacgcagccgaaggagaagttttcctgccatcctgcgttgcattatacattgatggaaagccgaatggtttgtactggatagataatgattacgattccgccaaaaagcggctaacgaaacgcaacgattcccccagaatcgagaaatccgccgccacggcaacggttgtcaatgccgccgaacgggctgccgtggtaaaaaaccgcataagtctggtgacaggcggagcacagggcataggcgaggaaattgtccgtaaccttgcctcggccggggcgcttgtctttatcgccgaccttaatcttgaaggcgctcagaaactggcggaacatatcaacgcggcggaaaacaggacggcggctctgtctatccaggtgaatgtggcagacgaagcttcggttcaggcaatgttcgacaagattgccgaaaccgcaggcggccttgatctctgcgtcagtaatgccggtgttctcaaggccggcagcgtgctggagcaggaactagcggattttaaatttgttacagacattaactacacaggtttttttattatcagcaaattcgcgggccggcttctgcgggcgcagcattataccgcgcctgactggaagaccgacattatacagatcaattcaaaatcggggcttgaaggttcaaataaaaacggcgcgtatgcgggcggcaaattcggcgggctgggtcttgtagcaagttttgcaatggaactggtggaatacaacatcaaagtgaacgcagtctgtccgggcaattttctggacggccccctctggtctcaccctgaaaagggcctgttcgcccaatacctgaacaccggcaaagttccgggggctaaaaccgtagcggatgtccgcgctttttacgaatccaaagtccccatgaagcggggctgtaccggcaaagacttttttggcgcctttttttacatcatggaacaggaatag

SEQ ID NO: 50286 - protein, 395 aa, Unknown
  Obtained from environmental sample
  DOMAIN (144)...(319): short chain dehydrogenase
  misc_feature (1)..(395): Xaa is any amino acid
MRNIMNKAYIAALVRGGCIDLAGKPQTVVCEPAAQGKIPAGAMRAEIAPEDDEGKTAEKLRAAYAVWKKENRAENHAAEGEVFLPSCVALYIDGKPNGLYWIDNDYDSAKKRLTKRNDSPRIEKSAATATVVNAAERAAVVKNRISLVTGGAQGIGEEIVRNLASAGALVFIADLNLEGAQKLAEHINAAENRTAALSIQVNVADEASVQAMFDKIAETAGGLDLCVSNAGVLKAGSVLEQELADFKFVTDINYTGFFIISKFAGRLLRAQHYTAPDWKTDIIQINSKSGLEGSNKNGAYAGGKFGGLGLVASFAMELVEYNIKVNAVCPGNFLDGPLWSHPEKGLFAQYLNTGKVPGAKTVADVRAFYESKVPMKRGCTGKDFFGAFFYIMEQE

SEQ ID NO: 50287 - DNA, 723 bp, Unknown
  Obtained from environmental sample
  misc_feature (1)..(723): n is a, c, g, or t
ttgcctgacggtgttcaaaccaataacggatttgtaatctgcggccaggatattatcctggatgttttgtccaattacatgaggtcgcatggcatacctgccctgagggcgtttatcggaagctatgacgggcttacgcttttatataaaaacaaggtaaacgtagcctcttcccatctttgggacagcgggacggacgaatacaacatcccatatattaaaaggcttttacccggcacctccgctcttgtgattcacctgacttatcgtatgcagggactatacgtccaaaaaggaaatccaaagaacataaaaagctgggaagatttcggacgtgatgatattaccatgattaaccgcgaatacggagccggatcaagggtgctcttggatgaaaaccttaaactgcttgagatattcggcaattccattaaaggttactcgacagaagggcaaacccatttggctgtcgcaagttcggtttcaggcggggaagccgatgtagcggtagggattgaaaaaattgccagacaggttgataacattgattttatccctttaaaaaaagaacgttacgatctggttgttaaaaaagaacatatcaattcgcatgaagtcagtaccatgatggatattattaattccgccgccttcaaacaggaattcgcgaatataggcggttacgatataagcggcatgggaaagattatcgctgaaatctaa

SEQ ID NO: 50288 - protein, 240 aa, Unknown
  Obtained from environmental sample
  misc_feature (1)..(240): Xaa is any amino acid
MPDGVQTNNGFVICGQDIILDVLSNYMRSHGIPALRAFIGSYDGLTLLYKNKVNVASSHLWDSGTDEYNIPYIKRLLPGTSALVIHLTYRMQGLYVQKGNPKNIKSWEDFGRDDITMINREYGAGSRVLLDENLKLLEIFGNSIKGYSTEGQTHLAVASSVSGGEADVAVGIEKIARQVDNIDFIPLKKERYDLVVKKEHINSHEVSTMMDIINSAAFKQEFANIGGYDISGMGKIIAEI

SEQ ID NO: 50289 - DNA, 1608 bp, Unknown
  Obtained from environmental sample
  misc_feature (1)..(1608): n is a, c, g, or t
ttgnnnnggcatgacagattggccgagaagcccatgcttcacaccgcaaaaatgatcagagaatattatccgaagtataaaaatcacaaaatcgcaatgatttctccatgtatcgccaaacgccgtgagtttgacgagacggaactcgttgaatacaacataacaatgattgcgttaaaaaattattttaagaaggaaaatataaatttaacttccttttcaacagtagaatataacggcccgattgccgagcgtgcagtcggattttcaagtcccggcggattgcttgacactgcagaacgttttgtacctggcatacggagaaacacagaaaaaatcgaaggagtacacagcatatacgcatacttgatagaaactgcgcaagcattaaaagaccctgatgaagaattacctctgttaattgactgcttaaattgcgaaaaaggctgtaacggcggacccggtacgggcaacagccacatttcaataaacaaacttaaaaaaccaatccgcaaacgaagcgcagaacttgaacaacaaatcgcacccaaacaaaaaaaagaacaatacaaaaaatatcacaaactgctgaataaatactggaaaccaggattatatgatcgcaattaccttaacctttcaggaaactatgacaagaaaacacctaacgaagatgaactgaacgacatctaccgtaaaatgaaaaagttttcaaaagaagatatattcgattgcggagcttgcggatataaaatgtgcagaagaatggcaatggcaattttcaacggcgttaataaacctgaaaattgcgctcattatacccttgcagtactcgcagaaaaaaccagtaccgaagaattaaaccgccaattacaggaacacattagccaagcgtcagtacttattgacggaataagtaaatcggtaaaagatttaaacgccattatcggttcacaggctgaagcagtagatcattcggcggcggaaactgaaggaataatcacatcaattaaagaaacttcggaagtctcaaagaaacaaaaagaatcaatacaagaattgatagaagttgccgaaaaaggcaaggaatccatgcaaaaaacaattcaatcaattaaggagatttcagaatctgttgaaggcgtaagttccgcaattcaaataatcgcttcaatagcggcaaatacaaacctgctctccatgaatgcggcaattgaagccgcccacgccggagatgccggaaagggatttgcggtagttgccggagaaatacgccgtctttcggaaacaaccagagaaaattcagtaaatatttcccatacactaaaaaatatcgtcagcggaataacaataacttcaaaacagtcaggtgaaaccgacagccggataattcaaatgtcaaaagagataaacggatttgcgaaaacaatgtcgtcttttattaacacctttaatgaattaacagcgaaaagcgccagtattacagactctcttgaaagtcttaaagagcaaagctcggcagttaaaacaagttatgcgcaaatgattgaaatgacgcagaaacttaccacagcaatgaaagaattatcggacttgtcaaaaagataa

SEQ ID NO: 50290 - protein, 535 aa, Unknown
  Obtained from environmental sample
  DOMAIN (243)...(273): Putative Fe-S cluster
  misc_feature (1)..(535): Xaa is any amino acid
MXXHDRLAEKPMLHTAKMIREYYPKYKNHKIAMISPCIAKRREFDETELVEYNITMIALKNYFKKENINLTSFSTVEYNGPIAERAVGFSSPGGLLDTAERFVPGIRRNTEKIEGVHSIYAYLIETAQALKDPDEELPLLIDCLNCEKGCNGGPGTGNSHISINKLKKPIRKRSAELEQQIAPKQKKEQYKKYHKLLNKYWKPGLYDRNYLNLSGNYDKKTPNEDELNDIYRKMKKFSKEDIFDCGACGYKMCRRMAMAIFNGVNKPENCAHYTLAVLAEKTSTEELNRQLQEHISQASVLIDGISKSVKDLNAIIGSQAEAVDHSAAETEGIITSIKETSEVSKKQKESIQELIEVAEKGKESMQKTIQSIKEISESVEGVSSAIQIIASIAANTNLLSMNAAIEAAHAGDAGKGFAVVAGEIRRLSETTRENSVNISHTLKNIVSGITITSKQSGETDSRIIQMSKEINGFAKTMSSFINTFNELTAKSASITDSLESLKEQSSAVKTSYAQMIEMTQKLTTAMKELSDLSKR

SEQ ID NO: 50291 - DNA, 342 bp, Unknown
  Obtained from environmental sample
  misc_feature (1)..(342): n is a, c, g, or t
gtgacaaatacaatgcaaggagaggaaaagatgagaaagaaaagtttagaaaggcgtgtttacacgaaggaattcaaggccgaagcagtagcattggctgagaagcgggaaaaaccaataagccagattgctaaggatctgggggtcagggagaagctactgtaccgctggatgcaggtgtcacggaagacggcaggaagcggcatacaagcattccccggacacggacgcccccgggacgcggagttagcccgcctgcggaaagaggttaaggcactacgggatgcgaatgaaatcctaaaaaaagcggcggtcatcttcgcgcaaggggaaccccagtaa

SEQ ID NO: 50292 - protein, 113 aa, Unknown
  Obtained from environmental sample
  DOMAIN (18)...(100): Transposase
  misc_feature (1)..(113): Xaa is any amino acid
MTNTMQGEEKMRKKSLERRVYTKEFKAEAVALAEKREKPISQIAKDLGVREKLLYRWMQVSRKTAGSGIQAFPGHGRPRDAELARLRKEVKALRDANEILKKAAVIFAQGEPQ

SEQ ID NO: 50293 - DNA, 1182 bp, Unknown
  Obtained from environmental sample
  misc_feature (1)..(1182): n is a, c, g, or t
atgtctcacaactatttgttcacttccgaagcagtttcaccggggcatccagacaaagtggctgaccaaatctccgatgctatccttgacgctatgctagctcaagaccctaagagcagagttgcatgcgaaaccctagtcagcacaggccttgtggtggtagctggcgagataacctcaaaagcaaatgtggactatcaaaaagaaattagaaacaccataaaagaaataggctatacagaaacgggaataggttttgacgcggatagctgcgcggttatggtagctctggacaagcaaagcccagacatcgcgcaaggagttaacgctgccgctgccgaaggcaaagacactgcggagcagggtgctggcgaccaaggcatgatgttcggttatgcttctgacgaaacaccagagcttatgccgctgcctattttcctagctcacaagttgatggagaatatagtttccctgcgtgaaaaaggagttttaaaatggctgcgccctgatgcaaaaagccaagtcaccgttgaatacaataaatttcaagagcctgtacgtgtggataccgttgtaatttcaactcagcacaagcctgatataacccacgcaaaaatcaaaaaagaaattatcgaaaagctcatcaaaaaaacaatcccggcaaaacttttagacaaaaaaactcgctatttggtaaacccaactggaaaatttgttgttggcggccctcatggtgatagcggcttaacgggacgtaaaataatagttgatacttacggcggcatgggcaggcacggcggcggtgcattcagcggcaaagacccatcaaaggtggaccgctctgcggcttatgcggctcgctatgttgcaaagaatatagttgctgcaaaacttgcaaaaagatgcgaagtacaggtagcttacgctataggctacccagacccagtttccataaatgtaaatacatttggcacaggcaaaatcggcgaccataaattggaagcccttgtacgcaagcactttgacctaaaacccgcagccataattaaacatttggaattgctaaaaccgggctacaaattaacggcaaagcacgggcattttggtcacaaaggagctcgtttcacttgggaaaaaaccgacaaggcagaagccctgaaaagaagcgcacaaaatatatga

SEQ ID NO: 50294 - protein, 393 aa, Unknown
  Obtained from environmental sample
  DOMAIN (3)...(102): S-adenosylmethionine synthetase, N-terminal domain
  misc_feature (1)..(393): Xaa is any amino acid
MSHNYLFTSEAVSPGHPDKVADQISDAILDAMLAQDPKSRVACETLVSTGLVVVAGEITSKANVDYQKEIRNTIKEIGYTETGIGFDADSCAVMVALDKQSPDIAQGVNAAAAEGKDTAEQGAGDQGMMFGYASDETPELMPLPIFLAHKLMENIVSLREKGVLKWLRPDAKSQVTVEYNKFQEPVRVDTVVISTQHKPDITHAKIKKEIIEKLIKKTIPAKLLDKKTRYLVNPTGKFVVGGPHGDSGLTGRKIIVDTYGGMGRHGGGAFSGKDPSKVDRSAAYAARYVAKNIVAAKLAKRCEVQVAYAIGYPDPVSINVNTFGTGKIGDHKLEALVRKHFDLKPAAIIKHLELLKPGYKLTAKHGHFGHKGARFTWEKTDKAEALKRSAQNI

SEQ ID NO: 50295 - DNA, 642 bp, Unknown
  Obtained from environmental sample
  misc_feature (1)..(642): n is a, c, g, or t
ttgggaaaaaaccgacaaggcagaagccctgaaaagaagcgcacaaaatatatgaaaaaaataatcccccttattctgctggcatctgttgcttttgccgccaaagataccatttcatttgcggcagtgggcgacatcatgatggggctgaactaccccaatagtgcaccagttcttccgccgcaagacggagagcttacatttgcaagcgtaaaagaagttctgaaaaacgcagacttgacaattggcaatttggagggtgttttgctggattctggcggcactgccaagcaatgctcaaaccccgatgtttgttatgtttttagaatgccggagaaatacgcagggcttttggttgatgcaggctttgaccttatgagcgttgcaaataatcactctggggattttggcgaggctgggcgcaaaagaacgcaggaaactctcaagaaagtgggaataggctttgcgggttttgaaggcttggcagagacgtatatattggagagggatggcattcgctatggttttgtggcatttgcacccaacaacggaactgtgcgctttggcgatttagctaaggcaaaaagtttgatttccgacctgagaaaaaatccgatattgttattgttagtatgcacatag

SEQ ID NO: 50296 - protein, 213 aa, Unknown
  Obtained from environmental sample
  misc_feature (1)..(213): Xaa is any amino acid
MGKNRQGRSPEKKRTKYMKKIIPLILLASVAFAAKDTISFAAVGDIMMGLNYPNSAPVLPPQDGELTFASVKEVLKNADLTIGNLEGVLLDSGGTAKQCSNPDVCYVFRMPEKYAGLLVDAGFDLMSVANNHSGDFGEAGRKRTQETLKKVGIGFAGFEGLAETYILERDGIRYGFVAFAPNNGTVRFGDLAKAKSLISDLRKNPILLLLVCT

SEQ ID NO: 50297 - DNA, 357 bp, Unknown
  Obtained from environmental sample
  misc_feature (1)..(357): n is a, c, g, or t
atggaattcaagaaatttaaccttcatcctgacttgcaaaaaggcatagatgaagccggatatataaactgtatgcctgttcaggagcaggtattatcccatgccttcggcgaaggctttgcttcgcaagactgtcatgcttcgcaagacttatacgtccaatcccagaccggtacgggtaaaaccgccgcttttcttatcgtcattttccagcgtatgctgacagaagatcaaatattttcaaagaaagcccttattatggcccccacaagggagctggccgtacagattgaggaagaggcgaaaatactgggcaagtatctgccttttagacaggaagtttttacggcggcgtag

SEQ ID NO: 50298 - protein, 118 aa, Unknown
  Obtained from environmental sample
  misc_feature (1)..(118): Xaa is any amino acid
MEFKKFNLHPDLQKGIDEAGYINCMPVQEQVLSHAFGEGFASQDCHASQDLYVQSQTGTGKTAAFLIVIFQRMLTEDQIFSKKALIMAPTRELAVQIEEEAKILGKYLPFRQEVFTAA

SEQ ID NO: 50299 - DNA, 738 bp, Unknown
  Obtained from environmental sample
  misc_feature (1)..(738): n is a, c, g, or t
atgagactatcccaacttttgcgtaaacctatagaacattggaatcatcgtcatcgcgggctcgacccgcgatctccttgtaaatcaaggggatgccccgtcttgcccggcatgacggttgaattgaccgaacgcagtttacacagattttgggacagcttccgggtttcgcctaattcgcgtttacggcggtgctgtcgttgccgctatcgggcgctgccgcctcttttttccgccaattgtcaacgcctaaaaagagcgactgccgcaaccagccggggatcaggtataccgtgtcgctccccgccaaacgcgcgtagttgctgttccagtcaggcccgttcttgccgacgcgcaaaacgcccgccggcgtccccttgccggtgtaaatctccacaaacgacttgttaccgtcgccgacctcaaaaccggcctgattgctcgggttgccggagacgacctcgttcttctttagcgagacgatcttctcaagcgcaatccgaacgagattgctgtcggcagggaataaaccgcccgctgtaccggaagccgcagaatcgacgccggaaacgcccgttacacccgcgccgccggaagccgcccagtccgcgccgcgttgaacggcagtgtcagcggaaaccccgcccgccggagcggccgcgtcgcctaccgaccacacgccctccctcttctccaacctcaccacgctgccgccgtcgctcactactatggcggtaa

SEQ ID NO: 50300 - protein, 245 aa, Unknown
  Obtained from environmental sample
  misc_feature (1)..(245): Xaa is any amino acid
MRLSQLLRKPIEHWNHRHRGLDPRSPCKSRGCPVLPGMTVELTERSLHRFWDSFRVSPNSRLRRCCRCRYRALPPLFSANCQRLKRATAATSRGSGIPCRSPPNARSCCSSQARSCRRAKRPPASPCRCKSPQTTCYRRRPQNRPDCSGCRRRPRSSLARRSSQAQSERDCCRQGINRPLYRKPQNRRRKRPLHPRRRKPPSPRRVERQCQRKPRPPERPRRLPTTRPPSSPTSPRCRRRSLLWR

SEQ ID NO: 50301 - DNA, 1230 bp, Unknown
  Obtained from environmental sample
  misc_feature (1)..(1230): n is a, c, g, or t
gtgcacatagacaaggatattccgaaaaccctgatagccgacgatcaaaggctggctcaggttgttgccaatcttttaagcaacgcggttaagtttacgccggaaaaaggcgcgattaccctggaagcgagttttatgggagaggaaagaggcgtttgcaccatacaaatttccgtagccgatacgggaataggcataaacagcgaacagcaaaaacgcctgttcaactcctttcagcaggcggagagcagcacgacgcgcaaatacggcggtacggggctgggacttgctatttcaaaaagcattgtagaattgatgggcggaaaaatctgggttaaatcagaatcgcataaaggctcaaactttgcctttaccattaaggcgcgccgaggcgctgaaaaagaaaaaagcgcgcttttggcgccgggcataaaattagaaaacattcgtatcctggtcatagacgatgatcccgatatattggcgtatttcagtgatattatgcgtgaaaacggtataaaatgcgataccgcttccggcggggaagaagcgcttaagcttgtagaaaagaacggcccctatcatatttatttttcggactggaagatgcctgttatggacggcatacagcttacgcgggaactcaagaagcgcggaaccgaaaattccgtagtaataatgatttccgccgttgaatggagcgtgatttccgaagaatccaaaaaagcgggagtggacaaattcctgtccaagcccctgttcccgtctaccatttttgaagctatcaatgaatgtacgggcgcggaaaaagagcaggaagaagaaaagcaggcggctgtcagcggttcatacaacgggcgtcacattctgcttgtagaagatgtggaaataaaccgcgaagttgttcaagtgctgcttgaaccgacgcaattgggtatagactgcgctgaaaacggcgtacaggcagttaaaatgtttaaagaagccccggaaaaatacgatttgatttttatggatatacagatgcccgaactggatggctacgacgcgacacgccggattcgcgctttggatataccggaagcaaaaaccgttcccataatcgccatgacagccaatgtgtttaaggaagatattgaaagatgcctgaaagccggaatgaacggccacataggcaaaccgattgatcttaatgaagttatggaaaaattgaaaacttatttgacttaa

SEQ ID NO: 50302 - protein, 409 aa, Unknown
  Obtained from environmental sample
  DOMAIN (13)...(129): Histidine kinase-, DNA gyrase B-, and HSP90-like ATPase
  misc_feature (1)..(409): Xaa is any amino acid
MHIDKDIPKTLIADDQRLAQVVANLLSNAVKFTPEKGAITLEASFMGEERGVCTIQISVADTGIGINSEQQKRLFNSFQQAESSTTRKYGGTGLGLAISKSIVELMGGKIWVKSESHKGSNFAFTIKARRGAEKEKSALLAPGIKLENIRILVIDDDPDILAYFSDIMRENGIKCDTASGGEEALKLVEKNGPYHIYFSDWKMPVMDGIQLTRELKKRGTENSVVIMISAVEWSVISEESKKAGVDKFLSKPLFPSTIFEAINECTGAEKEQEEEKQAAVSGSYNGRHILLVEDVEINREVVQVLLEPTQLGIDCAENGVQAVKMFKEAPEKYDLIFMDIQMPELDGYDATRRIRALDIPEAKTVPIIAMTANVFKEDIERCLKAGMNGHIGKPIDLNEVMEKLKTYLT

SEQ ID NO: 50303 - DNA, 453 bp, Unknown
  Obtained from environmental sample
  misc_feature (1)..(453): n is a, c, g, or t
atgaagtcaataactttatatcatccgaacacatttcacaacgcgctgaacgattttaacaggtattttgattcgttctttggggattcaattctgtctccaacaggaagggctttaaattatttgcccgcggtagatattcaggaaaccgaaaacagttatgttatggagatggagcttcccggctttgatgagaaaaacatcgaggtcaatattgacggttcaagcntgactgtcgcctcaaaacaggaagaaaaaaaggagaaaaaagaagaagacggaaaatatatcctgcgcgaaagaaggaatattaccttcaaccgttctttccaactgccggataacgccgatccgtcaacggtaaacgctacgtttaagaacggcatcctcaacctgaacattaagaaacgcgccgaatcacagaagaggatgattcaaattaacgcggcgtaa

SEQ ID NO: 50304 - protein, 150 aa, Unknown
  Obtained from environmental sample
  DOMAIN (46)...(148): Hsp20/alpha crystallin family
  misc_feature (1)..(150): Xaa is any amino acid
MKSITLYHPNTFHNALNDFNRYFDSFFGDSILSPTGRALNYLPAVDIQETENSYVMEMELPGFDEKNIEVNIDGSSXTVASKQEEKKEKKEEDGKYILRERRNITFNRSFQLPDNADPSTVNATFKNGILNLNIKKRAESQKRMIQINAA

SEQ ID NO: 50305 - DNA, 1419 bp, Unknown
  Obtained from environmental sample
  misc_feature (1)..(1419): n is a, c, g, or t
ttgtccggaagacataagacggcggaactctgccttacggcggtccagacacatggtcgggcgcttcagtatgtgccggataagcacaggacagcggaattgtgcctttcagcggtaatgcaggacggactcgcgcttgcccatgtaccggaaaaatttcagtcagcgttattatgtcttgcggcgattatgaataatcatgaggcgcttgagtatgtgcctgaaaaactcaaaacagcggaactttatcttgcggcggcagctcaacagaaaaacagggcgcttccagattctcaaataaaatcaaatgacgatgatctccaatttatgccggaagaacataagacggcggaattgtgctttgcgtcagtaatgcgggacggattgtctctttcttatgtaccggaaagattcaagacagcggaactgtatcttgcggcggtgatacgtaacggagctacgctcgaacttgtgcctgaagaagacaagacagcggaactgtgtcttgcggcggtaatgaataattataaggcttttgagtatgtgcctgaaaagcttaaaacagcgaacctttatcatgcagcggttcgggagaatggcagggcgcttgaatttgtgcctgataaaatcaggacggcaaaactgtgccttgcagcggtaatgaataattatgaggcgcttgagtatgtacctgaaaaattcaaaacagcagaactctatcttgctgcggttcaggagaatggcagggcgcttcaacttgtgccgaaagaatacaaaacggcgaaactgtgtcttgcggcagtactagtggatggcgacgcgcttgaatatgtgccggaagaattcaagacagcagaattgtgtcttaaggcggttcgggagagcggctgggagattcaatatgtacctgaaaaactaaagaccgcaaaactgtaccttgcggcggtaaaggaggaaggcggcgcacttgaatttgtgccggaagaactcaggacagcagaagtttgcgttgcggcggtaaaggagaacggcgaagcgcttatgtatgtgccggaggaacacaagacagtggaactgtgcttcgcggcggtaaagcagtgtggtatcgcactcgaatatgtgccagataagtgcaagacagcggaactgtgtcttctggcaataaagaagtacggcagaatgcttgaatattttcctgaaaaacttaaaacagctaaactgtgccttgcggcggtaaagaagtacggctgggcgcttgagtatgtgcctgaaaagctaaagacagcggagctgtgtattgctgctgtgaatggcggacacgttcttgaatttgtgccggaagaattgaaagaacaggtcagtaaagcggtcgaaatgcctgagctacaatcgtggtcaggggagatggcgggaggatga

SEQ ID NO: 50306 - protein, 472 aa, Unknown
  Obtained from environmental sample
  misc_feature (1)..(472): Xaa is any amino acid
MSGRHKTAELCLTAVQTHGRALQYVPDKHRTAELCLSAVMQDGLALAHVPEKFQSALLCLAAIMNNHEALEYVPEKLKTAELYLAAAAQQKNRALPDSQIKSNDDDLQFMPEEHKTAELCFASVMRDGLSLSYVPERFKTAELYLAAVIRNGATLELVPEEDKTAELCLAAVMNNYKAFEYVPEKLKTANLYHAAVRENGRALEFVPDKIRTAKLCLAAVMNNYEALEYVPEKFKTAELYLAAVQENGRALQLVPKEYKTAKLCLAAVLVDGDALEYVPEEFKTAELCLKAVRESGWEIQYVPEKLKTAKLYLAAVKEEGGALEFVPEELRTAEVCVAAVKENGEALMYVPEEHKTVELCFAAVKQCGIALEYVPDKCKTAELCLLAIKKYGRMLEYFPEKLKTAKLCLAAVKKYGWALEYVPEKLKTAELCIAAVNGGHVLEFVPEELKEQVSKAVEMPELQSWSGEMAGG

SEQ ID NO: 50307 - DNA, 570 bp, Unknown
  Obtained from environmental sample
  misc_feature (1)..(570): n is a, c, g, or t
gtgtcgttaccgtgcaggttctcaactgccagtttcgcacttaataatcatcctcccgccatctcccctgaccacgattgtagctcaggcatttcgaccgctttactgacctgttctttcaattcttccggcacaaattcaagaacgtgtccgccattcacagcagcaatacacagctccgctgtctttagcttttcaggcacatactcaagcgcccagccgtacttctttaccgccgcaaggcacagtttagctgttttaagtttttcaggaaaatattcaagcattctgccgtacttctttattgccagaagacacagttccgctgtcttgcacttatctggcacatattcgagtgcgataccacactgctttaccgccgcgaagcacagttccactgtcttgtgttcctccggcacatacataagcgcttcgccgttctcctttaccgccgcaacgcaaacttctgctgtcctgagttcttccggcacaaattcaagtgcgccgccttcctcctttaccgccgcaaggtacagttttgcggtctttagtttttcaggtacatattga

SEQ ID NO: 50308 - protein, 189 aa, Unknown
  Obtained from environmental sample
  misc_feature (1)..(189): Xaa is any amino acid
MSLPCRFSTASFALNNHPPAISPDHDCSSGISTALLTCSFNSSGTNSRTCPPFTAAIHSSAVFSFSGTYSSAQPYFFTAARHSLAVLSFSGKYSSILPYFFIARRHSSAVLHLSGTYSSAIPHCFTAAKHSSTVLCSSGTYISASPFSFTAATQTSAVLSSSGTNSSAPPSSFTAARYSFAVFSFSGTY

SEQ ID NO: 50309 - DNA, 519 bp, Unknown
  Obtained from environmental sample
  misc_feature (1)..(519): n is a, c, g, or t
atgtacagtgtgggtattgcctatcttttatggctaatctcgggcttcggagcgcttgggtttcaccgcttttatttggggaagataccaaccggacttctctggatgatgaccggcggcctgggcatggttggctctatttatgacttcttcaccctccccggacaggttcgcgaggcaaatatcaggaacgccctttacgaccgccgtacccggcaatcggcaggacagcaggaaaactggcgttacgcaaacgacgcccaatacaaagttgtaaacggaaaatatgaaaaggaaagtccggagcgcgtgatcctcaaactggcgaaagaaaacagcggcctcctcactgtaagcgaagtggccttgggcgcaaacatcacaattgacgaagcaaaaaaaattcttgacacccttgtaacaaagggctttgccgagctccgtgtccgcaaaagcggctctctggtttatatcattcccgatatggccgataaagatgaacctctcgaggatttttaa

SEQ ID NO: 50310 - protein, 172 aa, Unknown
  Obtained from environmental sample
  DOMAIN (1)...(51): TM2 domain
  misc_feature (1)..(172): Xaa is any amino acid
MYSVGIAYLLWLISGFGALGFHRFYLGKIPTGLLWMMTGGLGMVGSIYDFFTLPGQVREANIRNALYDRRTRQSAGQQENWRYANDAQYKVVNGKYEKESPERVILKLAKENSGLLTVSEVALGANITIDEAKKILDTLVTKGFAELRVRKSGSLVYIIPDMADKDEPLEDF

SEQ ID NO: 50311 - DNA, 879 bp, Unknown
  Obtained from environmental sample
  misc_feature (1)..(879): n is a, c, g, or t
atggaagggcgcttccttgtctcntgcatcaacggccagtttgtgcataccagaggagtgttaagcgtaagggattcccttattattaaagggcctgtcggttatgccacaggcaatattatatttcccggggacgtggaaatagaaggtccggtttctgacggttttaaaatttactccgggggctccgtaaccatcaagcagacttttgacgtaaccgacgcggtaacaaaaaacgaccttaacgtagcgggcgggatcattggcaggggccgtgccgtggtaaaggttggcggcagcctgaaaacaaaatttattgaaaactgccatatggccgtgagaaaaaatatagtcgtggattcggagataatcagttcaaaagtatttaccctggagaccctggaaatgggagaaaaagggaaaatagtcggaggggaaacccacgcggtcaaaggcatccgcgccggagcaatcgggaaggaagtcggcagggctgccagggttcactgcggaatcgattttatcatggagcaggagaaagaaaaaaacaacggcgttttaagagcactggcggtaaagatccgccgcttaaaagaaatgattgcggacccctcaacagacgaagagaagaaggtaaagataaaagcctttctggataaactaaccgaagagcagaaaaagacccaggaaaaaatatcgcagcttttaggagggcttaacacctacgaggaagccacagttgaagtaaaaggcgaaatagagcctggcgtccttatcgaaatatgccatgccgcgttgtttgtaacagaacccctcaagaaatctaagatacggctggacaaggaaaccggaaaattgattatagagaagataagctag

SEQ ID NO: 50312 - protein, 292 aa, Unknown
  Obtained from environmental sample
  DOMAIN (1)...(289): Protein of unknown function (DUF342)
  misc_feature (1)..(292): Xaa is any amino acid
MEGRFLVSCINGQFVHTRGVLSVRDSLIIKGPVGYATGNIIFPGDVEIEGPVSDGFKIYSGGSVTIKQTFDVTDAVTKNDLNVAGGIIGRGRAVVKVGGSLKTKFIENCHMAVRKNIVVDSEIISSKVFTLETLEMGEKGKIVGGETHAVKGIRAGAIGKEVGRAARVHCGIDFIMEQEKEKNNGVLRALAVKIRRLKEMIADPSTDEEKKVKIKAFLDKLTEEQKKTQEKISQLLGGLNTYEEATVEVKGEIEPGVLIEICHAALFVTEPLKKSKIRLDKETGKLIIEKIS

SEQ ID NO: 50313 - DNA, 1062 bp, Unknown
  Obtained from environmental sample
  misc_feature (1)..(1062): n is a, c, g, or t
ttgcaacaggtgaccataaaaggtaaggtgaacggtgtgggtgagggtttcggcggggcgggggatatgatgtacgcgtccgttacgctcttcaacccgccgcaggattcggtgcgccgtaaagacggcggccgttttgatgatacgacgatatacagcctgcccgggagtccggtctttagcgcaaagataccctttgataagaaaaccggaacctttgagcacccggtgctgctgccaatgaaccttacgttcaaaaagccgggcgtgaagctcatcgcccacgtatggaaagagaaggaggcgatggtgggcgccggttaccttggcaacctgattttcgacggatccgaaaacgccaacttcggcgatacgacaggacctaaaatcagcgtgagaccggtgtacggcgttaacgcgatggacaccaacttccgcgtaaaaaatcgcataaccgtacaactgccgctgacgcttgaagtctttgtggaggacgagaacggcgtaaacgtgataggcagcggtccggatgaagggcttacaatggaggtgaagggcgccctgtctaagcgcagcatcaaccacctgttccagtttgatccgggtagcttttcaaagggaaaagcgccgctgtcctttgatgaaaacgtcctcaaaagcgggacttacgaactcataatcagcgcccaagacctgcttggaaacgtatcgaaattgagcgtggtttgggaggtggtggatccggccgatataaaattggatcacgtgataaacgttcccaaccccgtgaagatggggcagcagacgcgcttctactacacgcactcgaatgtcaccggcgacttagacgtgagcgtaacggtaagggtatactcgctcggcggcaggctgctgtctgtgatacgcaacccgaaaaacggagagccgtgggtgcccagggataaccgtgggaattatttgacgccgaatgtttacttgtatcaggtgacggcgacgtcgcagaatgtgggaaaaacggtgaagagtaaaatcaagaagttggctgtgctaccgccgagatag

SEQ ID NO: 50314 - protein, 353 aa, Unknown
  Obtained from environmental sample
  misc_feature (1)..(353): Xaa is any amino acid
MQQVTIKGKVNGVGEGFGGAGDMMYASVTLFNPPQDSVRRKDGGRFDDTTIYSLPGSPVFSAKIPFDKKTGTFEHPVLLPMNLTFKKPGVKLIAHVWKEKEAMVGAGYLGNLIFDGSENANFGDTTGPKISVRPVYGVNAMDTNFRVKNRITVQLPLTLEVFVEDENGVNVIGSGPDEGLTMEVKGALSKRSINHLFQFDPGSFSKGKAPLSFDENVLKSGTYELIISAQDLLGNVSKLSVVWEVVDPADIKLDHVINVPNPVKMGQQTRFYYTHSNVTGDLDVSVTVRVYSLGGRLLSVIRNPKNGEPWVPRDNRGNYLTPNVYLYQVTATSQNVGKTVKSKIKKLAVLPPR

SEQ ID NO: 50315 - DNA, 552 bp, Unknown
  Obtained from environmental sample
  misc_feature (1)..(552): n is a, c, g, or t
atgatcgagttgaacatctcntgccccaatgtcaaagccggcggcatgacattcgggcttgatccgcaggcggcggcggcggtgacggagccggtccgccgcgcgctaacccgcaagcccctcatggtaaaactttcgcctaacgcaccggatctgaccgccgttgccgtcgcctgtatcaactccggggcggatgccatttcgctggtaaatacattcaaggcgatggcgatagacattcagacccgcaggccggtctttgacaatataagcgcggggctttccggcccggctatcaaaccaatcgccctgcgcatggtgtgggacctccgcaaagcagtcaccgtcccgatagtgggcctgggcggtattagctgcgccgatgacgctctggaattcctgatggcgggcgcagctgcgctgcaggttggttcggcgacattttcgcatccaaacgcgatgatcgaaatcattgacggtattgaaagttatatgcgcagttacaaactttccgccgtgggggagatttccctggaaaagcggagggactga

SEQ ID NO: 50316 - protein, 183 aa, Unknown
  Obtained from environmental sample
  DOMAIN (1)...(165): Dihydroorotate dehydrogenase
  misc_feature (1)..(183): Xaa is any amino acid
MIELNISCPNVKAGGMTFGLDPQAAAAVTEPVRRALTRKPLMVKLSPNAPDLTAVAVACINSGADAISLVNTFKAMAIDIQTRRPVFDNISAGLSGPAIKPIALRMVWDLRKAVTVPIVGLGGISCADDALEFLMAGAAALQVGSATFSHPNAMIEIIDGIESYMRSYKLSAVGEISLEKRRD

SEQ ID NO: 50317 - DNA, 387 bp, Unknown
  Obtained from environmental sample
  misc_feature (1)..(387): n is a, c, g, or t
atgagcagtaaaaataccgccacaattgacctttccgttaccattgccggtgttcgtttgcagaatccggttatagccgcgtccggaaccttcggttatggcagggaatacgcggggataattgacgtttcccgcctcggaggcatatgcacaaaggggcttacgctgaatccgcggccgggcaatacgggcatccgcgtatgggaaaccccggctgggctgctgaattccatcgggcttgaaaatcccggtatcgccacatttatggaaaaagaactgccctttctgcgaaagcttggcccggcagtcatcgcaaacctttcaggctccaccgaggaggaatacgcgcaaggggcggcgctgctcaatgaaagcgatgtgacatga

SEQ ID NO: 50318 - protein, 128 aa, Unknown
  Obtained from environmental sample
  misc_feature (1)..(128): Xaa is any amino acid
MSSKNTATIDLSVTIAGVRLQNPVIAASGTFGYGREYAGIIDVSRLGGICTKGLTLNPRPGNTGIRVWETPAGLLNSIGLENPGIATFMEKELPFLRKLGPAVIANLSGSTEEEYAQGAALLNESDVT

SEQ ID NO: 50319 - DNA, 342 bp, Unknown
  Obtained from environmental sample
  misc_feature (1)..(342): n is a, c, g, or t
atggaagaaaaagccgccttcctcggtgcggctattaacgcgcaaaacatcatcattgcgagcgaagacggcaaaaccgggaaaaagggactcatccttgattttttagagccggaaaaatacgccgccgtttgcgcctgcggcactccgcttatgttaaaagcagtcgcggaaaaatgcaaagccaaaggcgttccctgttttatcagcatggaaagccggatggcctgtggcgtgggggcttgccttggatgcactattaaaaccgttaacgggaaccgccgttgctgcgccgacgggcctatatttaaggctgaagaggtgatcttcgatgagcagtaa

SEQ ID NO: 50320 - protein, 113 aa, Unknown
  Obtained from environmental sample
  misc_feature (1)..(113): Xaa is any amino acid
MEEKAAFLGAAINAQNIIIASEDGKTGKKGLILDFLEPEKYAAVCACGTPLMLKAVAEKCKAKGVPCFISMESRMACGVGACLGCTIKTVNGNRRCCADGPIFKAEEVIFDEQ

SEQ ID NO: 50321 - DNA, 537 bp, Unknown
  Obtained from environmental sample
  misc_feature (1)..(537): n is a, c, g, or t
ttggaattttgggcgattttccacgcgcttctggaaaaagccgagttaaaaaaaatctaccgtgacgttttcgccgatgccccggaacttacggcgcttaccgaaactatccgtaaaaaatacctccaggaaaacggcagcctggtcaaggaaatgggcaaacatctcctgaaagcgcatgaactctgcgccgcgataggggtgcgttttgaggactatgttgaccgcgtgctgcggataccccgtaccgcggcaaacatggcgattaaaatgttcgagtacgaccttaatccgcagacgggcgccgataatatgcgcttcctcgccggtatccgcgatgccgacgagcgaaaagccgccgaaaccgccctgctcaaaaataaaagccctgattcggttaaaacggcgatccgccaaaaagccaaagatgaagaccccgtgcttatgcttgaacgtgaaaagatccgccttgaacgcaccatacagacgctttccaaacggcttgaagaagtgaagaaggagcttgggcagaaataa

SEQ ID NO: 50322 - protein, 178 aa, Unknown
  Obtained from environmental sample
  misc_feature (1)..(178): Xaa is any amino acid
MEFWAIFHALLEKAELKKIYRDVFADAPELTALTETIRKKYLQENGSLVKEMGKHLLKAHELCAAIGVRFEDYVDRVLRIPRTAANMAIKMFEYDLNPQTGADNMRFLAGIRDADERKAAETALLKNKSPDSVKTAIRQKAKDEDPVLMLEREKIRLERTIQTLSKRLEEVKKELGQK

SEQ ID NO: 50323 - DNA, 1203 bp, Unknown
  Obtained from environmental sample
  misc_feature (1)..(1203): n is a, c, g, or t
gtgtttgttttgggttttgatggttgggggccaaacagtggggatacgcctggggtattcgccgttttggtcaatatggcttcccaatattttgtcatttgtcattggtttggttctctttattgtaaggattcagaaatgatccttgatcgatacctgaccaaacagttcttgcctgtatttgcgattgcttcctcaatgtttgtcctgcttcttgtaatgattgatatttttaccaacctggcgcggtatctaaataacgaggtagccgccagggatattttacgcgtcagcctgtattatgtgccaaaaggtttttcatatgcgctgcctatttcattgctttttgccgccgcttatattttgggcgaactgtatgcaagaaatgaattaacctctatttttgcggcgggtatacctttctggcgttttagcgtggttcttttgataattggatttgccgcttcaatctttagttttttctttgacgatttggtggttatccctactttaaaaatcaaaaatgaaatttcaaggatgcttttaaatgaacagcgatcccagtttcaggcggatattgttgtaaaggcgaataacggccaattgatctattcggcagattattatgactctgtcggaaaaatcctgcacggattaagcattatcgaacaggacgaaaatgggcagcttgtctgccttatacgggcgcagagggcctcatggaacgacgatcattgggaatttgtcagccctgttatttacgaatgggataacggccttttaaaatacagggtttatggcggcagcgacaaataccgtgaagaacctgatacattcagaagaagcatggttaatgttgaggaactgcattttaaagacgcccggcttttggtagatgaccttaaactcgcgggactgccgtataccaacgccctcgcggatttccaccaccggttttctttttcggcggtttcttttgtggttgtcgccctttctatttccatgggggggcgtttcaggaagaacataatgttgatgagccttttatcaagccttgtatctgcggttgttttttatgttacggaaatgataagcatgatgatggcgaagctgggatatattcatccttttgtcggcgcatggttcccggtttttctttttgtcattgcggcattcctgcttctaaaaactgcgaaaacctaa

SEQ ID NO: 50324 - protein, 400 aa, Unknown
  Obtained from environmental sample
  DOMAIN (51)...(397): Predicted permease YjgP/YjgQ family
  misc_feature (1)..(400): Xaa is any amino acid
MFVLGFDGWGPNSGDTPGVFAVLVNMASQYFVICHWFGSLYCKDSEMILDRYLTKQFLPVFAIASSMFVLLLVMIDIFTNLARYLNNEVAARDILRVSLYYVPKGFSYALPISLLFAAAYILGELYARNELTSIFAAGIPFWRFSVVLLIIGFAASIFSFFFDDLVVIPTLKIKNEISRMLLNEQRSQFQADIVVKANNGQLIYSADYYDSVGKILHGLSIIEQDENGQLVCLIRAQRASWNDDHWEFVSPVIYEWDNGLLKYRVYGGSDKYREEPDTFRRSMVNVEELHFKDARLLVDDLKLAGLPYTNALADFHHRFSFSAVSFVVVALSISMGGRFRKNIMLMSLLSSLVSAVVFYVTEMISMMMAKLGYIHPFVGAWFPVFLFVIAAFLLLKTAKT

SEQ ID NO: 50325 - DNA, 480 bp, Unknown
  Obtained from environmental sample
  misc_feature (1)..(480): n is a, c, g, or t
atgggttcgctctttttgttcctgctccttgccaacatcatccccgttttaacgcctctgggactgaaagcctttggacacgagtttactccgctttttgaaatccgcccacccacaagggacatcaatgtaacggcggcgcttgcggtcatatcaatcttgcttgtccttgtctgcggatttgcggcgcgcggctttacaggctggttcaaaaaactctttcaaccagtacccttcatgcttcccttcaatataatggaatacggaacacgcctaatctctcttgccctgcggttatttggaaacatgttaggcggctatgttctgatgagcatgatcgagggattacttccgcttgccctccccgtcgtcttttcgctctactttgatttctttgacggactgattcaagcggcaatatttgtattcttaaccagcctctacattggcgaggctgttaaaataaacgaggaagcataa

SEQ ID NO: 50326 - protein, 159 aa, Unknown
  Obtained from environmental sample
  SIGNAL (1)...(26)
  DOMAIN (2)...(151): ATP synthase A chain
  misc_feature (1)..(159): Xaa is any amino acid
MGSLFLFLLLANIIPVLTPLGLKAFGHEFTPLFEIRPPTRDINVTAALAVISILLVLVCGFAARGFTGWFKKLFQPVPFMLPFNIMEYGTRLISLALRLFGNMLGGYVLMSMIEGLLPLALPVVFSLYFDFFDGLIQAAIFVFLTSLYIGEAVKINEEA

SEQ ID NO: 50327 - DNA, 495 bp, Unknown
  Obtained from environmental sample
  misc_feature (1)..(495): n is a, c, g, or t
atgcttgatttttccgtaacttttattatcaccatcctcaatatcaccattctattttttatattgaaaaaggtattgttcaaaccggtaacgaaattcatggcggatcgagcaaagcgcgttcaggactctttggatcaggcggagaaagaccggactcaggcgaaggcgatgtacaaagaatacgagaacaagctgaaaagcgccgaggccgaagcgggcgtaattattaaaacagcccgtgaaaacgccgacagggaagcgggcaggatcattgagagcggaagagccgaagcggcggaaattatcagcgccgcacgaaagcagaccgatgccgaccgccgcgcagccataacaaggttaaggttcgagaccgccgcccttgtgatggccgcttcttcaaaattggcggcaaaggatttttcccgcgacgacaaccggcgttatgttgatatgctgctggacgaactggcggcgcaaaaggaaaatatttaa

SEQ ID NO: 50328 - protein, 164 aa, Unknown
  Obtained from environmental sample
  DOMAIN (7)...(138): ATP synthase B/B' CF(0)
  misc_feature (1)..(164): Xaa is any amino acid
MLDFSVTFIITILNITILFFILKKVLFKPVTKFMADRAKRVQDSLDQAEKDRTQAKAMYKEYENKLKSAEAEAGVIIKTARENADREAGRIIESGRAEAAEIISAARKQTDADRRAAITRLRFETAALVMAASSKLAAKDFSRDDNRRYVDMLLDELAAQKENI

SEQ ID NO: 50329 - DNA, 579 bp, Unknown
  Obtained from environmental sample
  misc_feature (1)..(579): n is a, c, g, or t
atgagcgttcttaatccttacattgacaagggcgtactcaaagtcgtgggaccctatcccaagacttccgctgacagggctaacttcctgcgcatcaccactgaaaactggcaagcacctatcgccaagacccgcatggaaaacctgttgaccggcgatgcccgcaacgttactttggatgcggtacttgcccccaatgatcccatcgcgcgcgccattatcgaagcctgcagggccgatgccaaataccggaccaaactgccggtagttaccggtcaggatgctgaatttgattctgctttgtccataaagaacggccttcagtacagcaccgtgttcaaggacaccgcaaaactggctgaagccgccatccttctggccgatcagattctcaaaggtcagcccatcaatatccccggcgcggttcttgcgtcaggtgatcttgccaagattggcgataccagcaaaaaagtagtaaaagcctatctgctggaccccattctggttaccaaagccaatctcaatgttccggtagatgccaaattctacacggacgctgaagccgctcagttgaagtag

SEQ ID NO: 50330 - protein, 192 aa, Unknown
  Obtained from environmental sample
  misc_feature (1)..(192): Xaa is any amino acid
MSVLNPYIDKGVLKVVGPYPKTSADRANFLRITTENWQAPIAKTRMENLLTGDARNVTLDAVLAPNDPIARAIIEACRADAKYRTKLPVVTGQDAEFDSALSIKNGLQYSTVFKDTAKLAEAAILLADQILKGQPINIPGAVLASGDLAKIGDTSKKVVKAYLLDPILVTKANLNVPVDAKFYTDAEAAQLK

SEQ ID NO: 50331 - DNA, 837 bp, Unknown
  Obtained from environmental sample
  misc_feature (1)..(837): n is a, c, g, or t
atgagggtaagccaaatcgtggattttttaacaaagtatgcggatataatagttaggttccagggtggcgcaaatgcgggccataccgtaaaagcagacgatagggagttcatttttcatcttatcccaagcgggataatgcacccaaataaggtttgcgtaataggaaacggagttgtttttgaccccaaacaggctattttggagataaaagaccttgtatcaaagggtatttccgtggaaaaccgaattttgatagctgaaaatgcccacgtggtgctgccttggcacatagcctgcgataagctaaaagaagccaaagcgggcaaatccgccattggaaccacagggagaggcattggaccctgttatagcgacaaagtaaacaggcacggggtcagggttggcgatttactgagcgagcaagagctgagggctcgtatagaggatatagcctcgttcagaaacgaagagtttaaaaagatgttcgatgccgagcctatagatccagagcctgtgataaaggagtatttggattttggcaagcagttaaaggcatatatatgcgacaccgtttcttatctgttcgaaagcctaaaaaacaagaaaaagataatttttgagggtgcgcaagggacaattttggatgttgaccacggaacctacccctttgtaacctcctcgaatacggtagccggctatgcaagctgcggttccggtattgggccaacaaccatagaccaggtgattggcgttgtgaaagcctacacaacaagagtcggcaatggccctttcccaacggaactttccgatgaaacaggggataaactcccgtga

SEQ ID NO: 50332 - protein, 278 aa, Unknown
  Obtained from environmental sample
  DOMAIN (6)...(277): Adenylosuccinate synthetase
  misc_feature (1)..(278): Xaa is any amino acid
MRVSQIVDFLTKYADIIVRFQGGANAGHTVKADDREFIFHLIPSGIMHPNKVCVIGNGVVFDPKQAILEIKDLVSKGISVENRILIAENAHVVLPWHIACDKLKEAKAGKSAIGTTGRGIGPCYSDKVNRHGVRVGDLLSEQELRARIEDIASFRNEEFKKMFDAEPIDPEPVIKEYLDFGKQLKAYICDTVSYLFESLKNKKKIIFEGAQGTILDVDHGTYPFVTSSNTVAGYASCGSGIGPTTIDQVIGVVKAYTTRVGNGPFPTELSDETGDKLP

SEQ ID NO: 50333 - DNA, 1506 bp, Unknown
  Obtained from environmental sample
  misc_feature (1)..(1506): n is a, c, g, or t
atggcgagaagttgggcatatataccgcgagcagaacaaccggccaaagcggtaccgctctttgagaaggcggttaaggagaataggaacgatgtgcagttgttggtcgcgttggcgcagagccaagaggccgccggcatgattaacgaggccataaccacatacgagcagtatgtgctgatggatccgaaagcgtcaaaggagcacaagacgctgggcgatctatacaccaggcagaagaagcccgccgaggcgatgcgcgcttacaagaagtacttggagcgcaattccacagacaacgctgtggcgcttatggtggctaaggaggcgtataacaccaagcagtactcagacgccgtaaggtacttcgctatggtgcagggcgaggagtctaagaagcctgagtttataaagatgtacgggacggccgcttttcaggcgaacgacaacgcgagggcgctcaccgttctcaaagagatcggcaccccgctcaacaaagatcctgaagtgttcaagatgctggaggaggtcagccgccgcaccggtgccaacgatatggccgtcaactacctcaaacagtacgccgctctgcgcccgcaagacattgagtccaacagaaaattgggcgacgcgctctttgaacgcaaagacgaggccggcgctttggccgcctaccgcgccgttctgaaagccgacccgaacgctaagggcttcctcaagaggtatgtaggtcttgtgatgaaagccggtaacgaagccgaaaagatggcggcgtttgccgcggcgattaacgcgaacgaggccgatgtgggcgtgtacgcgcagctcggcgccctgcacaagtccaagggcgaatatgccaaggccgcctccatgtacgagcaagcgtccaagcttgatcctaggaacgccgattatctcggcgagcttgccgactgccagcttaaatccggcaacctgagcggcgcgtcgcagaatctgcaacaggccataatgctcaaccccaaggcggtcaacgagtacaagacgctgggcgacctctatatgcagcagaatcgcaaagatcaggcggtagacgcctacaagaagttcctagacaagtcgtccgactccaagaccgcgcagattgtgggagactacgctttcgagaaaaagcagtacgctgacgcgttcaagtatctgtccatggttaaggacaacacgtctatggagtactactattcgctgggcagaagcgcccaggagtcgaacaaccccaaggcggcgatcgatgcgctggaaaagttcaggatggcctcccgcggctcaaagacgccggtgcccaataggagcgatgtgatcaaggcgttggcgcaagcctacgagaaggagggcgacgataatagggcggccgccgctatagacgagtacctgaaaggcccgcccccgatcaaggatcaaaacgccgcctacaagcgcgcccagcttattgaggggaaagacaagaagaacgccgacgccgcgtaa

SEQ ID NO: 50334 - protein, 501 aa, Unknown
  Obtained from environmental sample
  DOMAIN (66)...(99): Tetratricopeptide repeat
  misc_feature (1)..(501): Xaa is any amino acid
MARSWAYIPRAEQPAKAVPLFEKAVKENRNDVQLLVALAQSQEAAGMINEAITTYEQYVLMDPKASKEHKTLGDLYTRQKKPAEAMRAYKKYLERNSTDNAVALMVAKEAYNTKQYSDAVRYFAMVQGEESKKPEFIKMYGTAAFQANDNARALTVLKEIGTPLNKDPEVFKMLEEVSRRTGANDMAVNYLKQYAALRPQDIESNRKLGDALFERKDEAGALAAYRAVLKADPNAKGFLKRYVGLVMKAGNEAEKMAAFAAAINANEADVGVYAQLGALHKSKGEYAKAASMYEQASKLDPRNADYLGELADCQLKSGNLSGASQNLQQAIMLNPKAVNEYKTLGDLYMQQNRKDQAVDAYKKFLDKSSDSKTAQIVGDYAFEKKQYADAFKYLSMVKDNTSMEYYYSLGRSAQESNNPKAAIDALEKFRMASRGSKTPVPNRSDVIKALAQAYEKEGDDNRAAAAIDEYLKGPPPIKDQNAAYKRAQLIEGKDKKNADAA

SEQ ID NO: 50335 - DNA, 420 bp, Unknown
  Obtained from environmental sample
  misc_feature (1)..(420): n is a, c, g, or t
atgaaaaaaatatttttaatattgataacggttgctgcggtgttttacggcagcggctgtaaacagaacagaagcgctgttatacgcaacgcagacggtagactcaatgtaaccgtaacaatttttccgccgttcgattttgtcaggcagatagctaatgacaaggtgaatcttaaaatgctgctcccgccggcagcggaaagccattcctttgaacctacgccgagggatataatcacggttcanaacagcggtgtttttatttatttaggcggtgaaagcgataaatgggttgatcggatacttgaatccatggatacctcanaaatgaaaattctccgtatgatggacgctgttgaaacggttgaagagaattgtcgaaggcatggaggaagaagacgaagaggaaaaagcttatga

SEQ ID NO: 50336 - protein, 139 aa, Unknown
  Obtained from environmental sample
  SIGNAL (1)...(19)
  misc_feature (1)..(139): Xaa is any amino acid
MKKIFLILITVAAVFYGSGCKQNRSAVIRNADGRLNVTVTIFPPFDFVRQIANDKVNLKMLLPPAAESHSFEPTPRDIITVXNSGVFIYLGGESDKWVDRILESMDTSXMKILRMMDAVETVEENCRRHGGRRRRGKSL

SEQ ID NO: 50337 - DNA, 585 bp, Unknown
  Obtained from environmental sample
  misc_feature (1)..(585): n is a, c, g, or t
ttgaaacggttgaagagaattgtcgaaggcatggaggaagaagacgaagaggaaaaagcttatgacgaacacgtttggacttctccccaaaacgcaattctgattgtcaatgcaataaccggtgcgttatgcgaagttgacagcgcgaacgcggcgtttttccgccagaacgcgcagacctacacaaatcagctcgacgaattggacaaacagtttaaagcggtagtggatggtgcaaaacggaaaatcattatcttcggcgaccgcttccctttccgttatttcaccgatgcctacgggctgacgtactatgccgctttccccggctgttccacagaaacagaaccgagcgttgctaccgtagcctttctcataaacaaaatcaaggctgaaaaaatcccggttatatttcacatagagctttccaacgagcgaatggcagatactataagcggcgaaaccggcgcgaaaaaactgctgcttcatgcttgtcataatatttctaaacgcgattttgaagccgggctcggctatcttgattttatgcgcctaaatgtcgaaaatctacgggaggcattacgctaa

SEQ ID NO: 50338 - protein, 194 aa, Unknown
  Obtained from environmental sample
  DOMAIN (1)...(194): Periplasmic solute binding protein family
  misc_feature (1)..(194): Xaa is any amino acid
MKRLKRIVEGMEEEDEEEKAYDEHVWTSPQNAILIVNAITGALCEVDSANAAFFRQNAQTYTNQLDELDKQFKAVVDGAKRKIIIFGDRFPFRYFTDAYGLTYYAAFPGCSTETEPSVATVAFLINKIKAEKIPVIFHIELSNERMADTISGETGAKKLLLHACHNISKRDFEAGLGYLDFMRLNVENLREALR

SEQ ID NO: 50339 - DNA, 1185 bp, Unknown
  Obtained from environmental sample
  misc_feature (1)..(1185): n is a, c, g, or t
atgaaaggtcaatttgagaattatttcatgatggggaatattactagaggcagcggggatcacggaacaggaacatcggcgacgataactaacgcgcaacttacccgccactataatatccttaccgcggaaaattttatgaaacccagttatttggcaaccgacagaaacaccggtaccggagtaattacctatgcgtggaccgcccctcccaaccaatggaatcccaaccccgccaccgccaacagtcccgacaactttgtaaacgcgtgcataaattccggctttaagattcatggccatgtcctcctctggcatagtcagaatgcgaattgggtgtgggatcaaattgccggtaaaaacggaactattgtgtcgggtatgaccaaagctactgcgcttgatattatgaagaaatacattaccgaggtaatgacccatttcaaggggaaggtttattcctgggacgtgctgaatgaagctttccctgacaacgcaagttcctcggcaaactggaaagacgcgattcgtaaaggcgccagcggggaagggcaggacgcaaatccctggtatgcagcaatcggttcggattttgtatacgaaggatttctcgccgcgcgtttagccgatcccgccgcgatactgtactacaacgactacaacaccgataactcaaacagggccaggctaatccgggatatggttaaggaagtgaatgacaagtatctggcttccaatgataaacccgtgggagaggttcccggcaggctgcttattgaaggaatagggatgcaggagcatcacaataccggcgtgtcaaccgcctcaatcagggcctctataaacctgttcagaccgctgggcgtaaaaatttccgtcagcgaacttgacgtgctgtgccagggatatagtgagtacagttcaaaccccgccaaaaacaccgaggcgaattatcccgaaacatccaccaataccgtaaccaacaacgggtttgttaaagccgcccaactgtacggcgaatacatgaaactgtacattgaaaacaaggatattattgagcgtgtggccctgtggggtgttattgacagccaaagctggcgggcaagaggtctgcccctaatctttgataaagacggcaaggccaagcccgcgtactataaaatgattgcagcgttggaacaatga

SEQ ID NO: 50340 - protein, 394 aa, Unknown
  Obtained from environmental sample
  DOMAIN (2)...(392): Glycosyl hydrolase family 10
  misc_feature (1)..(394): Xaa is any amino acid
MKGQFENYFMMGNITRGSGDHGTGTSATITNAQLTRHYNILTAENFMKPSYLATDRNTGTGVITYAWTAPPNQWNPNPATANSPDNFVNACINSGFKIHGHVLLWHSQNANWVWDQIAGKNGTIVSGMTKATALDIMKKYITEVMTHFKGKVYSWDVLNEAFPDNASSSANWKDAIRKGASGEGQDANPWYAAIGSDFVYEGFLAARLADPAAILYYNDYNTDNSNRARLIRDMVKEVNDKYLASNDKPVGEVPGRLLIEGIGMQEHHNTGVSTASIRASINLFRPLGVKISVSELDVLCQGYSEYSSNPAKNTEANYPETSTNTVTNNGFVKAAQLYGEYMKLYIENKDIIERVALWGVIDSQSWRARGLPLIFDKDGKAKPAYYKMIAALEQ

SEQ ID NO: 50341 - DNA, 432 bp, Unknown
  Obtained from environmental sample
  misc_feature (1)..(432): n is a, c, g, or t
atggggattggggttgttgtacgtaatccaatcgtgaaagaaacacgcaatgcttacgaacaaaaaacctactccccattccccactccccactccctttcttcttgcttttttctcttttccctcttcttttttcttttgtttggcgtttatgcccagcaggatgccatacccgacggctttgtgaggatacaaggcggaaccttcacgatgggcagccctcctaacgagccggaacgtagaaataatgaaatccagcatcaagtaacggtgggtagtttttacatgggaaaatacgaggtaacgcagaaagagtatcaggaaataatgggaaccaatccgagcaatttcaaaggggatgataatctgccggtggaaaatgtaagctggtatgacgtgatagaatactgcaacaaacggagtatcatgtaa

SEQ ID NO: 50342 - protein, 143 aa, Unknown
  Obtained from environmental sample
  misc_feature (1)..(143): Xaa is any amino acid
MGIGVVVRNPIVKETRNAYEQKTYSPFPTPHSLSSCFFLFSLFFFLLFGVYAQQDAIPDGFVRIQGGTFTMGSPPNEPERRNNEIQHQVTVGSFYMGKYEVTQKEYQEIMGTNPSNFKGDDNLPVENVSWYDVIEYCNKRSIM

SEQ ID NO: 50343 - DNA, 570 bp, Unknown
  Obtained from environmental sample
  misc_feature (1)..(570): n is a, c, g, or t
atgaaggaagctgttaattccatgcaaaaaatgttaaagaataaatacaaggaagaatgggcgtacagggtttccgatttcgaggttttggaggaagtcgccaaagcgacaggcagtatcacggagtttattaccgaatatatacttgacccgaaagccgaaacgacgtttaagtacggagttaaaacagtagatgatgttgttacgctttcaacaattcattcggcaaaaggtttggaagcaaaaattgtgcatgtaatagacgtaaatcccttcaattatccgactactcatacaatcaggcaggggaaagacgcgattgaagaagaacgcagatgtttctatgtcgcgctgacaagggccaaagacaagttaaatttgtaccgtttcacccgttcattgcacacgcagtatatagaagacggtcgggaggaaaacctgtattttctgaatatgcttcctaaaggcttggtaaatataattgtaaacggacaaaaaaagagtgatttcccggactacagtaatttgaagcaagtagaaacgaagttcccggattttaattttgagtaa

SEQ ID NO: 50344 - protein, 189 aa, Unknown
  Obtained from environmental sample
  misc_feature (1)..(189): Xaa is any amino acid
MKEAVNSMQKMLKNKYKEEWAYRVSDFEVLEEVAKATGSITEFITEYILDPKAETTFKYGVKTVDDVVTLSTIHSAKGLEAKIVHVIDVNPFNYPTTHTIRQGKDAIEEERRCFYVALTRAKDKLNLYRFTRSLHTQYIEDGREENLYFLNMLPKGLVNIIVNGQKKSDFPDYSNLKQVETKFPDFNFE

SEQ ID NO: 50345 - DNA, 711 bp, Unknown
  Obtained from environmental sample
  misc_feature (1)..(711): n is a, c, g, or t
atgaacgccaaggggcttgagatggcttggtacgaaccacggcgttctgtcggaatgggcctgggttatgctgtaagcaacagggggggctgtcacctcaacggaggatatcttgcccttttggaatcggtgggggttatttccgcgaatgcccaggacccgcgtggcaaagcggagcttacgatttttatgcaggacgctcttgaagcggtatccgccgggggcttctgtcttttttccgcccagacttttattccgtcaatatttttccatctgggccccaaccatttcgttacccgtctagtagggaaggttctgatccactcgggcggggcagtaagactgatgctggcggcaaaaccccttttgcgctttaattcgttttttcttttgccccacgccgaggcaatcaggctggcaaccggactctctatgtacacaggttcatttttaaaatttggcgaaaggagctacaatctggagcggctcttcaatgtcagagaaggtctggattccaaaaacgattccctgccggaaaggcttacgaaagatccgcagcggcctgaaaggcccgataccgtggttccccttgaaaagatgcttccgctttattacaaggtccggggctgggataaaaacggaaggccttccaggaaaaaacaaaaaagcctggggatagaacttacaggcagcgtttggcaaattccataa

SEQ ID NO: 50346 - protein, 236 aa, Unknown
  Obtained from environmental sample
  misc_feature (1)..(236): Xaa is any amino acid
MNAKGLEMAWYEPRRSVGMGLGYAVSNRGGCHLNGGYLALLESVGVISANAQDPRGKAELTIFMQDALEAVSAGGFCLFSAQTFIPSIFFHLGPNHFVTRLVGKVLIHSGGAVRLMLAAKPLLRFNSFFLLPHAEAIRLATGLSMYTGSFLKFGERSYNLERLFNVREGLDSKNDSLPERLTKDPQRPERPDTVVPLEKMLPLYYKVRGWDKNGRPSRKKQKSLGIELTGSVWQIP

SEQ ID NO: 50347 - DNA, 852 bp, Unknown
  Obtained from environmental sample
  misc_feature (1)..(852): n is a, c, g, or t
atgccgtttttatttctggttatttcgtccgtattgaacatagtgtttgatattcttttcatcaccggttttaatatgggcgtccgcggcgcggcggtggctaccgttgcggcgcaaagcatttcgacagcgctttgtctgatttatatttttaagaaatgcccgatgcttattcctcaccggaagcatttccgttatgataacgcattgtaccaggaacttgtggcgcagggcctttctatgggatttatgatatcaatagtatatttaggttctctcgcgcttcaacgcgccataaacggactgggttatctggtaatagcggggcatatagcggcgcgtaaaattaacagtttttgtatgatgccaatgaatacaatagctgtcgcggtttctaccattgtttcacagaacaagggagcgggccaactgagccgcatacgaaaggttgtacgctacggcaattttatttcggtaatatggggtgtgtttatatcggtcattcttatgttttcttccgcggttctgataagattgctttcaggctcgaatgaaagtattattattgaaaatggctcaagatatctaaaaataaactcgccgttttatacggttcttggtatgctttttaattttcgccttgcgcttcagggaatagggaaaaaaattactccgattgtctcaagcgtcatagaatttatcagtaaaatactgtttgctttttttctggtgcccgttctcggttacttcggcgtgattatctgcgagccaattatatggtgtatcatgtttttgcagttgttatactcattttatacgaatccttatatcaggggaaaatccaacgcctga

SEQ ID NO: 50348 - protein, 283 aa, Unknown
  Obtained from environmental sample
  DOMAIN (80)...(242): MatE
  misc_feature (1)..(283): Xaa is any amino acid
MPFLFLVISSVLNIVFDILFITGFNMGVRGAAVATVAAQSISTALCLIYIFKKCPMLIPHRKHFRYDNALYQELVAQGLSMGFMISIVYLGSLALQRAINGLGYLVIAGHIAARKINSFCMMPMNTIAVAVSTIVSQNKGAGQLSRIRKVVRYGNFISVIWGVFISVILMFSSAVLIRLLSGSNESIIIENGSRYLKINSPFYTVLGMLFNFRLALQGIGKKITPIVSSVIEFISKILFAFFLVPVLGYFGVIICEPIIWCIMFLQLLYSFYTNPYIRGKSNA

SEQ ID NO: 50349 - DNA, 1347 bp, Unknown
  Obtained from environmental sample
  misc_feature (1)..(1347): n is a, c, g, or t
atgaatttttaccgggaggcgcttgcgattgcccttccggtcatgctccagcagcttattatgagcatggtctcccttatagataactttatggttgccggacttggggacataagcatggcttcggttaatgtgacaaaccagatcaactttattttcctggttaccgttaataccatctgccaggccggcggcatttatatcgcccagttcaagggcgcaaatgattcggaggggatgaggcaggctttttgttttaaggtaatttttgctattacagtcgctgtcctgtatttcgccctctcctggaccataccccataaaatgttgggcatgatgacaatgggcaatgcccaacaggaagaaattgtcgggctgggaagcgattatatcaggctgatatcgtggacatttgttccaatggcaatttcattttccatcggaaccagctttcgtgaaattggccgcccgaaggttcccctgtttatttccgccgccgcaaccctgataaacactgcgggaaactggatattgatatacggcaatctgggcgctccgcgcctggaagttaaaggcgcggcctacgcgacaatcatagcccgtgtttttgagcttgcggtttttatggtttacgccggaaaggtcaaagctccgttctataccatgaggctttttaatgtacattggaaattttttgccggggttttgtttaagtcaggaatgatatttatctccgaattgtcctgggtcagttccgaaacaataatgaccgccatgtataaccggcgcgggggcgcggaagtcgtcgccggtatggcggccggttttacaatcgcgaatattttcttcatgctttttggcggaatatggaccgcttcgggagtccttatagggggagcgctcggcgccggtaaacttgacgaagcccgcagccgcgcagtctggttaaaatccggctgcattgccgcgggcgtcattctggcgctttttggggcggctttttccgccctgcttgtccctattgttttttccaatctcagttccggggcgcggtataactgcatcggccttgtgtatgtgatccttacctatcttcctttatggggttttctcaatttgcagttcgccatatcacgcgcgggaggcgacgcggctacgggaatgtacaccgatctgtcggtcaacacctttttggttgttcccggcgcgataatcctttcgtatttcacctcattgccgcccgtgcccatgttcgccctgataaaaatttcagacttcgccaaaatgttcatcgcccgtcatttcttaaaaaaggaacgctgggtgaagaatttgaccaagaggtaa

SEQ ID NO: 50350 - protein, 448 aa, Unknown
  Obtained from environmental sample
  DOMAIN (240)...(405): MatE
  misc_feature (1)..(448): Xaa is any amino acid
MNFYREALAIALPVMLQQLIMSMVSLIDNFMVAGLGDISMASVNVTNQINFIFLVTVNTICQAGGIYIAQFKGANDSEGMRQAFCFKVIFAITVAVLYFALSWTIPHKMLGMMTMGNAQQEEIVGLGSDYIRLISWTFVPMAISFSIGTSFREIGRPKVPLFISAAATLINTAGNWILIYGNLGAPRLEVKGAAYATIIARVFELAVFMVYAGKVKAPFYTMRLFNVHWKFFAGVLFKSGMIFISELSWVSSETIMTAMYNRRGGAEVVAGMAAGFTIANIFFMLFGGIWTASGVLIGGALGAGKLDEARSRAVWLKSGCIAAGVILALFGAAFSALLVPIVFSNLSSGARYNCIGLVYVILTYLPLWGFLNLQFAISRAGGDAATGMYTDLSVNTFLVVPGAIILSYFTSLPPVPMFALIKISDFAKMFIARHFLKKERWVKNLTKR

SEQ ID NO: 50351 - DNA, 1032 bp, Unknown
  Obtained from environmental sample
  misc_feature (1)..(1032): n is a, c, g, or t
atggcagaagtactttcccaggatgaaatagatcagctactcaccgcgataaacgccggggataccgagccggatgaaataaagccggctgcggatacccgtaaaataaaaatttacgattttaagcggcctgacaaattctccaaggaacagatacgtaccatttcaatgatgcacgatacctttgcgcgtttgacgactacgagcctttccgcccagcttcgttcgatggttcacgttcatgtagcgtctgtggatcagctaacttacgaggaatttatccgttcaattcctaccccgactaccctggcgatcatcaatatggatcccctcaagggtaacgcgattttggagattgatcctgccgttaccttttccataattgaccgccttttcgggggctcgggagaagggacaaaatcccagcatgagcttacagatattgaaagcgcggtaatggaagggatcattgtccgcattttgggaaatatgcgcgaagcctggacacaggtaatagacctccgtccccgtctcggacaaatcgacacgaacccgcagttcgcccagatagtgccccccacggacatggtggtgcttgtaaccctcgaaaccaaagttggggacgtggaagggatgattaacttctgtattccctaccttaccattgagcctataatcggcaaactttccacccagttctggttttctactgtgcaccgcggtactacaaccgaaaacctcaatgtgctaaaggaaaaacttgcgacagtcgatgttgatgtagtagccgaaattggaaaaattaacattcctgtaagggaagttctctcgctccggctgggagacgttgtcaggctttacaatacacggataggggatgcgtattccctgaatatcggcaataaaagaaaatttctatgcaggccgggcgttatcggaaaaaaaatagcggtgcagatactaaagaaaactgcggagcttgaacaggaagaatttgaagagcttgctactgaaaaggaggaattattgtga

SEQ ID NO: 50352 - protein, 343 aa, Unknown
  Obtained from environmental sample
  DOMAIN (250)...(327): Surface presentation of antigens (SPOA) protein
  misc_feature (1)..(343): Xaa is any amino acid
MAEVLSQDEIDQLLTAINAGDTEPDEIKPAADTRKIKIYDFKRPDKFSKEQIRTISMMHDTFARLTTTSLSAQLRSMVHVHVASVDQLTYEEFIRSIPTPTTLAIINMDPLKGNAILEIDPAVTFSIIDRLFGGSGEGTKSQHELTDIESAVMEGIIVRILGNMREAWTQVIDLRPRLGQIDTNPQFAQIVPPTDMVVLVTLETKVGDVEGMINFCIPYLTIEPIIGKLSTQFWFSTVHRGTTTENLNVLKEKLATVDVDVVAEIGKINIPVREVLSLRLGDVVRLYNTRIGDAYSLNIGNKRKFLCRPGVIGKKIAVQILKKTAELEQEEFEELATEKEELL

SEQ ID NO: 50353 - DNA, 522 bp, Unknown
  Obtained from environmental sample
  misc_feature (1)..(522): n is a, c, g, or t
gtgagcgatggcgcactttctcaggatgaaatagatgcattattggcaggtgtagattcaggaagcccaggcagtgctccgacagccactatggccgcgagtcattcaggcggcggttcggaagaggatcgcaaggcttttaaggattttctttcggctaatatcggggcggaatcctccaacctttccatgatgacaggggcatctgtaacccttaaagagccacaggtatcttttacaaaccgcgacgccttattgggccagctccccgatatggtaaccgttgttaaagcagactttagctccggttttccgggcgagcacatctttgtattgcctgaggatgccgcaagaagcattgcttccttaatgaacaaggaagacaatatccagatggacgaaatggctatgtccgttgtcggagaagctatttcccagttagttggtacacagataactgatttaacaaaaaggaccaacaacaaatccatcgcgaatgtcgctcccgaagctgaaatgtag

SEQ ID NO: 50354 - protein, 173 aa, Unknown
  Obtained from environmental sample
  misc_feature (1)..(173): Xaa is any amino acid
MSDGALSQDEIDALLAGVDSGSPGSAPTATMAASHSGGGSEEDRKAFKDFLSANIGAESSNLSMMTGASVTLKEPQVSFTNRDALLGQLPDMVTVVKADFSSGFPGEHIFVLPEDAARSIASLMNKEDNIQMDEMAMSVVGEAISQLVGTQITDLTKRTNNKSIANVAPEAEM

SEQ ID NO: 50355 - DNA, 801 bp, Unknown
  Obtained from environmental sample
  misc_feature (1)..(801): n is a, c, g, or t
atgaatgcgcttttggtattgtatggaggtagtctgtccaatgaggcggaggaagtcctctttaacggaaaaaacagcctggaaatgaccattgaacgttcccggcaatttccatctgtcggcaaaacagtgttgttggcggcagaagggagttcttttcctgtttatgagggtatcgagattgacaaaagggcttcctggacagttaaagacctgctggaggctcttgccgcccattccgaaggctttgatctgacctatttcgcctgggcggactgcccttttatcgacccggagcttgcaaaacggcttgtggacaggcatttgcgctatgccgccgaatattcatacgccgatggctggccctacggcgtcgccccggaactgctttcacccggtaccgcggtcattctttccaacatactcaatgataacgacaatggcccggtcgaacgggattccctgttcgccgtgatccagaaagacatcaacgcttttgatattgagacggaaatatccacggtagacctgcgctgccaccgcctgagactctgcgcggacagcaagcgcaacctgctcctgctgcggcgctttgtttcggggtacccgaccagggctccgcccaaggcggagaccaagtgcctgacaccgctgccattgagcgcattatcgcggaaaagccggaaattctcagaacccttccggcgttttaccctgtgcaggtctatggcggctgtccgcaggcttgcgttttctgcccctggtcgaaaaccggcgctagcgccagcgccagcgccataa

SEQ ID NO: 50356 - protein, 266 aa, Unknown
  Obtained from environmental sample
  misc_feature (1)..(266): Xaa is any amino acid
MNALLVLYGGSLSNEAEEVLFNGKNSLEMTIERSRQFPSVGKTVLLAAEGSSFPVYEGIEIDKRASWTVKDLLEALAAHSEGFDLTYFAWADCPFIDPELAKRLVDRHLRYAAEYSYADGWPYGVAPELLSPGTAVILSNILNDNDNGPVERDSLFAVIQKDINAFDIETEISTVDLRCHRLRLCADSKRNLLLLRRFVSGYPTRAPPKAETKCLTPLPLSALSRKSRKFSEPFRRFTLCRSMAAVRRLAFSAPGRKPALAPAPAP

SEQ ID NO: 50357 - DNA, 987 bp, Unknown
  Obtained from environmental sample
  misc_feature (1)..(987): n is a, c, g, or t
gtgcctgacaccgctgccattgagcgcattatcgcggaaaagccggaaattctcagaacccttccggcgttttaccctgtgcaggtctatggcggctgtccgcaggcttgcgttttctgcccctggtcgaaaaccggcgctagcgccagcgccagcgccataaatataacagaacggcgggattatatggaagctgagcgcttcgacacgcttttggaaagaatcgccgctttctccggcgacgcggtcatagacctttccctctggggagagctttccctccatccccaaaaaatggaacttattgaaatggttttgcgccgcccggaattagacctgataatagaaacttccggcataggctggaaagacgatgaaattcataaatgcgcggcgcttgcccaaacagcgggggggagggcctccccttcaggtaaaaacaagttcaggctttcgtggattgtttcgctggataccgctgacccggcgcgttacagggaaatccgcggatcgggctttgccgaagcgaacgaatttgcgaaaaaactcctcagcctttttccaaaggacgcttatgtgcaggcggtacggacggcgggagcggaagacgatacggagaagttctacaggtcatggaaagaaattacacctaacagctcgaatatcattatacagaaatatgacgatttttgcggtttcctgcccaggaagcaggcgtcggatctttccccggtacaaaggcagccatgctggcatcttataagggatatgccggtgctgatcgacggtaccgtgccattgtgcagggagcagatagcagggggcgtgaacggcataaatattggaaacgtttttatggaagaacttgatattatctgggaaaggggacagcggttttatacggaacagacgggccaaatgcccggagggaagaaatacgattctctgtgcgcggggtgcgatgaatactatacctacaacttttaa

SEQ ID NO: 50358 - protein, 328 aa, Unknown
  Obtained from environmental sample
  DOMAIN (27)...(209): Radical SAM superfamily
  misc_feature (1)..(328): Xaa is any amino acid
MPDTAAIERIIAEKPEILRTLPAFYPVQVYGGCPQACVFCPWSKTGASASASAINITERRDYMEAERFDTLLERIAAFSGDAVIDLSLWGELSLHPQKMELIEMVLRRPELDLIIETSGIGWKDDEIHKCAALAQTAGGRASPSGKNKFRLSWIVSLDTADPARYREIRGSGFAEANEFAKKLLSLFPKDAYVQAVRTAGAEDDTEKFYRSWKEITPNSSNIIIQKYDDFCGFLPRKQASDLSPVQRQPCWHLIRDMPVLIDGTVPLCREQIAGGVNGINIGNVFMEELDIIWERGQRFYTEQTGQMPGGKKYDSLCAGCDEYYTYNF

SEQ ID NO: 50359 - DNA, 717 bp, Unknown
  Obtained from environmental sample
  misc_feature (1)..(717): n is a, c, g, or t
ttggaaacgtttttatggaagaacttgatattatctgggaaaggggacagcggttttatacggaacagacgggccaaatgcccggagggaagaaatacgattctctgtgcgcggggtgcgatgaatactatacctacaacttttaaccataacttcccgtcatatactgtcatcgggggcagggaaaggtataatacaacagggctttccgttgtactgctgaacaggggcgggcgctatgcccggcgtaatttgttccatgacttcgagaaaacaggctttgacaccgttgtttccgtggagccggatcccgcccattacgatcttgaagagctttccgcccgttttccgtttgtccggttcataataccgcataccaaaattactcttggcgaacagatcaatcttgcggtatctgaacttgtttccccgctttttttcgtcctatggaacgatcttaaaatggttgccggcgggactgctcacaggatggcggaaaggctgacccgatccgctgaaagcaaaggtaatggaaaaggcaaaagcaacggaaaaagccagttcatgcggctctgcactgtccccgtgattcaaaactcgcgccatgacacgattcctaccgtaatagccccggtaatacgccagaagaaaattcaaacccgccttcttaacccttcaagcgagggactcccaagcctgaccctcgtgccgatctga

SEQ ID NO: 50360 - protein, 238 aa, Unknown
  Obtained from environmental sample
  misc_feature (1)..(238): Xaa is any amino acid
METFLWKNLILSGKGDSGFIRNRRAKCPEGRNTILCARGAMNTIPTTFNHNFPSYTVIGGRERYNTTGLSVVLLNRGGRYARRNLFHDFEKTGFDTVVSVEPDPAHYDLEELSARFPFVRFIIPHTKITLGEQINLAVSELVSPLFFVLWNDLKMVAGGTAHRMAERLTRSAESKGNGKGKSNGKSQFMRLCTVPVIQNSRHDTIPTVIAPVIRQKKIQTRLLNPSSEGLPSLTLVPI

SEQ ID NO: 50361 - DNA, 828 bp, Unknown
  Obtained from environmental sample
  misc_feature (1)..(828): n is a, c, g, or t
atgtctcgccggattcccgnctttgaaaaaaaaggaaccgagaacgaaaacaagtactatcacttggtactgctggcgacaaatcgcgagggttactttaatctggtaaaactgtgttcccttgcctataccgagggtttttattaccggccccgcgttgatgaagaactgctgaagcaataccacggcgggcttatcgccctttccgcctgcgtttccggcgaaataccgaggcttatccgtgcggggaaaaccgccgaggcggaacaaaaggccctgcactaccgcgaactttttggcgcggatgggcaggggaaccccaacttttaccttgaattgcaggatcacggcattcccgccgaaacgctgagaggccccctttcccagcgggacatcaataaagaactcatcgccatttcccgcaaaaccggtataccgctggttgcgactaacgatgtgcattacctcaatcgtgaggattatatcgcccatgacattctgctctgcatcggcactgccaaattccgcaccgatgaaaaacgaaaaaaatactacggcgaccagttttattttaagactgccgatgaaatggcgaagctgtttgccgattgtcccgaagccattgaaaacaccgtccgcattgcccggcgttgtgttgccgatgtgccgaagatcggcgtcaaagaattaacccagtatctgccagactttgatattccgcctgattttgaaaatgccgatctgtatttgcgccaccttgcgggcgagggccttgccaagcgttatgcgcaagaaaagacggacggcggtattgcgtggcggaaataa

SEQ ID NO: 50362 - protein, 275 aa, Unknown
  Obtained from environmental sample
  DOMAIN (1)...(157): PHP domain
  misc_feature (1)..(275): Xaa is any amino acid
MSRRIPXFEKKGTENENKYYHLVLLATNREGYFNLVKLCSLAYTEGFYYRPRVDEELLKQYHGGLIALSACVSGEIPRLIRAGKTAEAEQKALHYRELFGADGQGNPNFYLELQDHGIPAETLRGPLSQRDINKELIAISRKTGIPLVATNDVHYLNREDYIAHDILLCIGTAKFRTDEKRKKYYGDQFYFKTADEMAKLFADCPEAIENTVRIARRCVADVPKIGVKELTQYLPDFDIPPDFENADLYLRHLAGEGLAKRYAQEKTDGGIAWRK

SEQ ID NO: 50363 - DNA, 498 bp, Unknown
  Obtained from environmental sample
  misc_feature (1)..(498): n is a, c, g, or t
atgaacgcgatcagttccaattcaaggtataaggccgaagccctcagactcctggaattggtcaacaccgatcataaacttcgggacatgttggcctttggaatcgaaggggtaaatttctcctatgtcaaacccaatgtggtacgcctcctcaccgccgaccaatggaatctcgcccgttaccagcagggcacttttttccagatgtccaccatggaaggagatcctgaggacgcctgggatcaggtacgccggcaaaacgaacaagccgaatcatccgtgctgcttgggttcatctttgacaacaaagccgtaatcaacgaggttgcgaactgcaaagccgtctttgacagatataagaatgagcttctcacaggcgcttccaatccggatacggctgttccagccatgatgcgtgatctcaacgcggctggcttccagaaaataatggatgaagcccagcggcaggtgaacgccttcaggggcaggactttctaa

SEQ ID NO: 50364 - protein, 165 aa, Unknown
  Obtained from environmental sample
  misc_feature (1)..(165): Xaa is any amino acid
MNAISSNSRYKAEALRLLELVNTDHKLRDMLAFGIEGVNFSYVKPNVVRLLTADQWNLARYQQGTFFQMSTMEGDPEDAWDQVRRQNEQAESSVLLGFIFDNKAVINEVANCKAVFDRYKNELLTGASNPDTAVPAMMRDLNAAGFQKIMDEAQRQVNAFRGRTF

SEQ ID NO: 50365 - DNA, 645 bp, Unknown
  Obtained from environmental sample
  misc_feature (1)..(645): n is a, c, g, or t
gtgaggaaaggcctcggtcttgcgcctcgtcccagcgtgcttgattccggcatcaagatacccgaactgccgggccgcccgccccagctttgtcagggctgtccgcatggcgacagttacaacgccattaacaaggcaatgacggaacttggcagtggccagggaagcccagattgcgcaataacttccgacatcggctgttacactctcggcgcttccccgccctactccgccattgaaagctgtgtctgcatgggggcctccgtatcaatggcgcgcggcgcggcggacgccggtttgaaatacgcggtcggcgttatcggggactccaccttcctccactcgggaattacctgccttgtagacgcgattcaatccgatactcccatgacgcttatcatccttgacaactccattgtcgccatgacaggctgtcaggaaaccatagttccatcagcgaaactaaaagatctgattctggggctgggcgttaaaccggaacaccttattgagcttgaagccaagggccagtttcttgaagaaaatgtcgtgaaactaaaaaaagaatttgagtacagggggctttcggttgtgatcttccgcagggaatgtcttgaggctttcaggaaacggaacaggaagtaa

SEQ ID NO: 50366 - protein, 214 aa, Unknown
  Obtained from environmental sample
  DOMAIN (64)...(200): Thiamine pyrophosphate enzyme, C-terminal TPP binding domain
  misc_feature (1)..(214): Xaa is any amino acid
MRKGLGLAPRPSVLDSGIKIPELPGRPPQLCQGCPHGDSYNAINKAMTELGSGQGSPDCAITSDIGCYTLGASPPYSAIESCVCMGASVSMARGAADAGLKYAVGVIGDSTFLHSGITCLVDAIQSDTPMTLIILDNSIVAMTGCQETIVPSAKLKDLILGLGVKPEHLIELEAKGQFLEENVVKLKKEFEYRGLSVVIFRRECLEAFRKRNRK

SEQ ID NO: 50367 - DNA, 765 bp, Unknown
  Obtained from environmental sample
  misc_feature (1)..(765): n is a, c, g, or t
ttgcgattggagcgcgtttttcagaccngcgttatcagcaaggcggatatgttcgcgaataccgcgcaggtgattcactttgacattgatcccgcggaagtgggaaaaaacattgagacgcacgcgtgggtgataggaaacttaaagaacaccttgtccgctttgcttgcaaaacttccctcgcgtcttgaaactgaatggcacggcgagattgacaaatggaaaacacacttgcctcaaacttacacccacgaggttacattcgcgaagaacgctctccatccccgctttattattgaagagaccgcaaaggctcttggaccggaaacaattgccgttactgacgtgggtcagcaccagatgtggacggcgcagttcttcccggccgagaagccaagaacatttatcagttccggcggcctcggaacgatgggcttcggactgggagccgcttgcggcgcaaaagtcgcgaaccctaaaaaacccgtggtactttttacgggagacggcagtttcagaatgaactgcgcggagatggcgactcttaccaacaataaaatcccgctgttgataattgtctttaacaacggagtccttggcatggtaaggcagtggcaaagtttcttttacgaaagccgctactcgcatacaactttgagcggcatccccgactttttaaaattatgcgacgcttacggcgttacgggcttccgcgccgcagacagggagtcttttaagaaagcgcttccacgccgccgccgctga

SEQ ID NO: 50368 - protein, 254 aa, Unknown
  Obtained from environmental sample
  DOMAIN (115)...(254): Thiamine pyrophosphate enzyme, C-terminal TPP binding domain
  misc_feature (1)..(254): Xaa is any amino acid
MRLERVFQTXVISKADMFANTAQVIHFDIDPAEVGKNIETHAWVIGNLKNTLSALLAKLPSRLETEWHGEIDKWKTHLPQTYTHEVTFAKNALHPRFIIEETAKALGPETIAVTDVGQHQMWTAQFFPAEKPRTFISSGGLGTMGFGLGAACGAKVANPKKPVVLFTGDGSFRMNCAEMATLTNNKIPLLIIVFNNGVLGMVRQWQSFFYESRYSHTTLSGIPDFLKLCDAYGVTGFRAADRESFKKALPRRRR

SEQ ID NO: 50369 - DNA, 897 bp, Unknown
  Obtained from environmental sample
  misc_feature (1)..(897): n is a, c, g, or t
gtggataccattttcggttatcccggcggagcggtcttaaacatttatgacgaactctacaagcacagcgacaagattcatcatatccttgtaagccacgaacagcacgccgcccatgccgcggatggttatgcccgttccaccgggaaaacaggtgtgtgcttagcaacttctggacccggcgcgacaaatcttataacaggaatcgctacggcgtacatggattcaattccgatggtagccattacaggcaatgtccccacgggaatcttgggcaaggacagttttcaggaagtggacattacaggcatatcaatgccggttgtaaaacacaactggattgtaaagaatgttgacgaccttgcggaagttatccgcgaagcgtttgaacttgccgcctccggtcgtcaagggcctgtgctgattgacataccgaaagatattactgcgctgaccgccgagtggaatccctcaaacaaaaagaaaggcaagttaaaagatgaggctctttccgcgcgggctaggcgtcttgatgaacggacatcaagagtcaggtttacagatgaagaaatcgaagaagctgcagcaatgattaaagatgccaagctgcctctactctatgctggaggaggagtcattagcgcaggagctgaagaagaacttaccgcgctcgctgaaaggcttaacgcccctgtggcattgagcctcatgggaataggggcgataccaaaagatcataggctctgtactggtcttgtcggaatgcacggaactgtggcgagtaacaaagctacgcagaaaacagatttgctaattgcgattggagcgcgtttttcagaccngcgttatcagcaaggcggatatgttcgcgaataccgcgcaggtgattcactttga

SEQ ID NO: 50370 - protein, 298 aa, Unknown
  Obtained from environmental sample
  DOMAIN (190)...(298): Thiamine pyrophosphate enzyme, central domain
  misc_feature (1)..(298): Xaa is any amino acid
MDTIFGYPGGAVLNIYDELYKHSDKIHHILVSHEQHAAHAADGYARSTGKTGVCLATSGPGATNLITGIATAYMDSIPMVAITGNVPTGILGKDSFQEVDITGISMPVVKHNWIVKNVDDLAEVIREAFELAASGRQGPVLIDIPKDITALTAEWNPSNKKKGKLKDEALSARARRLDERTSRVRFTDEEIEEAAAMIKDAKLPLLYAGGGVISAGAEEELTALAERLNAPVALSLMGIGAIPKDHRLCTGLVGMHGTVASNKATQKTDLLIAIGARFSDXRYQQGGYVREYRAGDSL

SEQ ID NO: 50371 - DNA, 657 bp, Unknown
  Obtained from environmental sample
  misc_feature (1)..(657): n is a, c, g, or t
gtgtacggctgtcttggcgacgcgttggtcaaagcggaaaacaaaaaccccgatgtcataagaccgattgaaaatccctactcctcgacaggcgggcttgccgcgttgaagggaaacatcgcccaggacggctgtgtcgtaaaacgaagcgcggtagccccttccatgttgaagcacgaaggtccggcaagagttttcgactccgaggaggccgcattcgacgcaataatgggaaaaaagataaaggcgggggacgtagtcgttatccgttacgaaggaccgaggggcggccccggcatgaaggagatgctcgctcccaccgcggcgctcgccggaatgggacttgacgacaaagtagcccttattacggacgggcgtttttccggcgcttccaaaggcgcgtccataggccacgtttcacctgaagcggcgaccggcggaaacatcggtatcatcaatgaaggggacataatcgcgattgacattgacgggctttcaataaacgtgaagattagcgaggaagaaattgcgcggcggcgtaaagattggaaacctctctccaagacccatgccggttacctcgcgcgctatgcggagcaagtcggctccgccgcgcagggcgcggtctttatttccgggacgcgtgagggaaattaa

SEQ ID NO: 50372 - protein, 218 aa, Unknown
  Obtained from environmental sample
  DOMAIN (3)...(211): Dehydratase family
  misc_feature (1)..(218): Xaa is any amino acid
MYGCLGDALVKAENKNPDVIRPIENPYSSTGGLAALKGNIAQDGCVVKRSAVAPSMLKHEGPARVFDSEEAAFDAIMGKKIKAGDVVVIRYEGPRGGPGMKEMLAPTAALAGMGLDDKVALITDGRFSGASKGASIGHVSPEAATGGNIGIINEGDIIAIDIDGLSINVKISEEEIARRRKDWKPLSKTHAGYLARYAEQVGSAAQGAVFISGTREGN

SEQ ID NO: 50373 - DNA, 744 bp, Unknown
  Obtained from environmental sample
  misc_feature (1)..(744): n is a, c, g, or t
atgctgcggctttgcgcggaaaagatttccagttccggatccaattttaatgatttggcggaacatgagcaggggtgcggctgcgcggatcagcagtcttatttgaacgacaaggaaaggctgctcatagcgtgtctgcgccgcggcgacagtaccgaagcccagagtattgcgcgggatatattggttgatttcactaatttggctgagggcgattttgagtacttcaaaatgaaggcaatagaactggtagttctggtttcaagaaccgggacaaattccgaaaacgaagcggaacttgtcgaagcgaacagccgtaatataaagcagcttgaggattccaataccgccggcgaattggctgatagcgtctgcctgattctggaaaggatggccgggaaaattttctcttttcagggaattcgccacgcgtccgcgctcaggaaagccgagcgttttatctgggagaattacaccagaaagatcagcctgaaggagattgccgacgcgtccgggctttccgcgccttatttcagcacggtattcaagaatgaaatgggcgagaacctttcaaattatcttaacaggcttagggtggaaaaagccttaatgatgcttggtgaaaccgattcccccattaacaaaatttcggcggactgcgggtttgaagaccaaagctggttttcaaaagtattcaaaagctataccggtattagcccctatgaataccgtaagaatggctaa

SEQ ID NO: 50374 - protein, 247 aa, Unknown
  Obtained from environmental sample
  DOMAIN (201)...(245): Bacterial regulatory helix-turn-helix proteins, AraC family
  misc_feature (1)..(247): Xaa is any amino acid
MLRLCAEKISSSGSNFNDLAEHEQGCGCADQQSYLNDKERLLIACLRRGDSTEAQSIARDILVDFTNLAEGDFEYFKMKAIELVVLVSRTGTNSENEAELVEANSRNIKQLEDSNTAGELADSVCLILERMAGKIFSFQGIRHASALRKAERFIWENYTRKISLKEIADASGLSAPYFSTVFKNEMGENLSNYLNRLRVEKALMMLGETDSPINKISADCGFEDQSWFSKVFKSYTGISPYEYRKNG

SEQ ID NO: 50375 - DNA, 1254 bp, Unknown
  Obtained from environmental sample
  misc_feature (1)..(1254): n is a, c, g, or t
atgaaagaagaaaatgaagttctatcaacctatatgcaggcgactggaagcaatgtgcagatttttgactgtaactcccagccatgtgagatggaaggctcgttcagcattgaacaaaatatctgccgttattgcaagagcttttcctgcggcagcaataactgccgggaaagacatgcaaacaaaatccgtgaagccagccgaaacggcagatcgcttgtttatcaatgcgatctgggattgatattctggatcagtccaatatacgacgagggaaaattttccggcgctctgcgcggttcgggattcctaaagtccggggccggagtctcaatttcagaaaaacatgagggcggatataatgacgcgatctccccggaagaatttgaacggcgtattctggcttttccgccctgtgatgatgaaaaaattaattccctctccgagatgctgcacttgtgcgcggaaaccctgtcaacgggtaatgaaaattaccacgagatactcagccttcgttttgaacaacaggcttctctttccgcccttattgacgatctaaaaacaaagtatcccaaaggttcaggccttccggtgtatccccttgaaaaagaacgcgagcttgtcgcgttgcttcgaaggggaaaaaaacaagaggcggaaaaactccttgatgaactgttgtccgtgattgtattttgcaatcaggatcatttcaggtatattcagcttagaacgattgaactggcagtgcttattgcccgcatcgggacaaattcccttggcagcgccgggatggaaaacaaggcccgttatataaagcaaatccaggacgcaaaaaccgttgaggaacttgcggcaatcctgcacagtatggtggaaaaaatagccgttcagatagttttgtttcagggcattccccacgcttccgccatgagaaaagcggaattttttatcaaagaaaatttcacccgaaaaatcagcctgcatgaagtcgcgaaaatagccggtctttccgcgccctatttcagcactatttttaaagaggaaatgggcgaaaacctttccaagtatattaacaggcagagggtacagaaggccggcaggatgcttttggaaacagacctttccctgtccgatatatcaaacgcctgttgttttgaggatcaaagctggttctcaaaaatattcaaaagctttaccggcatcagcccaagcaagtatcgcagtcaaggcgggaaaatcaacatagcctga

SEQ ID NO: 50376 - protein, 417 aa, Unknown
  Obtained from environmental sample
  DOMAIN (313)...(359): Bacterial regulatory helix-turn-helix proteins, AraC family
  misc_feature (1)..(417): Xaa is any amino acid
MKEENEVLSTYMQATGSNVQIFDCNSQPCEMEGSFSIEQNICRYCKSFSCGSNNCRERHANKIREASRNGRSLVYQCDLGLIFWISPIYDEGKFSGALRGSGFLKSGAGVSISEKHEGGYNDAISPEEFERRILAFPPCDDEKINSLSEMLHLCAETLSTGNENYHEILSLRFEQQASLSALIDDLKTKYPKGSGLPVYPLEKERELVALLRRGKKQEAEKLLDELLSVIVFCNQDHFRYIQLRTIELAVLIARIGTNSLGSAGMENKARYIKQIQDAKTVEELAAILHSMVEKIAVQIVLFQGIPHASAMRKAEFFIKENFTRKISLHEVAKIAGLSAPYFSTIFKEEMGENLSKYINRQRVQKAGRMLLETDLSLSDISNACCFEDQSWFSKIFKSFTGISPSKYRSQGGKINIA

SEQ ID NO: 50377 - DNA, 444 bp, Unknown
  Obtained from environmental sample
  misc_feature (1)..(444): n is a, c, g, or t
ttggcgggaagtcgccgctgttgtttcaaaggactatcccaatatagaaacaagttacctctatgtgacaacgccgccatgcagttgatacgcgccccggggcaattcgacgttatagttacgtctaacttattcggggacattctttccgatgaggcctcggtgcttacgggctctatcggaatgttggcctccgcgagtctcggcgcgcccgcgcaaaccggtggaacaaggccgggaatgtacgagcctattcacggctccgcgcccgacatcgcggggaaggacatcgcgaatccccttgcgacgattctttcggcggcgatgatgctccgctactccttcgggcttgagaaggaagcggaggccattgaaagcgccgttaacaatgtgctggatcaggggctgagaacaggagacatcgcaagcagaagcggcgcgtaa

SEQ ID NO: 50378 - protein, 147 aa, Unknown
  Obtained from environmental sample
  DOMAIN (1)...(145): Isocitrate/isopropylmalate dehydrogenase
  misc_feature (1)..(147): Xaa is any amino acid
MAGSRRCCFKGLSQYRNKLPLCDNAAMQLIRAPGQFDVIVTSNLFGDILSDEASVLTGSIGMLASASLGAPAQTGGTRPGMYEPIHGSAPDIAGKDIANPLATILSAAMMLRYSFGLEKEAEAIESAVNNVLDQGLRTGDIASRSGA

SEQ ID NO: 50379 - DNA, 738 bp, Unknown
  Obtained from environmental sample
  misc_feature (1)..(738): n is a, c, g, or t
atgagcaatgaaaaggagactaaaatgaaatttacaattgcggtaatacccggagacgggatcgggcctgaggtgatgacaccaactcttaaagtccttgacgctgttggcggcaagaacggccatacatttaactatgtcgaacttgaagcgggcgggatcgccattgatcacacgggggaaccattacccaaagaaacccttgaaaaggcgaaacaatgcgacgcccttcttctgggcgcggtcggaggtcccaaatgggacaaccttcccggccatctgcgtccggaaagagctttgctggggcttcgcgcggaacttgatgtcttcgcaaaccttcgccctgccgctttgcttccccaattacgcgcggcatgcccgcttaaagacgaagtgttagccgcaagtaacagcgaaggaaaagccgctttcgatttattgatcgtaagggaactgacaggcgggctttacttcggcaaacgcgggcggctggacgaaccttcaaacggtcacagtcccggttccgcttttgacaccgaaacatattcctgggcggaaattgagcgcgtactccgcgcgggatatgaagccgttcgcaggaaaaaactctgcatagtggacaaagcaaacgtgcttgagtcttcgcgtttttggcgggaagtcgccgctgttgtttcaaaggactatcccaatatagaaacaagttacctctatgtgacaacgccgccatgcagttga

SEQ ID NO: 50380 - protein, 245 aa, Unknown
  Obtained from environmental sample
  DOMAIN (12)...(245): Isocitrate/isopropylmalate dehydrogenase
  misc_feature (1)..(245): Xaa is any amino acid
MSNEKETKMKFTIAVIPGDGIGPEVMTPTLKVLDAVGGKNGHTFNYVELEAGGIAIDHTGEPLPKETLEKAKQCDALLLGAVGGPKWDNLPGHLRPERALLGLRAELDVFANLRPAALLPQLRAACPLKDEVLAASNSEGKAAFDLLIVRELTGGLYFGKRGRLDEPSNGHSPGSAFDTETYSWAEIERVLRAGYEAVRRKKLCIVDKANVLESSRFWREVAAVVSKDYPNIETSYLYVTTPPCS

SEQ ID NO: 50381 - DNA, 630 bp, Unknown
  Obtained from environmental sample
  misc_feature (1)..(630): n is a, c, g, or t
gtggggaacgaccggcatattataatgagcgaagtcggcggacgttcggcaatagcggaaagggcgaagaagatcgagccttccatcacaagggatcaccccataaccgccgcccttgcgaaaaagctaaaagagcttgaatcggagggctggcagtttgaaggagcggacggcagtttcgatcttttagtccgccgcgagcttggccgctacaaaccgttgtttaacattgaggcttaccgcgtggtaagcgaacaccccaccggagagacaatagcctgttcccacgcctgggttaaagtgcttgttgacggacaggaagaaattgccgccgcggagggagacgggcccgtcaacgcgatggatggcgctcttcgcagggccttgaaacacttttacccggaactgcaaacggtccgtcttaccgattacaaagtccgtgtaatcgacggcaacgccgcgaccgccgcaaaggtgcgcgtgcttattacctcttccgacggcaagcaaacatggacaaccgtaggggtttcggaggacattattgatgccagccgctgcgctcttgtggattcaatagaatacaaattaattgacgacattgaacgacgcttcaaggcgtacctatga

SEQ ID NO: 50382 - protein, 209 aa, Unknown
  Obtained from environmental sample
  DOMAIN (54)...(197): LeuA allosteric (dimerisation) domain
  misc_feature (1)..(209): Xaa is any amino acid
MGNDRHIIMSEVGGRSAIAERAKKIEPSITRDHPITAALAKKLKELESEGWQFEGADGSFDLLVRRELGRYKPLFNIEAYRVVSEHPTGETIACSHAWVKVLVDGQEEIAAAEGDGPVNAMDGALRRALKHFYPELQTVRLTDYKVRVIDGNAATAAKVRVLITSSDGKQTWTTVGVSEDIIDASRCALVDSIEYKLIDDIERRFKAYL

SEQ ID NO: 50383 - DNA, 1002 bp, Unknown
  Obtained from environmental sample
  misc_feature (1)..(1002): n is a, c, g, or t
gtgcttgaagtgatgaccaaagaccttgttgtactgagcggcgagcctacggtggccgaggcgcaggagaaattcggtgaacgcagagttgaaaaactccccattgtagacaaggaaggccgcctgattgggcttattaccgtgaaggacatggataagcacaaaagctatccttacgcaagtaccgatcaatcgggcaggctgatcgtgggggcggcggtatccccgcaggattacccgcagaggatgcccctgttaaaaaacgccaaagtcgattttgtcgtgcttgacacggcccacggcgattcaaaaaatgtcatggacgcggttcgggggataaaaaaagaattcggcatacctgtaattggcgggaatgtcgcgtccaaagaaggaacgcgccgcctgatcgaagcgggggcggacgcggtaaaagtgggcatcggtcccggatcaatctgcacaacgcggatcgtcgctggtatcggtatgccgcaattcacggcggtgctggactgcgccgaggaagcggcaaaatcgaatattcccgttattgccgatggaggcataaaattctccggggatattaccaaggccataggcgcaggggccagcgtggtgatgataggcaacctctttgccggactcaaggaagcaccgggcagggagataatttttgacggcaggatcttcaaggagtaccgcggcatgggcagtatgggcgcgattgctgacggcgcgggcgaccgttaccagatgggcaaggacgaggagccggttccggaaggcatagagggccgcgtcccctacaagggtgagttgtctacctacatgaatcagcttatttcaggtctgcgcaagggaatgggctactgcggttgtcacaatattgaagaactaaagaagcaccgcaaatttgtaaaaattaccgccgccggtntgcgggaaagccacgcccacgacatcaccataacccaggaagctcccaattattcacgggcttaa

SEQ ID NO: 50384 - protein, 333 aa, Unknown
  Obtained from environmental sample
  DOMAIN (3)...(140): CBS domain pair
  misc_feature (1)..(333): Xaa is any amino acid
MLEVMTKDLVVLSGEPTVAEAQEKFGERRVEKLPIVDKEGRLIGLITVKDMDKHKSYPYASTDQSGRLIVGAAVSPQDYPQRMPLLKNAKVDFVVLDTAHGDSKNVMDAVRGIKKEFGIPVIGGNVASKEGTRRLIEAGADAVKVGIGPGSICTTRIVAGIGMPQFTAVLDCAEEAAKSNIPVIADGGIKFSGDITKAIGAGASVVMIGNLFAGLKEAPGREIIFDGRIFKEYRGMGSMGAIADGAGDRYQMGKDEEPVPEGIEGRVPYKGELSTYMNQLISGLRKGMGYCGCHNIEELKKHRKFVKITAAGXRESHAHDITITQEAPNYSRA

SEQ ID NO: 50385 - DNA, 474 bp, Unknown
  Obtained from environmental sample
  misc_feature (1)..(474): n is a, c, g, or t
atgccgcggtactccttgaagatcctgccgtcaaaaattatctccctgcccggtgcttccttgagtccggcaaagaggttgcctatcatcaccacgctggcccctgcgcctatggccttggtaatatccccggagaattttatgcctccatcggcaataacgggaatattcgattttgccgcttcctcggcgcagtccagcaccgccgtgaattgcggcataccgataccagcgacgatccgcgttgtgcagattgatccgggaccgatgcccacttttaccgcgtccgcccccgcttcgatcaggcggcgcgttccttctttggacgcgacattcccgccaattacaggtatgccgaattctttttttatcccccgaaccgcgtccatgacattttttgaatcgccgtgggccgtgtcaagcacgacaaaatcgactttggcgttttttaacaggggcatcctctgcgggtaa

SEQ ID NO: 50386 - protein, 157 aa, Unknown
  Obtained from environmental sample
  misc_feature (1)..(157): Xaa is any amino acid
MPRYSLKILPSKIISLPGASLSPAKRLPIITTLAPAPMALVISPENFMPPSAITGIFDFAASSAQSSTAVNCGIPIPATIRVVQIDPGPMPTFTASAPASIRRRVPSLDATFPPITGMPNSFFIPRTASMTFFESPWAVSSTTKSTLAFFNRGILCG

SEQ ID NO: 50387 - DNA, 414 bp, Unknown
  Obtained from environmental sample
  misc_feature (1)..(414): n is a, c, g, or t
atgagttggctggacgcgttagtcattggtattttgcaggccgttgccattattcccggcgtgtcccgttccggcgctaccctgtccggtgcactttcccgcaggcttgaccgtgactttgccgctcgtttttcatttctgctgtcaattccggcaatactcggcgcggcagtttttcagattaaagacctggtaaaagccagcaatacgacagtcttgtcggtatcaaacggcggcattggaacggcggcaatcattgcgggaactttaagcgccgccattgtgggttttttcgccgtgcggttgatgttgaaaattgtcagggaaaagtcgctgtggggctttgccatttataccggagctttgggtttgctggttattgttgatcagcttgcaacgcatctggtgttttaa

SEQ ID NO: 50388 - protein, 137 aa, Unknown
  Obtained from environmental sample
  DOMAIN (1)...(126): Bacitracin resistance protein BacA
  misc_feature (1)..(137): Xaa is any amino acid
MSWLDALVIGILQAVAIIPGVSRSGATLSGALSRRLDRDFAARFSFLLSIPAILGAAVFQIKDLVKASNTTVLSVSNGGIGTAAIIAGTLSAAIVGFFAVRLMLKIVREKSLWGFAIYTGALGLLVIVDQLATHLVF

SEQ ID NO: 50389 - DNA, 594 bp, Unknown
  Obtained from environmental sample
  misc_feature (1)..(594): n is a, c, g, or t
atgccatttgttgatgcggaacgtacccaactctatttgcggtgcgctttattcgggccgtcaggctcaggcaaaacgatgacggctctcaggatggcgaagggcatcgctgaaaaattgggagtcccttttgcggttatcgacacggaagctcgctcggcgacaaagtatgccgacaggtttgcttttaaggtagacaacctcgaaaagaaaaccatcgaccattaccttgcttcaatggatgaagccaggaaagccgggtacaaggtgctggttatcgacagcctctcccacggatggcgggaactgacagaggaagttgaccggattacccaatcgagcaacagcaagaacagccttttgtcctgggggaaagtcgggccaaaacagaagcggttcatcgatgccattttgaattatcccggccatatcatcgtgaccatgaggagcaagaccgaatgggttatcggcacgggcgaaaacggaaagatcgccgccgagaagctgggccttgctcccgaacaaggcaagggaattgaatatgagttcagcaattttacatttacccgtcaggctcatcgtcttggactataa

SEQ ID NO: 50390 - protein, 197 aa, Unknown
  Obtained from environmental sample
  misc_feature (1)..(197): Xaa is any amino acid
MPFVDAERTQLYLRCALFGPSGSGKTMTALRMAKGIAEKLGVPFAVIDTEARSATKYADRFAFKVDNLEKKTIDHYLASMDEARKAGYKVLVIDSLSHGWRELTEEVDRITQSSNSKNSLLSWGKVGPKQKRFIDAILNYPGHIIVTMRSKTEWVIGTGENGKIAAEKLGLAPEQGKGIEYEFSNFTFTRQAHRLGL

SEQ ID NO: 50391 - DNA, 882 bp, Unknown
  Obtained from environmental sample
  misc_feature (1)..(882): n is a, c, g, or t
atgtattcgtttgggatgaccgaccgggacataaaatcccacctggagaagatatacaacgtcgaagtgtcgccggatcttataagccgcgtaacgaatgcggtattagaagacgtaagggaatggcaaagccggcctttggaaaaatcatacgcgatagtgtacctggacgcgctgagggtcaaaggcaaaacggacgggaaaagctgccagaagagcgtttatacggcgttggcggttaattttgaggggaaaaaggaggttttagggctgtggatagcggaaagcgaaggggcgaagttttggatgggcgtgctggccgagcttaaaaaccgcgggcttcaagacatcctaatcgcctgcatggacgggctgaccggcttccccgaggcggtgcgggcggtgtaccccaacacccgagtgcagctttgcatcgtccacatggtccgcaattctaccaagttcgtctcgtacaaggacattaaaaaagtatgcgcggatttgaaaacggtttattccgccccgaccgaagaatccggccgcgcggccttggaagaatttagaaaagcatgggacgacaaatacccaatgatttaccagtcatgggatcgaaggtgggatgacctgagtgaattcttcaagtaccccgatgagatccgccgtgcaatttatacgaccaacgcgatcgaatcgcttaattaccagctgcggaaggtaacaaaaaaccgctcgatattttcgacagacgatgctatatttaagatactgtatttggcggttcggaatgcgtctgaaaaatggacgatgccaattaaaaattgggggcaggctttaaaccagtttgccattgagtttggaaaagagcgggttccgctcttatga

SEQ ID NO: 50392 - protein, 293 aa, Unknown
  Obtained from environmental sample
  DOMAIN (1)...(270): Transposase, Mutator family
  misc_feature (1)..(293): Xaa is any amino acid
MYSFGMTDRDIKSHLEKIYNVEVSPDLISRVTNAVLEDVREWQSRPLEKSYAIVYLDALRVKGKTDGKSCQKSVYTALAVNFEGKKEVLGLWIAESEGAKFWMGVLAELKNRGLQDILIACMDGLTGFPEAVRAVYPNTRVQLCIVHMVRNSTKFVSYKDIKKVCADLKTVYSAPTEESGRAALEEFRKAWDDKYPMIYQSWDRRWDDLSEFFKYPDEIRRAIYTTNAIESLNYQLRKVTKNRSIFSTDDAIFKILYLAVRNASEKWTMPIKNWGQALNQFAIEFGKERVPLL

SEQ ID NO: 50393 - DNA, 351 bp, Unknown
  Obtained from environmental sample
  misc_feature (1)..(351): n is a, c, g, or t
ttgagcggatgggaaggcgcgccgcggtttttaagggacgctgccgccctgcttggcctggcgaatgtttcagttgaagaagcgaatatggaagaacttgcccaggccgccaatgaccgctttgatttaattgtattcagggcttttaagcctttggacggcgcaatattaaagaagctctttgctttactaaaaccgtcggggctcctttccgcgtacaagggccgcaggcaggttatagaagaagagatggacggtttgcaagacttgtcctgggaagcgcttcgtttggaagtgcctttccttgcggaagaacggcacttgctgttaataaaacggaaaataatatag

SEQ ID NO: 50394 - protein, 116 aa, Unknown
  Obtained from environmental sample
  misc_feature (1)..(116): Xaa is any amino acid
MSGWEGAPRFLRDAAALLGLANVSVEEANMEELAQAANDRFDLIVFRAFKPLDGAILKKLFALLKPSGLLSAYKGRRQVIEEEMDGLQDLSWEALRLEVPFLAEERHLLLIKRKII

SEQ ID NO: 50395 - DNA, 543 bp, Unknown
  Obtained from environmental sample
  misc_feature (1)..(543): n is a, c, g, or t
gtgcacggcaaaaagcggatcccggtgcgggtgataaagctctcgcttgacagcaaggagacagagacgctgataaccagccttaccaatagaaggtacggcgtggaagactttaagcggctgtatttcaagcgctggcctgttgaaacaaaatacgatgtcattaagaagaagctggagatagagaacttttcagggaagcttgtggacaacatccggcaggatttctatgcgacaatgacattagcgaatatagcggcggatttttatcgcgatgcacaggcggatgtagaggcacagcaggagcggaaagagaacaaataccaataccaggtgaatgtgagccatgagataggggtgttaaaagacaggctggtaaaaacgctgatagaagacgatgataagaaacgctctgcgatgttcgatgaaatgctcaatctgcttaagaagaggctcattccaatacgccctaaccgttccctgcctagggttgcattcccgcgcagagtaaaatttcaccataaccataaatccaactgttga

SEQ ID NO: 50396 - protein, 180 aa, Unknown
  Obtained from environmental sample
  misc_feature (1)..(180): Xaa is any amino acid
MHGKKRIPVRVIKLSLDSKETETLITSLTNRRYGVEDFKRLYFKRWPVETKYDVIKKKLEIENFSGKLVDNIRQDFYATMTLANIAADFYRDAQADVEAQQERKENKYQYQVNVSHEIGVLKDRLVKTLIEDDDKKRSAMFDEMLNLLKKRLIPIRPNRSLPRVAFPRRVKFHHNHKSNC

SEQ ID NO: 50397 - DNA, 915 bp, Unknown
  Obtained from environmental sample
  misc_feature (1)..(915): n is a, c, g, or t
atggacaattctaaaacgaaaaaggaaggcgtgagttatacatataaaaagtttgagggataccacccaatctttgcctacatagggaaagaaggctacatgatagacaatgagctgcgccccggctcacagcattgccaggagggaacgcccgagtttctaagtctgttattggaaaggcttccggataatctgagcggcctgccgctgttatttcgtttagacagcggaaatgacagtatagataccataaaagcaatatttaatgataccaaggaaaggaatcgatttctgatactaaagcggaatatgcgaagagaaaaaggtgagaattggcttaagtatgcacaagagcacggtaaagcaaaacaggtgagagccggtaagaacatctggagcggacatgcgtatgacatgaatcctgacggctttaataagattcattgtgtatatgagataacagaacgaaccatagatgaaaataggaatccactgcttatccacgacatagaggtaaacacatggtggacaaatatgtcgtatgcagtagaaacaataatagggctttatcacgaccatggaaccagcgagcaatatcatagcgagttgaaacatgatatggatattgaacggctgccatccggaaagttcaatgtaaacgaattgtatctgatgatagggatgaacgcatataatgtattgcgatatatagggcagagcgccaaagcgatgaaaacactattgcccataaagagccgaagctcgcggatgcggcttggtaaagttattcaaaacattattggaattgcgataaaatatattagtcatgccggaaagaaaataatcaaactctgggaaggtaatccttggagcctgctatttttcaaacttgactttatctttcagcgtttgtaa

SEQ ID NO: 50398 - protein, 304 aa, Unknown
  Obtained from environmental sample
  DOMAIN (1)...(233): Transposase DDE domain
  misc_feature (1)..(304): Xaa is any amino acid
MDNSKTKKEGVSYTYKKFEGYHPIFAYIGKEGYMIDNELRPGSQHCQEGTPEFLSLLLERLPDNLSGLPLLFRLDSGNDSIDTIKAIFNDTKERNRFLILKRNMRREKGENWLKYAQEHGKAKQVRAGKNIWSGHAYDMNPDGFNKIHCVYEITERTIDENRNPLLIHDIEVNTWWTNMSYAVETIIGLYHDHGTSEQYHSELKHDMDIERLPSGKFNVNELYLMIGMNAYNVLRYIGQSAKAMKTLLPIKSRSSRMRLGKVIQNIIGIAIKYISHAGKKIIKLWEGNPWSLLFFKLDFIFQRL

SEQ ID NO: 50399 - DNA, 471 bp, Unknown
  Obtained from environmental sample
  misc_feature (1)..(471): n is a, c, g, or t
atggctactaaccacaagcctgttataaagggaactgaccacggtatttggcggcggataaagcttatacctttcctaacacgcatagaggaagaaaaccaggacaaacaccttgagcagaagttgatgaaagaagggcctgggattttgaactggcttgtcgaaggggcaaggcggtggcgaaatgagggattaaaaacgccgtcaattattgtcagtgcaacggatgaataccgggcggagatggatgttatcgggaacttcctaaaggagcgttgtatccagggagaggaaggctgtatcaaggcaagggaactttttaagtgctatcaggaatggtgcgacgaccacaacgaacacgctgtaagcgagcgtttttttggtttgcggttaaaggaattggggcttgagcaaaaacgcatgaacgatgggcggtactggcatggtattcagattagggcgcaagggtag

SEQ ID NO: 50400 - protein, 156 aa, Unknown
  Obtained from environmental sample
  misc_feature (1)..(156): Xaa is any amino acid
MATNHKPVIKGTDHGIWRRIKLIPFLTRIEEENQDKHLEQKLMKEGPGILNWLVEGARRWRNEGLKTPSIIVSATDEYRAEMDVIGNFLKERCIQGEEGCIKARELFKCYQEWCDDHNEHAVSERFFGLRLKELGLEQKRMNDGRYWHGIQIRAQG

SEQ ID NO: 50401 - DNA, 336 bp, Unknown
  Obtained from environmental sample
  misc_feature (1)..(336): n is a, c, g, or t
atggcggcgtttgcccagtttggcagcgacctggacaaggctactcaggacaaactcgcacagggcgagcggctgatggaaacgctcaagcagccccagttttcaccatattctatggaagagcaggcggcaattttattccttgcggtaaacggttacctcatggacgttaaaacagaagaagtttcttcatttattaaaaactatctttcctatcttaaaacgcagaaggctgatttgttaattagtattgcggaaacaggcgctatctccacagaacaggaaaatgagatgcgtaacgcggtggaatcatttaagaaacacaagcaggtttaa

SEQ ID NO: 50402 - protein, 111 aa, Unknown
  Obtained from environmental sample
  DOMAIN (1)...(83): ATP synthase alpha/beta chain, C terminal domain
  misc_feature (1)..(111): Xaa is any amino acid
MAAFAQFGSDLDKATQDKLAQGERLMETLKQPQFSPYSMEEQAAILFLAVNGYLMDVKTEEVSSFIKNYLSYLKTQKADLLISIAETGAISTEQENEMRNAVESFKKHKQV

SEQ ID NO: 50403 - DNA, 939 bp, Unknown
  Obtained from environmental sample
  misc_feature (1)..(939): n is a, c, g, or t
gtgccatcaggcattattgaaagtttttccgataccatgtcacgttacggaaagatcaggatgaccgccgcgcccgaacccgccgctgacaatcaggatatgctgtttctggaaatcgccgataaagcggtactggcggaagtcgaatccataaaattacttgaaaaatatttaaaaaaaaccgagaaagggtttttgctaaaactggttgacaggggaacggtaaaacaggcgcttatcagacagggatggccggtgcgggacgaagcgccgcttgtttccggcgacagtttggaaattacgctgcgcggcaaatgcctgtcagggaaacctttcgcccccagggattatcaggtcgaagcggcccacgctgtgcttggggacggaaggccggggacaggctacggcgttgtagccctgccctgcggttccgggaaaaccattgtcggcatggttataatgtcattgttaaaaaccaatacgttgattctaacaaccaatgtcgcggccgtacatcaatggatcgaggagttagctgataaaacagaaataagccgcgaacagatagccgaatattccggagattcaaaatccgtagcgcccgtcaccatagccacctaccagattatcacctggaggcccggcagggattcggattttccgcatttcaggctgttcagggagcggcattgggggcttataatttatgatgaagtgcatattttacccgcgcctgtatttcgcgtaacggcagagctgcaggcggtaaggcggctcgggcttaccgccacgctggtcagagaagacggcgaggaggacgcggtattcagtctgtggggccaaagcgctacgatgtgccgtggaaggacctggagaacaagggctggattgccggagctttctgcacggaaattcgcattgatatgcctgagaatttaa

SEQ ID NO: 50404 - protein, 312 aa, Unknown
  Obtained from environmental sample
  DOMAIN (115)...(273): DEAD/DEAH box helicase
  misc_feature (1)..(312): Xaa is any amino acid
MPSGIIESFSDTMSRYGKIRMTAAPEPAADNQDMLFLEIADKAVLAEVESIKLLEKYLKKTEKGFLLKLVDRGTVKQALIRQGWPVRDEAPLVSGDSLEITLRGKCLSGKPFAPRDYQVEAAHAVLGDGRPGTGYGVVALPCGSGKTIVGMVIMSLLKTNTLILTTNVAAVHQWIEELADKTEISREQIAEYSGDSKSVAPVTIATYQIITWRPGRDSDFPHFRLFRERHWGLIIYDEVHILPAPVFRVTAELQAVRRLGLTATLVREDGEEDAVFSLWGQSATMCRGRTWRTRAGLPELSARKFALICLRI

SEQ ID NO: 50405 - DNA, 630 bp, Unknown
  Obtained from environmental sample
  misc_feature (1)..(630): n is a, c, g, or t
gtggggccaaagcgctacgatgtgccgtggaaggacctggagaacaagggctggattgccggagctttctgcacggaaattcgcattgatatgcctgagaatttaaaaataccttacgctgtggcaacccgccgcgaaaagtaccgcattgcaagcgagaatcctctaaagaacgaagcggtcattcaactaatcgaaaaccaccgggatgatcagatccttgtgataggccagtacatcagccagctggaaaacctcgcccgcgttttaaaagcgcccttaataaccggcaaagcgcccaacaccgaaagggaacgtatctacggcgcgttcaagaaaggtgaagtacgggtgattgtcgtaagtaaagtggctaactttgccattgatttgccggacgcttcaatggcgattcaggtgtcaggttcctttggctcgcgtcaggaagaggcccagcgccttggccgcatccttcgccccaaggacaggaactcgtggttctacacactggtttcccgctacacagtggaagaggaattcgccgccaaccgccagcagttcctggcggaacaggggtacaagtattccattcaacactggacagcggatgaaatggaggcggtcgtatga

SEQ ID NO: 50406 - protein, 209 aa, Unknown
  Obtained from environmental sample
  DOMAIN (89)...(161): Helicase conserved C-terminal domain
  misc_feature (1)..(209): Xaa is any amino acid
MGPKRYDVPWKDLENKGWIAGAFCTEIRIDMPENLKIPYAVATRREKYRIASENPLKNEAVIQLIENHRDDQILVIGQYISQLENLARVLKAPLITGKAPNTERERIYGAFKKGEVRVIVVSKVANFAIDLPDASMAIQVSGSFGSRQEEAQRLGRILRPKDRNSWFYTLVSRYTVEEEFAANRQQFLAEQGYKYSIQHWTADEMEAVV

SEQ ID NO: 50407 - DNA, 729 bp, Unknown
  Obtained from environmental sample
  misc_feature (1)..(729): n is a, c, g, or t
ttgggcgaaacttacagggctgaaggggaaattggccttgctcttcgccagtacgaaaaagcatggagcgaaaggagccttctggaaattccgggatttgagatagaaattctttataaaattaccgagatgcacagaatacgcggaaattatcaggaaatggaaaggcgggcaaatgaaataatcgaagggctaggagcaaacggccttccaagggacagcctttgggctggtagttcccttggttcttcaaatcagatccgtgcagccatgtcaaggatactggaaaatgaaggggttaaccgcttcctgaccctataccgacacaccaatactgatacggaaagggcccatcgccttctgggatttttttactactcttcaagcaggtatactcaggcgatggagcatttaatgtttgcttttttaattcaaaattctttacttatagaagaagtaatccgccgggattatgactataacttttccacactggagaatttgataatggttgttcaaaggcggccggaacttgccgcttttatggaagaaacggaatattatagaaccatttattatctagctaccgttttatacgcctcgggaaaaacgagaccagcttctcagctctgggcttttctggcaggcaccagcaactcaggagagtggggaaaccgcgcaaggagaaacccaagcccgtttattgaaaggccgctggaaagattctga

SEQ ID NO: 50408 - protein, 242 aa, Unknown
  Obtained from environmental sample
  misc_feature (1)..(242): Xaa is any amino acid
MGETYRAEGEIGLALRQYEKAWSERSLLEIPGFEIEILYKITEMHRIRGNYQEMERRANEIIEGLGANGLPRDSLWAGSSLGSSNQIRAAMSRILENEGVNRFLTLYRHTNTDTERAHRLLGFFYYSSSRYTQAMEHLMFAFLIQNSLLIEEVIRRDYDYNFSTLENLIMVVQRRPELAAFMEETEYYRTIYYLATVLYASGKTRPASQLWAFLAGTSNSGEWGNRARRNPSPFIERPLERF

SEQ ID NO: 50409 - DNA, 1491 bp, Unknown
  Obtained from environmental sample
  misc_feature (1)..(1491): n is a, c, g, or t
ttgtattcgaaaaatggggataaactagaagttaagcagaacgaagatttaactgttaccctgaaagataaaaaagattttgaaaagggagacgttatttgcggtaaaatcaaatttttactaaaaagaaacaataaaaaaaggtgtttaattcaactattggaaataaatgacaatccaaacgatgagcttggagatagctctccattaagatatttttttgacgatgatgtttctgtgatggatggagaaatcgagaatattaaatacgaggtagattttgttaatgcacaagactatataatggcgttaacatgcagagacgaaaatggatcttgggtacatgattatccgaagagcgacaccataatggtaaaaaggaatacatattctataaaaaagcaaaaagaagcgattgcgacgctaaaagatatgccggtaaaagagcatcgtcaactgataagactttttgaagataaagaaattaaaaatttgtggaaaaaaccaaataacgagccgattcaaaagtggtttattctaaaagaggatcaatggagtggagtcattgaacagagacgctttgttaaacaagcattgaatactccggattttgccatacttgaaggacctccgggtagtggaaaaactaccgttattttagaacttatttgccaattggtaaaacgaggaaagaaggttcttttgtgcggttcaacgcatgtggctgttgataatattctagagcgcttaaaaaagactcgcggagaaagttcttggctcaaagaatttcagattttacctattcggataggaaaagaagaaagtataaaaaataatgatgtccgtgcgtttcaacttgagaatttgattcatgaaaacaacataaacgcagaatgtgatgaacatgacaaaaaatataaatacgagggtcatgtcagattacttttggattctgcgaatttggtttgcggaacaaccatcggaattttgcagcacccaaaatttaaaaaaaggaatagatggttggataaaaagatcaataattcctggaaagaaccgattgttccggaatttgattatttgataatagatgaaagttccaaaacgacgtttcaggaatttcttgtaccagcgctatacgcccaaaaatggattttggtaggagactgtatgcaactatcacccttcacagacaacgaaataataatttccaaccttgaaagacttcgtatcggcgttacgttgacaccaataaacgagcatttgcaagacgctatattttatttgtatacattaaaacatttgctgatacggaataatgagaaggcaaaaaacaataaattcattctatgcgtttccgaggaaaaaatcaaggaaattgaaaatgagttgaaaaaaggcagaaaagaggattttggcgagtgtttatactattttattaaaagaggacaatcaagaaacaataaatactcttgcattagtagcttatga

SEQ ID NO: 50410 - protein, 496 aa, Unknown
  Obtained from environmental sample
  misc_feature (1)..(496): Xaa is any amino acid
MYSKNGDKLEVKQNEDLTVTLKDKKDFEKGDVICGKIKFLLKRNNKKRCLIQLLEINDNPNDELGDSSPLRYFFDDDVSVMDGEIENIKYEVDFVNAQDYIMALTCRDENGSWVHDYPKSDTIMVKRNTYSIKKQKEAIATLKDMPVKEHRQLIRLFEDKEIKNLWKKPNNEPIQKWFILKEDQWSGVIEQRRFVKQALNTPDFAILEGPPGSGKTTVILELICQLVKRGKKVLLCGSTHVAVDNILERLKKTRGESSWLKEFQILPIRIGKEESIKNNDVRAFQLENLIHENNINAECDEHDKKYKYEGHVRLLLDSANLVCGTTIGILQHPKFKKRNRWLDKKINNSWKEPIVPEFDYLIIDESSKTTFQEFLVPALYAQKWILVGDCMQLSPFTDNEIIISNLERLRIGVTLTPINEHLQDAIFYLYTLKHLLIRNNEKAKNNKFILCVSEEKIKEIENELKKGRKEDFGECLYYFIKRGQSRNNKYSCISSL

SEQ ID NO: 50411 - DNA, 633 bp, Unknown
  Obtained from environmental sample
  misc_feature (1)..(633): n is a, c, g, or t
gtggggaatacgcacggagtaccggcgcacggtatgcgccttgggaaacacccccacgggcgtggggaatacgttcctccacccaagcgacaggcacaagccatagaaacacccccacgggcgtggggaataccgctcccgctttgcctgcgcttctggcgcaaaagaaacacccccacgggcgtggggaataccagattaaaaatgcctgcttgcatctgcgcgaagaaacacccccacgggcgtggggaatacccgcccgcacccgaagggggcggcgaggggaaagaaacacccccacgggcgtggggaatacccctcatcaggctgtctttttgcctttcgacgagaaacacccccacgggcgtggggaatactattgccaactttaccacttgcggcatagtcgggaaacacccccacgggcgtggggaatacgcgcaatccgcgcaaatggtgttaccgctatgggaaacacccccacgggcgtggggaatactccatttgtctatcatgccatcttacaaatttagaaacacccccacgggcgtggggaatacaaaaaggggaaaaaagggaaaaactgtgataaagaaacacccccacgggcgtggggaatacagcaggaaatga

SEQ ID NO: 50412 - protein, 210 aa, Unknown
  Obtained from environmental sample
  misc_feature (1)..(210): Xaa is any amino acid
MGNTHGVPAHGMRLGKHPHGRGEYVPPPKRQAQAIETPPRAWGIPLPLCLRFWRKRNTPTGVGNTRLKMPACICAKKHPHGRGEYPPAPEGGGEGKETPPRAWGIPLIRLSFCLSTRNTPTGVGNTIANFTTCGIVGKHPHGRGEYAQSAQMVLPLWETPPRAWGILHLSIMPSYKFRNTPTGVGNTKRGKKGKTVIKKHPHGRGEYSRK

SEQ ID NO: 50413 - DNA, 792 bp, Unknown
  Obtained from environmental sample
  misc_feature (1)..(792): n is a, c, g, or t
atggccgagcccgggcgtggggaatacgcaagtcgccaagctccaagaggcttacgagagaaacacccccacgggcgtggggaatacatcccggcaaagtacctgtcaatgatggctgcggaaacacccccacgggcgtggggaatactgaagagcggggactgcgtgatcttcgccaacagaaacacccccacgggcgtggggaataccatgcggtcgtgccaaacgccaactgcaatctggaaacacccccacgggcgtggggaatacgcacggagtaccggcgcacggtatgcgccttgggaaacacccccacgggcgtggggaatacgttcctccacccaagcgacaggcacaagccatagaaacacccccacgggcgtggggaataccgctcccgctttgcctgcgcttctggcgcaaaagaaacacccccacgggcgtggggaataccagattaaaaatgcctgcttgcatctgcgcgaagaaacacccccacgggcgtggggaatacccgcccgcacccgaagggggcggcgaggggaaagaaacacccccacgggcgtggggaatacccctcatcaggctgtctttttgcctttcgacgagaaacacccccacgggcgtggggaatactattgccaactttaccacttgcggcatagtcgggaaacacccccacgggcgtggggaatacgcgcaatccgcgcaaatggtgttaccgctatgggaaacacccccacgggcgtggggaatactccatttgtctatcatgccatcttacaaatttag

SEQ ID NO: 50414 - protein, 263 aa, Unknown
  Obtained from environmental sample
  misc_feature (1)..(263): Xaa is any amino acid
MAEPGRGEYASRQAPRGLREKHPHGRGEYIPAKYLSMMAAETPPRAWGILKSGDCVIFANRNTPTGVGNTMRSCQTPTAIWKHPHGRGEYARSTGARYAPWETPPRAWGIRSSTQATGTSHRNTPTGVGNTAPALPALLAQKKHPHGRGEYQIKNACLHLREETPPRAWGIPARTRRGRRGERNTPTGVGNTPHQAVFLPFDEKHPHGRGEYYCQLYHLRHSRETPPRAWGIRAIRANGVTAMGNTPTGVGNTPFVYHAILQI

SEQ ID NO: 50415 - DNA, 669 bp, Unknown
  Obtained from environmental sample
  misc_feature (1)..(669): n is a, c, g, or t
atgatagacaaatggagtattccccacgcccgtgggggtgtttcccatagcggtaacaccatttgcgcggattgcgcgtattccccacgcccgtgggggtgtttcccgactatgccgcaagtggtaaagttggcaatagtattccccacgcccgtgggggtgtttctcgtcgaaaggcaaaaagacagcctgatgaggggtattccccacgcccgtgggggtgtttctttcccctcgccgcccccttcgggtgcgggcgggtattccccacgcccgtgggggtgtttcttcgcgcagatgcaagcaggcatttttaatctggtattccccacgcccgtgggggtgtttcttttgcgccagaagcgcaggcaaagcgggagcggtattccccacgcccgtgggggtgtttctatggcttgtgcctgtcgcttgggtggaggaacgtattccccacgcccgtgggggtgtttcccaaggcgcataccgtgcgccggtactccgtgcgtattccccacgcccgtgggggtgtttccagattgcagttggcgtttggcacgaccgcatggtattccccacgcccgtgggggtgtttctgttggcgaagatcacgcagtccccgctcttcagtattccccacgcccgtgggggtgtttccgcagccatcattga

SEQ ID NO: 50416 - protein, 222 aa, Unknown
  Obtained from environmental sample
  misc_feature (1)..(222): Xaa is any amino acid
MIDKWSIPHARGGVSHSGNTICADCAYSPRPWGCFPTMPQVVKLAIVFPTPVGVFLVERQKDSLMRGIPHARGGVSFPSPPPSGAGGYSPRPWGCFFAQMQAGIFNLVFPTPVGVFLLRQKRRQSGSGIPHARGGVSMACACRLGGGTYSPRPWGCFPRRIPCAGTPCVFPTPVGVFPDCSWRLARPHGIPHARGGVSVGEDHAVPALQYSPRPWGCFRSHH

SEQ ID NO: 50417 - DNA, 564 bp, Unknown
  Obtained from environmental sample
  misc_feature (1)..(564): n is a, c, g, or t
gtgggggtgtttctttcccctcgccgcccccttcgggtgcgggcgggtattccccacgcccgtgggggtgtttcttcgcgcagatgcaagcaggcatttttaatctggtattccccacgcccgtgggggtgtttcttttgcgccagaagcgcaggcaaagcgggagcggtattccccacgcccgtgggggtgtttctatggcttgtgcctgtcgcttgggtggaggaacgtattccccacgcccgtgggggtgtttcccaaggcgcataccgtgcgccggtactccgtgcgtattccccacgcccgtgggggtgtttccagattgcagttggcgtttggcacgaccgcatggtattccccacgcccgtgggggtgtttctgttggcgaagatcacgcagtccccgctcttcagtattccccacgcccgtgggggtgtttccgcagccatcattgacaggtactttgccgggatgtattccccacgcccgtgggggtgtttctctcgtaagcctcttggagcttggcgacttgcgtattccccacgcccgggctcggccatctga

SEQ ID NO: 50418 - protein, 187 aa, Unknown
  Obtained from environmental sample
  misc_feature (1)..(187): Xaa is any amino acid
MGVFLSPRRPLRVRAGIPHARGGVSSRRCKQAFLIWYSPRPWGCFFCARSAGKAGAVFPTPVGVFLWLVPVAWVEERIPHARGGVSQGAYRAPVLRAYSPRPWGCFQIAVGVWHDRMVFPTPVGVFLLAKITQSPLFSIPHARGGVSAAIIDRYFAGMYSPRPWGCFSRKPLGAWRLAYSPRPGSAI

SEQ ID NO: 50419 - DNA, 1266 bp, Unknown
  Obtained from environmental sample
  misc_feature (1)..(1266): n is a, c, g, or t
ttgtccttttcaatgaaggaaaatgcgaaaaaacatagttttgagcattttctaccttgcaaactccaaaaggagcccataaatcggagaattttgcgacgaacaggcgcaaaattctacaagtccgacaggctcctagggaatagggtttttgttcgggagcgttgcttaggtattccccattccctaaaaattttttgtgcgttgctttttttattcctcgcttttctcgcttttgcccaatccccgcaaagcgccggaaactcaggctttctggagctttactctcaatccgccgtggtgatggacgcctctacaggaaccatagttttctataaaaacccggacgatgaaattccccccgcctctcttacaaaattaatgaccatgcatcttgtcctgaaggaaattgcttcaggcagagcttctttggatgaaataattactccgacaagggagagctgggcggtgaaccagcttcccggctcctctttgatgtaccttgcgcagggccagactttaagtcttagggaactaatgctgggcatggcggttgtttcaggcaacgatgccgcgacggcggcagccttgcgctttgccccgacagtggatgattttataaggatgatgaacatggaagcggcggcaatggggcttaataaaaccagatttgtggacgcatcaggctattcggaagagaacatgaccacagccagggaattagccgagttatgccggatctacttattggagcacccggaaagcctgggggattttcattcggtaagggaattctcttacccaagcgctgagaacgttccacctgaaaggcggggaaatcccggaaccaggctgcgcagaaacaacaacaacctgcttggcaaggtagtaggcgttgacggcttaaaaacaggcgacatccccgaatcggggtacaacatcgcgttgaccgctgagagaaacgggacgcggtttattgccgtcatccttggcgctcccgccgagtgggggggcgacagaaagcgggacgaagacggcgaaaagcttctggagtgggcttttgggcgttttaaaacaatcccaatccggatgagtataggcgcgttcccgcctgtccgtatctggaaaggcaaagacaactacgtgagctttggtccggaagacccgcttgattttacagccccagtggaaagaggcagccagctttcatgggaaacagaagtggatctccgcttatcgcccccttctacacggggcagaaactag

SEQ ID NO: 50420 - protein, 421 aa, Unknown
  Obtained from environmental sample
  DOMAIN (77)...(334): D-alanyl-D-alanine carboxypeptidase
  misc_feature (1)..(421): Xaa is any amino acid
MSFSMKENAKKHSFEHFLPCKLQKEPINRRILRRTGAKFYKSDRLLGNRVFVRERCLGIPHSLKIFCALLFLFLAFLAFAQSPQSAGNSGFLELYSQSAVVMDASTGTIVFYKNPDDEIPPASLTKLMTMHLVLKEIASGRASLDEIITPTRESWAVNQLPGSSLMYLAQGQTLSLRELMLGMAVVSGNDAATAAALRFAPTVDDFIRMMNMEAAAMGLNKTRFVDASGYSEENMTTARELAELCRIYLLEHPESLGDFHSVREFSYPSAENVPPERRGNPGTRLRRNNNNLLGKVVGVDGLKTGDIPESGYNIALTAERNGTRFIAVILGAPAEWGGDRKRDEDGEKLLEWAFGRFKTIPIRMSIGAFPPVRIWKGKDNYVSFGPEDPLDFTAPVERGSQLSWETEVDLRLSPPSTRGRN

SEQ ID NO: 50421 - DNA, 615 bp, Unknown
  Obtained from environmental sample
  misc_feature (1)..(615): n is a, c, g, or t
atgtgcgtgctgcagcacaggattctgctcagcctgttcgagaactgccatttcaccgtgcttgcggacgtcaaccaggcactgtacccggaaacgaacatcacagaaaagcaaacgttgctcgggctgtaccgaaactgccatacggtggaactgaacaagagctaccgctccacgttcgagatcagccggttcgctgccaatatactcggcatctgggacgaatccgcgtactacaggcgttttggcggcgagccggaaatactggcagcagaggatccagccgaagcggcggctggcatacttgcccgcctgcccgaggggctgaacacggctggcatactgctgcgggacgaacagcgcgcgcgggactttcataaacgattgactgatgcgggcatacaggcggcgctggtcgcggacgagggttgcgagttcggcaagggcgtcacggtgatggcagtgcagtatgccaagggcctggaatttgacgcggtgatactgccggagtattgcgagccggagcctgacgacgatatgggcaggcggatgctatatctgatgtgtacgcgggcgctgcacaggctttatctgataagcggcgtacggcactga

SEQ ID NO: 50422 - protein, 204 aa, Unknown
  Obtained from environmental sample
  misc_feature (1)..(204): Xaa is any amino acid
MCVLQHRILLSLFENCHFTVLADVNQALYPETNITEKQTLLGLYRNCHTVELNKSYRSTFEISRFAANILGIWDESAYYRRFGGEPEILAAEDPAEAAAGILARLPEGLNTAGILLRDEQRARDFHKRLTDAGIQAALVADEGCEFGKGVTVMAVQYAKGLEFDAVILPEYCEPEPDDDMGRRMLYLMCTRALHRLYLISGVRH

SEQ ID NO: 50423 - DNA, 459 bp, Unknown
  Obtained from environmental sample
  misc_feature (1)..(459): n is a, c, g, or t
atgctttcagcgcttatcgctcgcgggcatagccacccagcgctgcggctggagccacagctggcacaccaggggcccgcccgtcccggtcctctcgtactggggacagcccccctcaaatctcctgcgcccacactagatagggaccgaactgtctcgcgacgttctgaacccaactcacgtaccgctattgatcggcgaacagccgaacccttgggacctgctccagccccaggatgcgatgagtcgacatcgaggtgccaaccttcccgtcgatatggactcttggggaagataagcctgttatccccggcgtaccttttatccgttgagcgatggcccttccattcggggccaccggatcactatggcctgctttcgcaactgcccggcgcgtgcgcctcgcagttaggcccccttgtaccattgcgctctgcggctggtttccgaacagcctga

SEQ ID NO: 50424 - protein, 152 aa, Unknown
  Obtained from environmental sample
  misc_feature (1)..(152): Xaa is any amino acid
MLSALIARGHSHPALRLEPQLAHQGPARPGPLVLGTAPLKSPAPTLDRDRTVSRRSEPNSRTAIDRRTAEPLGPAPAPGCDESTSRCQPSRRYGLLGKISLLSPAYLLSVERWPFHSGPPDHYGLLSQLPGACASQLGPLVPLRSAAGFRTA

SEQ ID NO: 50425 - DNA, 447 bp, Unknown
  Obtained from environmental sample
  misc_feature (1)..(447): n is a, c, g, or t
gtgggaggcttagaggccggctcgtcagggtcggcggagccgccgttgagataccaccctgcgccatgccggcccctaacccgcgcccgtcacccgggcgggggacagcgccaggcgggtagtttgactggggcggtcgcctcccaaagagtaacggaggcgcgcgaaggtcccctcaggctgttcggaaaccagccgcagagcgcaatggtacaagggggcctaactgcgaggcgcacgcgccgggcagttgcgaaagcaggccatagtgatccggtggccccgaatggaagggccatcgctcaacggataaaaggtacgccggggataacaggcttatcttccccaagagtccatatcgacgggaaggttggcacctcgatgtcgactcatcgcatcctggggctggagcaggtcccaagggttcggctgttcgccgatcaatag

SEQ ID NO: 50426 - protein, 148 aa, Unknown
  Obtained from environmental sample
  misc_feature (1)..(148): Xaa is any amino acid
MGGLEAGSSGSAEPPLRYHPAPCRPLTRARHPGGGQRQAGSLTGAVASQRVTEAREGPLRLFGNQPQSAMVQGGLTARRTRRAVAKAGHSDPVAPNGRAIAQRIKGTPGITGLSSPRVHIDGKVGTSMSTHRILGLEQVPRVRLFADQ

SEQ ID NO: 50427 - DNA, 1602 bp, Unknown
  Obtained from environmental sample
  misc_feature (1)..(1602): n is a, c, g, or t
atgtgtgatttttgtccctgtcataagcttgataaagaaccggacagtattttcatatgggaagaacacaaccaaataacgaaacgtacatatcgtaacacggatcgatatatagaatggcaaaatggcagagttgtccatattcagtactctgtcgatgtaactgaattgatcgaggcaaaagagctggcggagcgaagcaaccgctccaagaacaggttcctgtcgcgtgtgagccacgaaatacgcacgccgatgaacgcgattctgggcatcaccgaaattcagcttgaaaacaataccctttcgccggatacgaagaaagcttttggtgaaatttacaattcaggctatttgctgctgggtattatcaacgacattctggacctttccaaaattgaggcaggcaagatggaacttgcgccatcggtctacgatgtcccaagcctgattaacgatacagtacatatcaatataatgcagtacgacagcaaacagattgaatttacccttcatgtagatgcgaacattccgtcaaaactgtacggcgatgaactgcgcatcaagcagattttaaacaacctgctttcaaatgcttttaaatatactgataagggcgagatttcgttttccgtcgccgccgaatatgccccacagggagccgggcagataacgcttgtgttccatgtgagcgacacagggcagggcatgaccgctgaacagctggacaaactctacgatgagtacacccgctttaatatggaaaccaaccgcgctattgagggcgcgggtcttggcatgagcattacaaaacatcttgtaagattaatgaacggcgatattgaggtacagagcatactgggtaaaggttcgacgtttaccgtacacctgccgcaaaaaattgccgggggagtctcaagcgttataggcagggaattggctgaaaaaatcggacagatgagccccgtaaaatccgcgcataaaaagaaagcgccgattatatacgaatatatgccttacggcagaatactggttgtggacgatgttgaaacgaatctgtatgttacaaggggattaatttcaccctacggcctttctgttaatacagcctcaagcggatatgaagtgattgaaaaagtaaaaagcggtttaacgtgggatattgtttttatggatcattttatgcccggaatggacggggttgagaccgcgcggattatacgcgctatgggttatacaaaacccattgtcgcgttgacagctaacgtcgtatccgggcaggcggaaatgttctttgcaaacggttttgatgattttatttccaagcctatagacatacgccagcttgaccttattctgaataaacacatacgcgacaaatatcccgatgatattatcaaagccgcgcggcagataaaaaataacatggggcaaagctttgtttcccaatcggctttaaatcccgagcttgcaaggattttcacccgtgacgcgaataaggctattaatatgctggaaacgctcctgaaaaaacaaggcggtttcgacgacgaagatatacagatgtatgtaatcaatgtccacgcgagaaaagcgccttag

SEQ ID NO: 50428 - protein, 533 aa, Unknown
  Obtained from environmental sample
  DOMAIN (70)...(136): His Kinase A (phosphoacceptor) domain
  misc_feature (1)..(533): Xaa is any amino acid
MCDFCPCHKLDKEPDSIFIWEEHNQITKRTYRNTDRYIEWQNGRVVHIQYSVDVTELIEAKELAERSNRSKNRFLSRVSHEIRTPMNAILGITEIQLENNTLSPDTKKAFGEIYNSGYLLLGIINDILDLSKIEAGKMELAPSVYDVPSLINDTVHINIMQYDSKQIEFTLHVDANIPSKLYGDELRIKQILNNLLSNAFKYTDKGEISFSVAAEYAPQGAGQITLVFHVSDTGQGMTAEQLDKLYDEYTRFNMETNRAIEGAGLGMSITKHLVRLMNGDIEVQSILGKGSTFTVHLPQKIAGGVSSVIGRELAEKIGQMSPVKSAHKKKAPIIYEYMPYGRILVVDDVETNLYVTRGLISPYGLSVNTASSGYEVIEKVKSGLTWDIVFMDHFMPGMDGVETARIIRAMGYTKPIVALTANVVSGQAEMFFANGFDDFISKPIDIRQLDLILNKHIRDKYPDDIIKAARQIKNNMGQSFVSQSALNPELARIFTRDANKAINMLETLLKKQGGFDDEDIQMYVINVHARKAP

SEQ ID NO: 50429 - DNA, 909 bp, Unknown
  Obtained from environmental sample
  misc_feature (1)..(909): n is a, c, g, or t
atggcaattattggttttatcggtcttggaataatgggacggcctatggcaaaaaatttaatcaaggccggttataagcttgttgtgtacgacaagtttgctaaattggacgatctggtatcactgggcgctgagggggcggtttcaaataaagaagtagcttccaaggcagaaattattatcactatgctgccaaactcgccccaggtaaaggaagctatcctcggggccggaggtgttatcgaggggataaaaaaagggactattgtagttgatatgagctctattgctccggacacttgccgggaagtaggtgctgctctggctaagaaaaacgctgttcttcttgacgctcctgtttcaggaggggagcccaaggccaaagacgggactttggcaattatggccggcggcgacaaggccgcatttgaaaaggtaaagcccattttagaaaagatgggatcatcggtaatgctggcgggccctttgggagccgggaatgtggtgaaacttgccaaccagattattgtggccataaacatagcggcgctttccgaggcgtttacgctggcctcaaaggcaggaataaatccccaaacggtgtttgacgcaataaaggacggtctggccggttccgccgtgatgaacgcaaaaattccatctattttggaaggcaacttcaaggctggtttccgtgttgagcttcacatcaaggatttacaaaacgccatcgacacggcccatgacatgggtgttcccatgcttcttacggctccggtaatggaaattttgcagtcaataaaagttgacggcatggctaccagtgatcacagcgcgattgtcaagttttacgagaagcttgcaaaagtcgaggtcaggaaaaagggcgctgccaaacaaaaatcctaa

SEQ ID NO: 50430 - protein, 302 aa, Unknown
  Obtained from environmental sample
  DOMAIN (3)...(178): NADP oxidoreductase coenzyme F420-dependent
  misc_feature (1)..(302): Xaa is any amino acid
MAIIGFIGLGIMGRPMAKNLIKAGYKLVVYDKFAKLDDLVSLGAEGAVSNKEVASKAEIIITMLPNSPQVKEAILGAGGVIEGIKKGTIVVDMSSIAPDTCREVGAALAKKNAVLLDAPVSGGEPKAKDGTLAIMAGGDKAAFEKVKPILEKMGSSVMLAGPLGAGNVVKLANQIIVAINIAALSEAFTLASKAGINPQTVFDAIKDGLAGSAVMNAKIPSILEGNFKAGFRVELHIKDLQNAIDTAHDMGVPMLLTAPVMEILQSIKVDGMATSDHSAIVKFYEKLAKVEVRKKGAAKQKS

SEQ ID NO: 50431 - DNA, 1050 bp, Unknown
  Obtained from environmental sample
  misc_feature (1)..(1050): n is a, c, g, or t
atgagcgaatatgaaactcgtttacgaatagaacagttgttatcggaaatacacagtgaatggataagaaaagaagctcggctaatcggggatttcagcagttggacccggcagcgggatatgccgcttgaagacatattgctgtgtacgcttgctaaaaagggcttgagcacggcaatggaagtacggcatttttttcaagcgatggaaaaagtagaacaaaccgtcagcaagcaggattatctgcggcgacggcaaaaattgaatcccgcagtattcaagatattgaacaggaactacctcagacggttttacggcgggcaggaggtagtacaatggcaggggtatctggtaatggcggtagacgggagccgcgccgagatacctaacagtgaagaaaaccggcaggtatacggggaaagcataaacaaatacgggaaacaggtggcgcggacaaacctgagcgctgtgcatgacgtgtttaaccggtttttaatagacatcggaatgcatcattaccgtagcagcgagatagaggatgccaaagcccatattgaagcgctgaaagaaatagtaggggaacggccggtgttaatcatgtttgaccggaactacgaatcgctggaattcatggattttcttgaacaaaaagggataaaatacctgattcggctgcataaggggaattatgagacggaaaaaacccagatgcatagcaatgatgaggaagtggaactggtttataccagagcgcggatggggcatctgagagcgaagtcgccggaacgtatgcgggaactggcaaagcaaaaatcgaagcgggtacggataataaaaacaaaattcgcgaacggagaagaggcggcgtttataacgaacgtgagagaaggaacaaccgcacagatactgaggctgtaccggaagcgttgggcgatagagcaaaaatatcacacgctgaaaaacaagctgaagtttgagagcgttacgggaaaggcaagcatttatgggagcaggattttgggcgcaaaccntgggctcggccgaatctga

SEQ ID NO: 50432 - protein, 349 aa, Unknown
  Obtained from environmental sample
  DOMAIN (118)...(344): Transposase DDE domain
  misc_feature (1)..(349): Xaa is any amino acid
MSEYETRLRIEQLLSEIHSEWIRKEARLIGDFSSWTRQRDMPLEDILLCTLAKKGLSTAMEVRHFFQAMEKVEQTVSKQDYLRRRQKLNPAVFKILNRNYLRRFYGGQEVVQWQGYLVMAVDGSRAEIPNSEENRQVYGESINKYGKQVARTNLSAVHDVFNRFLIDIGMHHYRSSEIEDAKAHIEALKEIVGERPVLIMFDRNYESLEFMDFLEQKGIKYLIRLHKGNYETEKTQMHSNDEEVELVYTRARMGHLRAKSPERMRELAKQKSKRVRIIKTKFANGEEAAFITNVREGTTAQILRLYRKRWAIEQKYHTLKNKLKFESVTGKASIYGSRILGANXGLGRI

SEQ ID NO: 50433 - DNA, 1845 bp, Unknown
  Obtained from environmental sample
  misc_feature (1)..(1845): n is a, c, g, or t
atggcgaagataatcgaagcggtgcaaatgcctacgctgattgtcagccataacaaaacgctcgccgcacaacttttccgagagttcaaaggtttcttccccaacaacgctgtggaatattttgtttcctactacgattactaccagcccgaagcgtatgtagcaagccgtgatttgtacatcgaaaaagacgcttccataaatgacgagatagaacgaatgcggctctccgcagcgagaagcatgatggaacgcgaggacgtaatcatcgtggcgactgtctcctgtatttacggcatggtaacacccgacgtatacaaaaaaatgaccgctactttttcaaagggcgaaaccgtcgatgtcgattcgctgatgcgccgctttgttgaattgcaatatgagcgtaacgacgctgttcttgaacgggggcgtttccgcagaagaggcgacacgctggaaattttccccgcctacatggaagaagcctaccgcgtcgatttggattgggataaagttgaacgcatacgccgatttcatcccgtgtcaggtgaaatgctggaagatattgatcgcgcgcttatctatcccgcanaacaattcgtaatgcccggtgaaatggtgcaaaacgcaatgggcgctatcaagcaagaattgaaagatagacttgagtattttaaagacaacggcaaaattattgaagcggaaagattaaaaactcgcgttgaatacgacatcgaaatgcttaacgaaatgggctactgttcgggtatcgaaaattactccgctcatttggcgggacgcaaaagcggcgaaactccagacacgcttgtagattatttcccgaaaagacatttaacattcatagacgaaagccatgttactttgccgcagttaggcgcaatgtacgcgggcgaccgcagccgcaaacagagccttgtcgattacggctttcgtctcccctgcgcccttgacaaccgcccccttcgctacgatgaatttgtcgagcgattggataaaactgtttttgtttccgccacaccaggaaaaaacgagattgagcaatctgcgcgagttgtacagcaggtgatacgccccacaggacttttagaccccgaaatagaagtgcgtcccagcgaagggcaaatggaagacatttacggcgaagtgcaaaaacgcattaaagcaaaagaacgctctcttattctcaccctgacaaaaaaaatggcggaagaccttacggattatctcaccagtctcggtttaaaagtccgctacattcacagcgaggtggaaacaattgagcgtgtggaaattctcacgcaactgcggcaaggcgattttgatattctcgtaggcatcaacttgttacgcgaaggtatcgacctgcccgaagtttcatttatcgcaattctcgacgccgacaaaatcggctttctacgctcgcttacaagtcttgtacagataatcgggcgcgccgcgcgtaacgccgcgggaaaagtaatcatgtacgccgaccgcatgagcgaagcgatggaaaaagcaatcgccgaaaccaaccgccgccgcgagatacaaatagcgtataacaaaaagcacggcataacccctgcgacagttaagaaagccattgccgacatcctaacccgccacgccgaggaagccgttggcgcggcaactgcctcggtcgaggtgttaaagaaatcctacaatatgctaataccggcgcaacgcaagcagctaataaaggcccttgagaacgaaatgctggaacacgccaaaaaccttgaatttgaacaagccgcggcgataagggacgagataaaacaaataacagataacaattaa

SEQ ID NO: 50434 - protein, 614 aa, Unknown
  Obtained from environmental sample
  DOMAIN (578)...(613): UvrB/uvrC motif
  misc_feature (1)..(614): Xaa is any amino acid
MAKIIEAVQMPTLIVSHNKTLAAQLFREFKGFFPNNAVEYFVSYYDYYQPEAYVASRDLYIEKDASINDEIERMRLSAARSMMEREDVIIVATVSCIYGMVTPDVYKKMTATFSKGETVDVDSLMRRFVELQYERNDAVLERGRFRRRGDTLEIFPAYMEEAYRVDLDWDKVERIRRFHPVSGEMLEDIDRALIYPAXQFVMPGEMVQNAMGAIKQELKDRLEYFKDNGKIIEAERLKTRVEYDIEMLNEMGYCSGIENYSAHLAGRKSGETPDTLVDYFPKRHLTFIDESHVTLPQLGAMYAGDRSRKQSLVDYGFRLPCALDNRPLRYDEFVERLDKTVFVSATPGKNEIEQSARVVQQVIRPTGLLDPEIEVRPSEGQMEDIYGEVQKRIKAKERSLILTLTKKMAEDLTDYLTSLGLKVRYIHSEVETIERVEILTQLRQGDFDILVGINLLREGIDLPEVSFIAILDADKIGFLRSLTSLVQIIGRAARNAAGKVIMYADRMSEAMEKAIAETNRRREIQIAYNKKHGITPATVKKAIADILTRHAEEAVGAATASVEVLKKSYNMLIPAQRKQLIKALENEMLEHAKNLEFEQAAAIRDEIKQITDNN

SEQ ID NO: 50435 - DNA, 510 bp, Unknown
  Obtained from environmental sample
  misc_feature (1)..(510): n is a, c, g, or t
gtgctggaacgcctttcccttgagggaaccaatgttcaggccagggaaagggggcgtctcaagaacgactttcccgaagtaaggaggcaggcggcaaggcaccttggctcctttggcacggaggaagccaagatcgcgcttctgcaggtctgcgtcaacgataatgagccattggtcctgcaggaagctgtcagatcgcttggcaatataggcatagataaagacggcgaagtaatcagcaccattgtctgggtaaccaacaaatacaacaacaccatagcccctgacaacctccttgcacttgccgcaatagacgctatacaaaaaatagccagaaacaacaatggcgtaagagaggacgccttccagctcctcatcaaaatatcggaaggcgcatattccccgcctgtcagggaaaaagccaggcaaaccatcatggatatccgcaacctgatctccaacaacgcaaaaaggaaaagaagccagcaggcgcaagcaagtaataaataa

SEQ ID NO: 50436 - protein, 169 aa, Unknown
  Obtained from environmental sample
  misc_feature (1)..(169): Xaa is any amino acid
MLERLSLEGTNVQARERGRLKNDFPEVRRQAARHLGSFGTEEAKIALLQVCVNDNEPLVLQEAVRSLGNIGIDKDGEVISTIVWVTNKYNNTIAPDNLLALAAIDAIQKIARNNNGVREDAFQLLIKISEGAYSPPVREKARQTIMDIRNLISNNAKRKRSQQAQASNK

SEQ ID NO: 50437 - DNA, 402 bp, Unknown
  Obtained from environmental sample
  misc_feature (1)..(402): n is a, c, g, or t
gtgttgattgtccaaagcgatactatgaaccgcagttcggtaagtacggtcatgtgcgcatctatcacgtcaaaccttaaactggaacacgcgcctgggaatttatgtcttgaaaaaggcgtatcaaaactggataagacttctgtcgtaaacttttcgcaaattgttactctcgacaaaacatttatacaggagtatgtttgtgctttgccaaaatcatttttggagcgtattgaccaaagcttaaaaacggttttcgacatacaatctttagccttctttataattgtcattgttcccattccgacttgttctgacatccctttcttctttcccaaaggaaagttcaacatcactccctgctttaggcggcctacagacccgcaggccgctgttttttaa

SEQ ID NO: 50438 - protein, 133 aa, Unknown
  Obtained from environmental sample
  DOMAIN (1)...(87): PemK-like protein
  misc_feature (1)..(133): Xaa is any amino acid
MLIVQSDTMNRSSVSTVMCASITSNLKLEHAPGNLCLEKGVSKLDKTSVVNFSQIVTLDKTFIQEYVCALPKSFLERIDQSLKTVFDIQSLAFFIIVIVPIPTCSDIPFFFPKGKFNITPCFRRPTDPQAAVF

SEQ ID NO: 50439 - DNA, 420 bp, Unknown
  Obtained from environmental sample
  misc_feature (1)..(420): n is a, c, g, or t
atgccattacctgaagccgcgcccaatgatatgggggaattttattggtactcgacagggttaggtcccaaccatgtcaatatttctactacggatgtgataggggcaggcaggggaaacaccggcgctattcttgcttttgactctaacgctcctgccgctagagcctgtaaaaattactcaggcggcggtaaaaccgactggttccttcccagcaaagatgaactgagcttgctatatgagaacagggcgttggtagacaatatggtggggactgtgactagtaccagcaatgattaccactcttcgtcgctggagaagccaccaaattttagcgcgtcatatagactgaatattgaaactggcaaggtgagtagcggctggagcaatggttgggttcgtcctatccgggctttttaa

SEQ ID NO: 50440 - protein, 139 aa, Unknown
  Obtained from environmental sample
  misc_feature (1)..(139): Xaa is any amino acid
MPLPEAAPNDMGEFYWYSTGLGPNHVNISTTDVIGAGRGNTGAILAFDSNAPAARACKNYSGGGKTDWFLPSKDELSLLYENRALVDNMVGTVTSTSNDYHSSSLEKPPNFSASYRLNIETGKVSSGWSNGWVRPIRAF

SEQ ID NO: 50441 - DNA, 1014 bp, Unknown
  Obtained from environmental sample
  misc_feature (1)..(1014): n is a, c, g, or t
ttgcctcttatgaggatcgcgcttcggtcagcgtcgtccgcggcgcggactattaggcttgccgccgcgattgccgccgcggccgccgcgattgccgccgcccaagactccgaaaccgccgacgaagcgcttaaaaaaggcgacctcgcggaggccaaagcgcagttcgggcaagatgcaaaacgcaatccggccgactacaactctctactaaattacgcgtcaaccctgccccccaaagaggcgctgaaaatcgcggactcactgagccgcgcccaaaacacgccgggatgggccaaagcgcgaggcctgcgcttctccggcgaccgccactttctgaaagaagattacaaaaaagccgccgacgcatacctgcaagcctcattgctcgacagcggcgcgtcaacctacaaacacctatacgcgctgtcaatcgcgatggacgggcggacggaagcggcaagggtgatatggaacgatctggcccttgacaaaaccaacgaactcagcggcgaagcgactagactattggccttaatgccgaaaccggccgcgccggaagcagctgccgcgcctgtcaattctgtaaagattgacactgtaaagacgccgtcaacaccggcggctccgcccactccccctgtcgcgcctgtcaaccaaacgaataacacacctgtatcaacaaccgtcaatcccgtaaaggctgacactgtaaagacgccgtcaacaccggcggctccgcccccccctcctgccgcgcccgctaacccaaaaccgacaggccccgtctttacgatacaagtaggcgctttcgcctcaaaagagaacgccgataatctagtaagacgcttaaccggtaaatacgaagacatctccatctccacaacgggaagcgtagacctaacgctctacagagtgcgggtgggaacattctacaaaaaagaggacgcagtcgcgttcgccgataaactcatcatagaggcgggattatcggcacgcgtcacagagaagtaa

SEQ ID NO: 50442 - protein, 337 aa, Unknown
  Obtained from environmental sample
  SIGNAL (1)...(27)
  DOMAIN (260)...(336): Sporulation related domain
  misc_feature (1)..(337): Xaa is any amino acid
MPLMRIALRSASSAARTIRLAAAIAAAAAAIAAAQDSETADEALKKGDLAEAKAQFGQDAKRNPADYNSLLNYASTLPPKEALKIADSLSRAQNTPGWAKARGLRFSGDRHFLKEDYKKAADAYLQASLLDSGASTYKHLYALSIAMDGRTEAARVIWNDLALDKTNELSGEATRLLALMPKPAAPEAAAAPVNSVKIDTVKTPSTPAAPPTPPVAPVNQTNNTPVSTTVNPVKADTVKTPSTPAAPPPPPAAPANPKPTGPVFTIQVGAFASKENADNLVRRLTGKYEDISISTTGSVDLTLYRVRVGTFYKKEDAVAFADKLIIEAGLSARVTEK

SEQ ID NO: 50443 - DNA, 867 bp, Unknown
  Obtained from environmental sample
  misc_feature (1)..(867): n is a, c, g, or t
atggaatacgaaatggtaatcggcttagaagtccacgcccaattgctgacaaaaacgaaactcttttgcggttgcaccacccccttcggcgcccagcccaacgcccacggatgtcccgtctgcctcggcctcccaggcgcgctccccgccctcaaccgagccgcggtggagatggccgtacgcatgggcctatccctaggatgccggatcaacaccaagtcgatcttcgcccgcaagcactatttctaccccgacctccccaaaggctaccagatatcgcagctcgatatcccgatatgcgaatcgggaacgttgccgatagtcgttgacggacgggaatccgccatccgcatcaaccgcgttcacatggaagaggacgccggcaaactcgtacacgaccaagacgtcgattcgctattcgacgtgaaccgttgcggcagtccgctcatcgagatcgtctccgaaccggacatgcgcagcccgcaagaggcctacgcctacctcatgggacttaagcagatactggagtaccttgaagtctgcgactgcaacatggaggagggcagcctgcgttgcgacgcaaacatatcgctaaggcctaaaggagagagcaaactcggcaccaagacggagatcaagaacatgaacagtttccgcaacctggagaaggcgctcgattacgaggcgcgccggcaggaggaggtattgcggtcgggcgggcgcgtagtgcagcaaacgttcttgtggaacccaaacgagaaccgctcagtccccatgcgcaccaaggaggacgccgacgactaccgctacttcccgaccccggacctatgccgctggtcgttgaggccgcttgggttgacagcgtga

SEQ ID NO: 50444 - protein, 288 aa, Unknown
  Obtained from environmental sample
  DOMAIN (1)...(239): PET112 family, N terminal region
  misc_feature (1)..(288): Xaa is any amino acid
MEYEMVIGLEVHAQLLTKTKLFCGCTTPFGAQPNAHGCPVCLGLPGALPALNRAAVEMAVRMGLSLGCRINTKSIFARKHYFYPDLPKGYQISQLDIPICESGTLPIVVDGRESAIRINRVHMEEDAGKLVHDQDVDSLFDVNRCGSPLIEIVSEPDMRSPQEAYAYLMGLKQILEYLEVCDCNMEEGSLRCDANISLRPKGESKLGTKTEIKNMNSFRNLEKALDYEARRQEEVLRSGGRVVQQTFLWNPNENRSVPMRTKEDADDYRYFPTPDLCRWSLRPLGLTA

SEQ ID NO: 50445 - DNA, 672 bp, Unknown
  Obtained from environmental sample
  misc_feature (1)..(672): n is a, c, g, or t
ttgtcatgggggtcgttaattgggttcgcggctggaaaaagaaggaggttaagaaagcatgaccgacagtttaaccggcattgtgcaaatatccatcgcggcggtgctgatacagaatttcgtgctggcgcgtttcttgggcttgtgcccgtttttcggcgtgtcgaagaagctgtcgagcgccacgggcatggggatggccgtcgtcttcgtgatgacggtggcctccatgattacttggtggatcaacaaggcgatactcatcgacatgggcgtggagtacctgcggacgatcgtcttcatcctggtcatcgcctcgctggtgcagcttttggagatggtgttgcagaagttcacgccggccttgtacgattcgctcggcatctacttgccgctcatcaccaccaattgcgccattttgggtgttgctattatcaacacaggtataaacgtttttcggggacggaatactctttcgtggagagcacggtcaacggctcggcctcgggaatccggtttaccttggcgcttgtgctgatagcggaattgcgtgaactgctagagctggccgacattccaaaatcgctcgacggtctgcctatcgggtttatcacggcagggctgatggcgctggcgtttttagggttttccgggctttccttttttaagtag

SEQ ID NO: 50446 - protein, 223 aa, Unknown
  Obtained from environmental sample
  DOMAIN (107)...(221): Rnf-Nqr subunit, membrane protein
  misc_feature (1)..(223): Xaa is any amino acid
MSWGSLIGFAAGKRRRLRKHDRQFNRHCANIHRGGADTEFRAGAFLGLVPVFRRVEEAVERHGHGDGRRLRDDGGLHDYLVDQQGDTHRHGRGVPADDRLHPGHRLAGAAFGDGVAEVHAGLVRFARHLLAAHHHQLRHFGCCYYQHRYKRFSGTEYSFVESTVNGSASGIRFTLALVLIAELRELLELADIPKSLDGLPIGFITAGLMALAFLGFSGLSFFK

SEQ ID NO: 50447 - DNA, 480 bp, Unknown
  Obtained from environmental sample
  misc_feature (1)..(480): n is a, c, g, or t
atgaccgacagtttaaccggcattgtgcaaatatccatcgcggcggtgctgatacagaatttcgtgctggcgcgtttcttgggcttgtgcccgtttttcggcgtgtcgaagaagctgtcgagcgccacgggcatggggatggccgtcgtcttcgtgatgacggtggcctccatgattacttggtggatcaacaaggcgatactcatcgacatgggcgtggagtacctgcggacgatcgtcttcatcctggtcatcgcctcgctggtgcagcttttggagatggtgttgcagaagttcacgccggccttgtacgattcgctcggcatctacttgccgctcatcaccaccaattgcgccattttgggtgttgctattatcaacacaggtataaacgtttttcggggacggaatactctttcgtggagagcacggtcaacggctcggcctcgggaatccggtttaccttggcgcttgtgctga

SEQ ID NO: 50448 - protein, 159 aa, Unknown
  Obtained from environmental sample
  DOMAIN (5)...(156): Rnf-Nqr subunit, membrane protein
  misc_feature (1)..(159): Xaa is any amino acid
MTDSLTGIVQISIAAVLIQNFVLARFLGLCPFFGVSKKLSSATGMGMAVVFVMTVASMITWWINKAILIDMGVEYLRTIVFILVIASLVQLLEMVLQKFTPALYDSLGIYLPLITTNCAILGVAIINTGINVFRGRNTLSWRARSTARPRESGLPWRLC

SEQ ID NO: 50449 - DNA, 618 bp, Unknown
  Obtained from environmental sample
  misc_feature (1)..(618): n is a, c, g, or t
atggcatcagtatcatttataaaagagataaagcgcggggtgataaccgagattccgattctcatactggctctcggactctgcccatctcttgccgtaagcacatccgtgaagaacggcttgggcatgggtttggcggcgacattagtcttggcgctatccaacgtcatcatatccataataaaggggtggataccggacaaggttcggataccgtgtttcatcgtggttatcgccacgtttgtgtcgatacttcaattattgatcaaggcgtacgtgccgttgttagacgagcagttggggatattcataccgctcatcgtcgtcagctgcatcattttagggcgcgccgaggctttcgcgtctaagaataaccctatgcgttcgcttgtggacgggtttgtgatggggctgggctttaccgtgtcgctattgatactcagctgcattcgcgagtttttgggcagcaacaaactttgggatttgctcgttgttccgaacttcaagccgatgacggccatgattttggctccgggcggttttttcgccatagcgtttgtcatgggggtcgttaattgggttcgcggctggaaaaagaaggaggttaagaaagcatga

SEQ ID NO: 50450 - protein, 205 aa, Unknown
  Obtained from environmental sample
  DOMAIN (3)...(189): Rnf-Nqr subunit, membrane protein
  misc_feature (1)..(205): Xaa is any amino acid
MASVSFIKEIKRGVITEIPILILALGLCPSLAVSTSVKNGLGMGLAATLVLALSNVIISIIKGWIPDKVRIPCFIVVIATFVSILQLLIKAYVPLLDEQLGIFIPLIVVSCIILGRAEAFASKNNPMRSLVDGFVMGLGFTVSLLILSCIREFLGSNKLWDLLVVPNFKPMTAMILAPGGFFAIAFVMGVVNWVRGWKKKEVKKA

SEQ ID NO: 50451 - DNA, 1005 bp, Unknown
  Obtained from environmental sample
  misc_feature (1)..(1005): n is a, c, g, or t
ttgcccttggctaatacattccaaacacccaacaacatatccccgtattnggtagcaggtcctgtgctaggtatggtttgcggcggcgatatacgtttatacggcgatatacgctataaagagacagccggaaaaacctataaaacgaaactcancaagagcaataccagcccaatctcctttggactttatcttgggcagggcttgaaatataatctgcttatcaaggagttcccagtaattttgggtgttgaagctggctaccatttggggcttattgataagcacagcgataaagaacacgatggtactgccaatgccttgaactttgacctgtatgaaattaatggctcacgtacgcatcgcggctttgaacttgggttaacctttgcagtgccgctttccaacttcaaaaagcccaaacaacccgaacctgagccaccccctgcactcgaacccgaaccgcttcctgcgccggaacccgaaccgctccctgcgccggaacccgaaccaataccagaaccaccgccgccaccgccaccaccaccgccagaacccgaaccagtaccagaaccaccaccgccgccgcccgaaccggaaggttgctataccattgacgaaatgaaagaatttatcagcgcagggcaggatattcgcggtaaaaagatttgtgccattaagcaggtcaaattcaaatccggtagagccgaattgctcgcagaggataaagtttatttagaccaaatggtaatttttatgaacacaagcgagttgataaacattagggtaaatgggcatactgacaatattggcggtaacaagctcaatatgaatttatcacgcacccgagccaagtctgttcacgattacctaatatcaaagggaataaatgcttcgcgcttgtcatttgcgttctttggctcaacacgcccaatagctgataatgctacggaagatggcagggctattaaccgtagagtggaatttgagataataaaccaatag

SEQ ID NO: 50452 - protein, 334 aa, Unknown
  Obtained from environmental sample
  DOMAIN (230)...(325): OmpA family
  misc_feature (1)..(334): Xaa is any amino acid
MPLANTFQTPNNISPYXVAGPVLGMVCGGDIRLYGDIRYKETAGKTYKTKLXKSNTSPISFGLYLGQGLKYNLLIKEFPVILGVEAGYHLGLIDKHSDKEHDGTANALNFDLYEINGSRTHRGFELGLTFAVPLSNFKKPKQPEPEPPPALEPEPLPAPEPEPLPAPEPEPIPEPPPPPPPPPPEPEPVPEPPPPPPEPEGCYTIDEMKEFISAGQDIRGKKICAIKQVKFKSGRAELLAEDKVYLDQMVIFMNTSELINIRVNGHTDNIGGNKLNMNLSRTRAKSVHDYLISKGINASRLSFAFFGSTRPIADNATEDGRAINRRVEFEIINQ

SEQ ID NO: 50453 - DNA, 504 bp, Unknown
  Obtained from environmental sample
  misc_feature (1)..(504): n is a, c, g, or t
ttggataaatcaagcttttacagcgttccgtatcaatatgcgggcaaaacggtgctgattcgctggaattcacgcacggttgaggtgttttacgagggagagcgcatcgcttgccatatgcgcgacggggagggccataaacgctatactaccgatccggcccatatgcctgaaagccaccgggcggtctccgactggtcgccacaacggtttatatcctgggcggcaaagtacggcgagcagaccagaaagtttgtcacgacgcttttggaacgaaaagaacacccggaacaggcatataggacatgcgccgggatactccgcctggcggcgaccgtaaggccgcagcagatggaagcggcttgtacccaagcgatggcccgcaacctctactcgtattcatgccttgcgaggctgattgaaaacatcaagcttcaagaaccggttcagcatgaaaacctgcggggcggcagttactacaaggaggacaataatgttagataa

SEQ ID NO: 50454 - protein, 167 aa, Unknown
  Obtained from environmental sample
  misc_feature (1)..(167): Xaa is any amino acid
MDKSSFYSVPYQYAGKTVLIRWNSRTVEVFYEGERIACHMRDGEGHKRYTTDPAHMPESHRAVSDWSPQRFISWAAKYGEQTRKFVTTLLERKEHPEQAYRTCAGILRLAATVRPQQMEAACTQAMARNLYSYSCLARLIENIKLQEPVQHENLRGGSYYKEDNNVR

SEQ ID NO: 50455 - DNA, 825 bp, Unknown
  Obtained from environmental sample
  misc_feature (1)..(825): n is a, c, g, or t
ttgaaaacatcaagcttcaagaaccggttcagcatgaaaacctgcggggcggcagttactacaaggaggacaataatgttagataactccacactcaaccagcttcatgacatgcgccttcccgctatggcctgttgtttcaaagaacaacaaggccgtaacgatattggctcgctctcatttgaagaacgttttggcatgttagttgaaaccgaatggcttagccgccggaacaaacgctttgaccgtctggttaagcaggcgggtttccgccttcccgcggttcttgaggatattgattattccggcaagcgcgggattgccaaaccggaaatactcaaactcagcctggggacttatatcaaaagggcgcagaatgtttttttctctgggccgaccggggttggaaaaacatacctggtatgcgccttgggcagggccgcctgcgcccagggagtccaggtcctttatacaagggttaccgattatttcaatgtgatatttgcttcttcaagcaactacaggcacaaaccgttgcgggataaattcgcttccgtgcccctgctcatccttgacgactgggggcttaaaaagttttccgttgaagaaagccatgaactctcagagctgtttgaacggcgttatggccgggccgcaaccatcatttcaggacagattccttctacatcctggcatgacttgtttcccgacccgacgcaagctgacgcaatcctcgaccgtattgtccataacgcctacacctataatatctcaggcgagtccatgcggaaagccctcgggaaaaaggatcttgaaatgtcctga

SEQ ID NO: 50456 - protein, 274 aa, Unknown
  Obtained from environmental sample
  DOMAIN (48)...(77): IstB-like ATP binding N-terminal
  misc_feature (1)..(274): Xaa is any amino acid
MKTSSFKNRFSMKTCGAAVTTRRTIMLDNSTLNQLHDMRLPAMACCFKEQQGRNDIGSLSFEERFGMLVETEWLSRRNKRFDRLVKQAGFRLPAVLEDIDYSGKRGIAKPEILKLSLGTYIKRAQNVFFSGPTGVGKTYLVCALGRAACAQGVQVLYTRVTDYFNVIFASSSNYRHKPLRDKFASVPLLILDDWGLKKFSVEESHELSELFERRYGRAATIISGQIPSTSWHDLFPDPTQADAILDRIVHNAYTYNISGESMRKALGKKDLEMS

SEQ ID NO: 50457 - DNA, 1104 bp, Unknown
  Obtained from environmental sample
  misc_feature (1)..(1104): n is a, c, g, or t
gtggggaaccgcccttgccggcctgctttttggcatgctcaaatccgcccagtcgttaatgcagaaccggcagatacccaaagaaattacctctatcatcatgggcctggttgtggtctttatctccctgcgggcggggatgaaactgctgatcgactggcggaagaaagagagtatccgccgccagaggagcgaataatgacctttttacaagctatttggcagatgctgccttcaaccttaatgctcgtttccccgattctcattgccgccaccggggggatgatctgtgagcgttccggcgtggtcaacatcgctctggaagggcttatgtcgttaggcgccatgagcgccgccgtatgccatgttctgctggaatcacaaactcgtctttccataccggcggccctgctgactgccgcggctgtgggcggcgttttttccctgatacacgcgttcgcctcgattaccctgcgggcggatcaggttatttccggcacgggaataaacctcctttccaacgggattaccgtttttgtctgccagcttttattccgcatggaccgcagccagaactaccgcatgggaatgcgttccggcccgctgggaatttatccgaccatttggatagcgctggcgattctggcgttaacatggttcatgttgtaccggcgaccatggggcctgcgcntgagagctgccggggaacatccccaagcccttgcctcggcaggggtaaacgttatcaggattcgctacattgccgtagtaatctcaggtatgcttgccggtcttgccggaggctgtattgttttgagccaggacattcaatatacggtaaccacgattaacggcaaaggatttatcgccctggcggcggtatcgtttggccgctggattcctctgggggtactgggagccagttttctgtttggaatgtcctcagccctggcggttaatatcattaacatccgcagcctgcaattccttccctcggaatttttcaacgcgctgccgtatctgataacgttgatcaccctggtattgttcagcggaaaagatcacgccccccgcgacattggcaagccttatgtaaccgattaa

SEQ ID NO: 50458 - protein, 367 aa, Unknown
  Obtained from environmental sample
  DOMAIN (76)...(347): Branched-chain amino acid transport system / permease component
  misc_feature (1)..(367): Xaa is any amino acid
MGNRPCRPAFWHAQIRPVVNAEPADTQRNYLYHHGPGCGLYLPAGGDETADRLAEEREYPPPEERIMTFLQAIWQMLPSTLMLVSPILIAATGGMICERSGVVNIALEGLMSLGAMSAAVCHVLLESQTRLSIPAALLTAAAVGGVFSLIHAFASITLRADQVISGTGINLLSNGITVFVCQLLFRMDRSQNYRMGMRSGPLGIYPTIWIALAILALTWFMLYRRPWGLRXRAAGEHPQALASAGVNVIRIRYIAVVISGMLAGLAGGCIVLSQDIQYTVTTINGKGFIALAAVSFGRWIPLGVLGASFLFGMSSALAVNIINIRSLQFLPSEFFNALPYLITLITLVLFSGKDHAPRDIGKPYVTD

SEQ ID NO: 50459 - DNA, 333 bp, Unknown
  Obtained from environmental sample
  misc_feature (1)..(333): n is a, c, g, or t
ttgcccgaagggtttgcaggacttgcgggcgcttcggtttcgatgggcgttttttcttacgggaggatattggcaggaatggaaggctatggttttgacggcattgccgtggcgctcgtgggcaacagtaccgcgtggggaaccgcccttgccggcctgctttttggcatgctcaaatccgcccagtcgttaatgcagaaccggcagatacccaaagaaattacctctatcatcatgggcctggttgtggtctttatctccctgcgggcggggatgaaactgctgatcgactggcggaagaaagagagtatccgccgccagaggagcgaataa

SEQ ID NO: 50460 - protein, 110 aa, Unknown
  Obtained from environmental sample
  misc_feature (1)..(110): Xaa is any amino acid
MPEGFAGLAGASVSMGVFSYGRILAGMEGYGFDGIAVALVGNSTAWGTALAGLLFGMLKSAQSLMQNRQIPKEITSIIMGLVVVFISLRAGMKLLIDWRKKESIRRQRSE

SEQ ID NO: 50461 - DNA, 756 bp, Unknown
  Obtained from environmental sample
  misc_feature (1)..(756): n is a, c, g, or t
atgcttaaacttaaaaaagtgaagcctgaaaaactcctggaagtgtttaccggctccgacgcgctgatttccgtagcggtggttgttctgggctttttggcggcaaccctgatcattatattgattgggcggaatcccgccggaatgtacgaagcgattttacaggtaataaccggcatcttccgcagccgcaataatgtgtggggctggaatccccgctatatcggcgaatggttggtcgcgtcgattcccctcaccctgtgcggcctttcaatgggctttgccgcccgcgccggtctttttaacataggcgcggaagggcaatgtatcgccggcctgaccgccgcccaatttatcgccctcttttttccgaggattcccgtactgcactgggtaatcgcggtaaccgcggccattgccgccggcgcggtctggggaggcattgtcggcttcttcaaggcgcgtttcaaagtttccgaagtcgtggcgaccatcatgatgaattacatcgctctgtactttcaccgtattttcaccatgaggattcccagcagtaatacctacaaaacgccggactttcccgcgacggcaaccctcgcaagccccctgcttgcctcgctgaccaacggttcccgcctgaactacagcctgtggctgactctggcggctgttgtaatttactggctcatcatgggaaaaacgcggctgggctattcgctgcgggctaccggactgaaaaaggagccgcccttctag

SEQ ID NO: 50462 - protein, 251 aa, Unknown
  Obtained from environmental sample
  misc_feature (1)..(251): Xaa is any amino acid
MLKLKKVKPEKLLEVFTGSDALISVAVVVLGFLAATLIIILIGRNPAGMYEAILQVITGIFRSRNNVWGWNPRYIGEWLVASIPLTLCGLSMGFAARAGLFNIGAEGQCIAGLTAAQFIALFFPRIPVLHWVIAVTAAIAAGAVWGGIVGFFKARFKVSEVVATIMMNYIALYFHRIFTMRIPSSNTYKTPDFPATATLASPLLASLTNGSRLNYSLWLTLAAVVIYWLIMGKTRLGYSLRATGLKKEPPF

SEQ ID NO: 50463 - DNA, 555 bp, Unknown
  Obtained from environmental sample
  misc_feature (1)..(555): n is a, c, g, or t
atgccataccggaacctgtttgacgccttcgcgcagggaaaacttccctttgtaaacggttacatagtttcctcgtttttcaacgaaaaaaacgcctattcaattttcgaaattgtttcttatgccggcgttaaggaaatcttcccgacagaatcagggcttcagtttgttaccggcgggaaaaaactctttgtgctgctggaaaacgacacttatgagaaaaaattcatagagcctgtcaacagaccgcagggtgaatccattccaaaacgtgaaaacgaagttgaaattattatcgctcataaccagacaaagattatggtagcaaaagaaccaaatgaacttttcggctcatttaccattcttaaacctaccagtataaatttctctgtagtgttctaccaactgcctacggtttacaatactctcgctaaattctttgaagagacgcttaacaggcagcgcaaagttccgcagatggacgcgaaaaaagccgcccaattaatagcggccacggttaaaaaaaccatgagtcctgacggcgagtatcaataa

SEQ ID NO: 50464 - protein, 184 aa, Unknown
  Obtained from environmental sample
  misc_feature (1)..(184): Xaa is any amino acid
MPYRNLFDAFAQGKLPFVNGYIVSSFFNEKNAYSIFEIVSYAGVKEIFPTESGLQFVTGGKKLFVLLENDTYEKKFIEPVNRPQGESIPKRENEVEIIIAHNQTKIMVAKEPNELFGSFTILKPTSINFSVVFYQLPTVYNTLAKFFEETLNRQRKVPQMDAKKAAQLIAATVKKTMSPDGEYQ

SEQ ID NO: 50465 - DNA, 1020 bp, Unknown
  Obtained from environmental sample
  misc_feature (1)..(1020): n is a, c, g, or t
ttgggcctttgccgtaccgaacacatgttcttcaaggaagaccgtatcaatgtttcnagggacatgctgctttccgatgacaccaaagaacgccagaaatatctggacaagcttgaggttatgcaaagggaagacttctacggcatcatgaaagtgatggcgggtaaggaagtgacaatccgtcttttggattcgccgcttcatgaatttatgccccacaacagcgatgaacttaactcctatgtaagccatgcttcccagggcggcaaatcaaagctgtccaaagcggacattaccgcccgcatagacgctctgcatgaatttaaccctatgctcggccatcgcggctgccgtatcgcggtctcctatccggaaatatacgccatgcaggtaagggcaatcttcaaagccgcttacaaactgcgctccgaaaaaattgacgccagacctgaaattatggttcccatcgtcatgaatgtctctgaattaaaacttatcgcttacggcaaaaagatcgagggttcaaactatcttggcattgtcgatattgaggaagcgttaagaaaagaattaaaggcaaaagaagtggactataaaatcggcaccatgatagagttgccggcggcggctcttggcgcgggagaaatcgcgaggtacggacgtttcttcagtttcggaacaaacgatttaacacagaccacattgggcatctcaagggacgattttaccgcgtttatgccggactacaccctgtttgaccttatcaacggcaacccgttcagcactctggacacaaggggtaaaagaactgatacaaagccgacggatcgcggacgcataacccggcccgacctgttctgcggcctgtgcggagagcatggcgcgaatcccgccaacgtgcgcttctgcatggaagccggtntgaattatgtttcctgctccccgtactccgtccctatagccctgcttgcggtagctcaggcggaaattgaaaagttacaggccaaagcgaaagaataa

SEQ ID NO: 50466 - protein, 339 aa, Unknown
  Obtained from environmental sample
  DOMAIN (2)...(330): PEP-utilising enzyme, TIM barrel domain
  misc_feature (1)..(339): Xaa is any amino acid
MGLCRTEHMFFKEDRINVSRDMLLSDDTKERQKYLDKLEVMQREDFYGIMKVMAGKEVTIRLLDSPLHEFMPHNSDELNSYVSHASQGGKSKLSKADITARIDALHEFNPMLGHRGCRIAVSYPEIYAMQVRAIFKAAYKLRSEKIDARPEIMVPIVMNVSELKLIAYGKKIEGSNYLGIVDIEEALRKELKAKEVDYKIGTMIELPAAALGAGEIARYGRFFSFGTNDLTQTTLGISRDDFTAFMPDYTLFDLINGNPFSTLDTRGKRTDTKPTDRGRITRPDLFCGLCGEHGANPANVRFCMEAGXNYVSCSPYSVPIALLAVAQAEIEKLQAKAKE

SEQ ID NO: 50467 - DNA, 759 bp, Unknown
  Obtained from environmental sample
  misc_feature (1)..(759): n is a, c, g, or t
atgagcggtaaaagtgaaataaccgtaaaacagaaactgcgtatcaaaacccccgcgttgtggtcaagcgaaaacccgaatctgtaccgcgctgtcgtaaatcttgaaactggcgcacaggggattcctgaagaagtaaactttggcattagtacagtaaagattgaatataaaaagggaatgacagttaacggaaaaaaagtaaaacttaaaggcgtgtgcctgcaccacgactgcggcattactgggtctgcttattatgatgaagcgtggaggcgaaggcttttaacgcttaaaagcataggttgtaacgcgatcagaacaagccacaatccgccgtctcaagaatttcttgatctgtgcgacgagcttggcttttatgtggtagacgaatgttttgacaagtggaaaagcggctattatgccgctcattttgacgcggactcaaagcgcgatcttaccgattttatcctgcgcgacagaaaccatccttgcgtaattatgtggagcgtaggcaacgaggcggaagctcagggaacggacagtatgcttgcgattcaaaaaagccttgtagatattgtcaaaagccttgacagccgtcctgtaacctgcgctcttgcgcctcacgctaatccgaggacgcttgtaggagcgcctgtggacgagcttgtaaagttaacaaaaaaacttgcaaaggacgttgacgtgctggggcttaattaccatgagccgctatatcaggctttaccgagggaataa

SEQ ID NO: 50468 - protein, 252 aa, Unknown
  Obtained from environmental sample
  DOMAIN (53)...(251): Glycosyl hydrolases family 2, TIM barrel domain
  misc_feature (1)..(252): Xaa is any amino acid
MSGKSEITVKQKLRIKTPALWSSENPNLYRAVVNLETGAQGIPEEVNFGISTVKIEYKKGMTVNGKKVKLKGVCLHHDCGITGSAYYDEAWRRRLLTLKSIGCNAIRTSHNPPSQEFLDLCDELGFYVVDECFDKWKSGYYAAHFDADSKRDLTDFILRDRNHPCVIMWSVGNEAEAQGTDSMLAIQKSLVDIVKSLDSRPVTCALAPHANPRTLVGAPVDELVKLTKKLAKDVDVLGLNYHEPLYQALPRE

SEQ ID NO: 50469 - DNA, 891 bp, Unknown
  Obtained from environmental sample
  misc_feature (1)..(891): n is a, c, g, or t
atgtatctcgctcttgataactgggcggtcagcgaaggcaaaaagaagcttgacgcgaaatttatttcgaatgtagacccggatgacgcctccgccgtaatcgcttcctgtaatcttgaacagtgcctgttcattctggtgtccaagagcggcacaacacaggaaactctcgcaaatgagctttttgtaaaggacaagcttaataaagccggtcttgatccaagcaaacatatgattgcggttacaagcgagacaagccctctcgcgcgtaacagcgcgtatcttgattctttttatattgacgactatgtcggcggccgttattcatcgtcatcggcggtgggcggctgcgtgctgtctctcgcgttcggtcctgaaacgtttagggaattccttgccggagcagccgaagctgacaaacttgctttggagacggatgtttttaaaaacgcggcccttcttgacgcgttaatcggcgtttgggagcgaaactttttacagtatccgtataccgcggttttgccttacagtcaggcgctctcccggttcccggcacatttacagcagatggacatggagtcaaacggaaagcgggtaaaccgcgacggacagcctgtcaattacagtaccggccccgttattttcggagagcccggaacaaacggacagcattcgttttatcagcttcttcatcaggggacgagcgttattcctcttcaatttatcggtttttttgaaagccagagaggcgatgatgttaacgtggacggctctgtcagtcagacaaagctgaaggcaaatcttgcccgctcaaattgtggctttcgcgaaagggacaggacagcgaggacggaaacaaagagtttaagggcggacgcccctcaagtttga

SEQ ID NO: 50470 - protein, 296 aa, Unknown
  Obtained from environmental sample
  DOMAIN (1)...(290): Phosphoglucose isomerase
  misc_feature (1)..(296): Xaa is any amino acid
MYLALDNWAVSEGKKKLDAKFISNVDPDDASAVIASCNLEQCLFILVSKSGTTQETLANELFVKDKLNKAGLDPSKHMIAVTSETSPLARNSAYLDSFYIDDYVGGRYSSSSAVGGCVLSLAFGPETFREFLAGAAEADKLALETDVFKNAALLDALIGVWERNFLQYPYTAVLPYSQALSRFPAHLQQMDMESNGKRVNRDGQPVNYSTGPVIFGEPGTNGQHSFYQLLHQGTSVIPLQFIGFFESQRGDDVNVDGSVSQTKLKANLARSNCGFRERDRTARTETKSLRADAPQV

SEQ ID NO: 50471 - DNA, 441 bp, Unknown
  Obtained from environmental sample
  misc_feature (1)..(441): n is a, c, g, or t
atggccgagacatgccagcttcatgatgtagggaaaatatcaatcagcgacaacatacttaaaaaacaggggaaacttactcccgaagaatttaatgaaatgaaaaaacatacaagtttcggcgagcagataattgaaaaaattgaagcgcttgcgaaagaaagcgattttttaaactatgcgaaaatttttgccgccagtcatcacgaaagatgggacggctccggttacccgcgcggactggaaggggaaaaaatccccctgcttgggcgcattatggcgattgccgacgtatacgacgctcttacttcggtgcgtccgtacaaagaagcgttcagccatgaggaagcggtgcgtatcatcaccgaaggaagcggcactcaatttgatccgtcgctggttgaaatatttatccgcacggcggatcaattcaagaactag

SEQ ID NO: 50472 - protein, 146 aa, Unknown
  Obtained from environmental sample
  DOMAIN (1)...(102): HD domain
  misc_feature (1)..(146): Xaa is any amino acid
MAETCQLHDVGKISISDNILKKQGKLTPEEFNEMKKHTSFGEQIIEKIEALAKESDFLNYAKIFAASHHERWDGSGYPRGLEGEKIPLLGRIMAIADVYDALTSVRPYKEAFSHEEAVRIITEGSGTQFDPSLVEIFIRTADQFKN

SEQ ID NO: 50473 - DNA, 633 bp, Unknown
  Obtained from environmental sample
  misc_feature (1)..(633): n is a, c, g, or t
gtggacatggaacacgaaaaaaacaattccaaagaaaagaagataccgcttctttcagtttattttatcggaggcttcgcgattatttttctttgccgctttgccatgtcatcggtctacacattttttcccctgtatctgaccgagactctgaactggaacgcggtcgggttgatgttttctttgtcttcggcgtcggaagttccgttcatgtttctgtccgtatttttgatccgccgtttcggagcgcttccgcttctcgccctttccgccgggggaatcgccctgcggcttttgttgtgggcgctttttccttacaagcccatcgtcatcgcggcgcagctcctgcattcattgtgctatggggtctatcaccccgctgcggtgcaatttatttcatcagtcttccccgccaaaaaacgcggcatagggatgcccgtatacctcgcccttggatccggcctccccgctctcctcggcaacatggcgggaggcgtaattgtggagtcaatcggataccgtccgttattcgccatttacgccgggattgctgcgcttggcgtgctgattttcggggttattgttaaaagaagaaagactggtttttctatccagaacaagattaacacttaa

SEQ ID NO: 50474 - protein, 210 aa, Unknown
  Obtained from environmental sample
  misc_feature (1)..(210): Xaa is any amino acid
MDMEHEKNNSKEKKIPLLSVYFIGGFAIIFLCRFAMSSVYTFFPLYLTETLNWNAVGLMFSLSSASEVPFMFLSVFLIRRFGALPLLALSAGGIALRLLLWALFPYKPIVIAAQLLHSLCYGVYHPAAVQFISSVFPAKKRGIGMPVYLALGSGLPALLGNMAGGVIVESIGYRPLFAIYAGIAALGVLIFGVIVKRRKTGFSIQNKINT

SEQ ID NO: 50475 - DNA, 1143 bp, Unknown
  Obtained from environmental sample
  misc_feature (1)..(1143): n is a, c, g, or t
atgaaattcgctactgaacgcagttttatcccttcctatgcgctgacatttacagtctttgcggttattacgccgtatctttcaatcatggtgcggggtttgggatacagtcctctttgggtggggctgctgcttggaatttttgaaggcgccgccatagccggcccctttgtattcggctattgggcggacaaaagcggcaatttccgttccccgctgattatctcgtgcgtactcccggctctcaccgcaatccccattgtacagtggattcatccccttctcagcgcaattctgcttgccgttctggcattcggcttccgttccacatcctcactgctggacgcgataactaccgtcagaatcgggaaaagcggcaactacggaaagatacggaccttcggctcgctaagctttatcgtttttgtgctttttcttcagtggaccccgttcctaaaacccgacaacgcgaaacatatcgctttctggatagttgtaacttcgtctgccgccataatatacctgcttattctcccccgnttcattatttgcttctgtggacatggaacacgaaaaaaacaattccaaagaaaagaagataccgcttctttcagtttattttatcggaggcttcgcgattatttttctttgccgctttgccatgtcatcggtctacacattttttcccctgtatctgaccgagactctgaactggaacgcggtcgggttgatgttttctttgtcttcggcgtcggaagttccgttcatgtttctgtccgtatttttgatccgccgtttcggagcgcttccgcttctcgccctttccgccgggggaatcgccctgcggcttttgttgtgggcgctttttccttacaagcccatcgtcatcgcggcgcagctcctgcattcattgtgctatggggtctatcaccccgctgcggtgcaatttatttcatcagtcttccccgccaaaaaacgcggcatagggatgcccgtatacctcgcccttggatccggcctccccgctctcctcggcaacatggcgggaggcgtaattgtggagtcaatcggataccgtccgttattcgccatttacgccgggattgctgcgcttggcgtgctgattttcggggttattgttaa

SEQ ID NO: 50476 - protein, 380 aa, Unknown
  Obtained from environmental sample
  SIGNAL (1)...(21)
  misc_feature (1)..(380): Xaa is any amino acid
MKFATERSFIPSYALTFTVFAVITPYLSIMVRGLGYSPLWVGLLLGIFEGAAIAGPFVFGYWADKSGNFRSPLIISCVLPALTAIPIVQWIHPLLSAILLAVLAFGFRSTSSLLDAITTVRIGKSGNYGKIRTFGSLSFIVFVLFLQWTPFLKPDNAKHIAFWIVVTSSAAIIYLLILPRFIICFCGHGTRKKQFQRKEDTASFSLFYRRLRDYFSLPLCHVIGLHIFSPVSDRDSELERGRVDVFFVFGVGSSVHVSVRIFDPPFRSASASRPFRRGNRPAAFVVGAFSLQAHRHRGAAPAFIVLWGLSPRCGAIYFISLPRQKTRHRDARIPRPWIRPPRSPRQHGGRRNCGVNRIPSVIRHLRRDCCAWRADFRGYC

SEQ ID NO: 50477 - DNA, 594 bp, Unknown
  Obtained from environmental sample
  misc_feature (1)..(594): n is a, c, g, or t
atgtctgattggctttattcggatactgtcaaggagcattttaccaatccccgcaatgcccttttggaagacgaagatactttttcatataacgcaagggggcaaacaggaaatatcaaatgcggggatcagatgctgatgctccttaaaattgataatgatgttatcaccgatgtgcgctggagaacctacggatgcgccagcgccattgcgtcaacaagcatgctgtcggaagtaataaagggcatgaaaatagaggatgcctacaaggtaaggccggaagaccttgttgaaaaactgggcggcctgccctcgtacaagatccactgctcagtacttggcgacaaggccctccgcgccgccattgacgactacctcgccaaaacaggaagagcgggattgttacaggaagcggtcaccgagatttgccactgcctgggcatcaccgacaaggacattgaaaacgcctcccaaaacggcgcccgcggctgggatgatttgcagcaggccaccaagatcggcactgtctgcggaaactgcaaaacaaaagcgctggaactgctgcacggccttgaacacatctatgggatgtga

SEQ ID NO: 50478 - protein, 197 aa, Unknown
  Obtained from environmental sample
  DOMAIN (140)...(192): BFD-like [2Fe-2S] binding domain
  misc_feature (1)..(197): Xaa is any amino acid
MSDWLYSDTVKEHFTNPRNALLEDEDTFSYNARGQTGNIKCGDQMLMLLKIDNDVITDVRWRTYGCASAIASTSMLSEVIKGMKIEDAYKVRPEDLVEKLGGLPSYKIHCSVLGDKALRAAIDDYLAKTGRAGLLQEAVTEICHCLGITDKDIENASQNGARGWDDLQQATKIGTVCGNCKTKALELLHGLEHIYGM

SEQ ID NO: 50479 - DNA, 924 bp, Unknown
  Obtained from environmental sample
  misc_feature (1)..(924): n is a, c, g, or t
ttgattggcgagaacatgcataaggcaagggctgcatacctgatcagggagataatctgcaaacgtctgtctgaaagcatagacagggaaataagcgcggagggcaatgactctggcgattttttggaaagacttctgaatcagcggctggaaataaatccatctgatctggagcggcatctgcaaaaaatcgacgggaatgacgaaatcgaaacgatccgcggcaacggcttttccgccgccgccaatctgtttctttcaatactcaacgcggttaaccttgactgcgggtttctggaaaacctgaaagaaaagcgtgaaattttgttccgcgaatacgaagatgccgataaagccgtcctgccggacgaacattaccaaataaggctgcgttatttcagcaaagcgcggctttctgaggaacgcgaaatttacgataagcggctcaggattttaggcggcgaaacacagcgcctttgggatctgctggaagtgatttaccaggattcaaaatcggtttttaaggtaaatgattttgaggatcttgccaaaaaaaacaaaagccgcataaaaaaccagatggacacttacgatccccaaaagcccatagaagcgtctttcgccgcagttcagggagaaaaagaaaagatacgcgtgttgcttgccaaaatggaagagcgaataaaaaatatttctgacagcatgtatccggtggaacggcaaatatcggaagagcggctggccctgctgaaagacgaattctcatctattgaagacaatatagacctgtacactttacagcccggcattcttgcggatattgaacttacgtcaatcaaacgcaaaagaacgacacttgattccatgtctctggctttggcccgttttctggataatgtttcaggctgctttcgggatgcgtaa

SEQ ID NO: 50480 - protein, 307 aa, Unknown
  Obtained from environmental sample
  misc_feature (1)..(307): Xaa is any amino acid
MIGENMHKARAAYLIREIICKRLSESIDREISAEGNDSGDFLERLLNQRLEINPSDLERHLQKIDGNDEIETIRGNGFSAAANLFLSILNAVNLDCGFLENLKEKREILFREYEDADKAVLPDEHYQIRLRYFSKARLSEEREIYDKRLRILGGETQRLWDLLEVIYQDSKSVFKVNDFEDLAKKNKSRIKNQMDTYDPQKPIEASFAAVQGEKEKIRVLLAKMEERIKNISDSMYPVERQISEERLALLKDEFSSIEDNIDLYTLQPGILADIELTSIKRKRTTLDSMSLALARFLDNVSGCFRDA

SEQ ID NO: 50481 - DNA, 1866 bp, Unknown
  Obtained from environmental sample
  misc_feature (1)..(1866): n is a, c, g, or t
atgatcagatcggccgagagcgtgcgcgattggctgctgtccttctgggcgagggagtccttaatgattagggggcggataaagcgcatttccgggcccataatccgcgttgcgggcttaagcggggttggccttttcgatgtggtggaagtaggcgataaaaagctcattggggaaatcgtcaggcttgaaaaggacgaagcagtggttcaggtttatgaagacgaaaccggcctgacgataggatccgaagcggtatctaccggacggcctttgtctgtgcttcttgggcccggcctgatagggaatatttacgacggcattcagcgcccgcttgaaaagctctttgagcaaaacggggcgttcatggaatcgggcgggcgcggcgaaccgctggagtcgggcaaaaagtggccttttgttcccgatccctcactggcagcgaagctcgcggcagacgaaaaggttcccgcttttcccggtctcctgcttggcaccgtaaaggaaacagaaagcgttacctgtaaaatcatggttcctacctccggcaagccttcggctcatgtaggcagcattaccgagcttagcccggaggcggagcttactgtgtcttccgttgtggcgcgtaccagcgagggcggggagattacgctttcgcattggtggccggcgcggattcccaggccgagcgccgagcggctttcccccgacatgccccttattacagggcaaagggtaatcgacgtttttttcccgatttccaagggcgggacagccgccatccccggaggcttcggcacgggcaagaccatgacccagcacgccatcgcgaagtggtgcgacgccgacgtgatcatttacataggctgcggggagcgcgggaatgaaatgaccgacgtgctaactgattttccgcacctcatagatccccgcagcggaaggtcgctgatggagcgtactgtgctgattgccaacacctccaatatgccggtggcggcgcgggaggtttcgatttacacaggcgttaccatggcggagttttaccgcgacatgggctaccatgttgccatcatggcggattctacaagccgctgggcggaagctctgcgtgagctttccgggcgcatggaagaaatgcctgccgaggaaggctttcccgcgtaccttccgacgcggcttgcggaattttacgagcgcgcggggagggtaaagaccctttccggcgtggaagggtcggtttcacttatcggcgcggtttccccgcctggcggcgatttttcggagccggtaacccagcacacgaaaaggtttatccgctgtttctgggcgctggatcgggagcttgccaatgccaggcattaccccgcaatttcgtggatcgacagttacagcgagtacgccgccgaggtagagccctggtgggaaaaggtaaatccccagtgggcagcggtgcgccgcagcgcgatggatctcttaaaaagggagcagcgccttgcggagatagtccggctaatcgggcctgacgccctgcctgacaatcagcgcctcatattgctcgcggcggatgtaatcaagaacgggtttttgcagcaaaacagttttgacgaggttgacatgtactgcgttccgatgaagcagatacgccttttggaattaatcatggaattctacgacagggccaatacctgcataaagcttggcgcgcctcttgtgaagattacgtccctttcgatccgagaaaacctttccaggcttaaaagcgacgtaaagaacgaccaggctgacggctttgcggaatttgagcatgagatgcgcgccgatttggacgtgctcgagcggagctaccgcaacagggaaattctatga

SEQ ID NO: 50482 - protein, 621 aa, Unknown
  Obtained from environmental sample
  DOMAIN (27)...(89): ATP synthase alpha/beta family, beta-barrel domain
  misc_feature (1)..(621): Xaa is any amino acid
MIRSAESVRDWLLSFWARESLMIRGRIKRISGPIIRVAGLSGVGLFDVVEVGDKKLIGEIVRLEKDEAVVQVYEDETGLTIGSEAVSTGRPLSVLLGPGLIGNIYDGIQRPLEKLFEQNGAFMESGGRGEPLESGKKWPFVPDPSLAAKLAADEKVPAFPGLLLGTVKETESVTCKIMVPTSGKPSAHVGSITELSPEAELTVSSVVARTSEGGEITLSHWWPARIPRPSAERLSPDMPLITGQRVIDVFFPISKGGTAAIPGGFGTGKTMTQHAIAKWCDADVIIYIGCGERGNEMTDVLTDFPHLIDPRSGRSLMERTVLIANTSNMPVAAREVSIYTGVTMAEFYRDMGYHVAIMADSTSRWAEALRELSGRMEEMPAEEGFPAYLPTRLAEFYERAGRVKTLSGVEGSVSLIGAVSPPGGDFSEPVTQHTKRFIRCFWALDRELANARHYPAISWIDSYSEYAAEVEPWWEKVNPQWAAVRRSAMDLLKREQRLAEIVRLIGPDALPDNQRLILLAADVIKNGFLQQNSFDEVDMYCVPMKQIRLLELIMEFYDRANTCIKLGAPLVKITSLSIRENLSRLKSDVKNDQADGFAEFEHEMRADLDVLERSYRNREIL

SEQ ID NO: 50483 - DNA, 1035 bp, Unknown
  Obtained from environmental sample
  misc_feature (1)..(1035): n is a, c, g, or t
gtgcgggttctgggacgcggacggtggggctttcccgggaaaatatgttccaagggcgggccttccggcggagacggcggcaggggaggggacgtaatcttcaccgtgaggcgtaatctccgcacgcttgcccatctgcggttcaagcgcaaatttaaggcgcaaaacggacgcgacggcggaaacgctaattgcgccggttcaaacggggcggatgtaattgtgccgctgccgcccggttcgataatccgcgaagcggatacgggaaatgttattaaagatttttccggcaataatggtgattttatttttttaaaaggcggcaacggcggatgggggaacgttcattttaagtcctccgtgaatcaggcgccgcgaaaagcccttcccggaaagcccggacaaaccgtaaagttaaaagttgaattgcagataatagccgacatcggccttgtcggttttcccaacgcgggaaaatccagtttgcttgaccgctttaccaacgcaagaccgaaaattgccgcctatccatttactacaaaaatccccaaccttggagtgcttactgtcgatgacagggacattattatcgccgatattccgggccttatagaaggagcttccgaaggcgcggggctgggtatccgttttttaaaacatatttccagaacaaaagctttggcttttcttgtagacttgggcgaagacaattaccttgacgcctttgatattttgcttaacgaacttggttccttttcggaagatttgccgaaaaaaaagcgcctgctaatagggacaaaaaccgatttggacggaactttaccgcggctggcagaacttgccgcaaaatatcaaacggaagaaattatgggcatttcggttttttcaggcgagggcgttaaagagttatctcaggcttttatgcggctgacgcaggaagatgaaagccctgcggcggcgcaagatattcagaatgaagctgaaatggtttattctgaattagacgatgatgactttgaaggagaggatgagtga

SEQ ID NO: 50484 - protein, 344 aa, Unknown
  Obtained from environmental sample
  DOMAIN (1)...(145): GTP1/OBG
  misc_feature (1)..(344): Xaa is any amino acid
MRVLGRGRWGFPGKICSKGGPSGGDGGRGGDVIFTVRRNLRTLAHLRFKRKFKAQNGRDGGNANCAGSNGADVIVPLPPGSIIREADTGNVIKDFSGNNGDFIFLKGGNGGWGNVHFKSSVNQAPRKALPGKPGQTVKLKVELQIIADIGLVGFPNAGKSSLLDRFTNARPKIAAYPFTTKIPNLGVLTVDDRDIIIADIPGLIEGASEGAGLGIRFLKHISRTKALAFLVDLGEDNYLDAFDILLNELGSFSEDLPKKKRLLIGTKTDLDGTLPRLAELAAKYQTEEIMGISVFSGEGVKELSQAFMRLTQEDESPAAAQDIQNEAEMVYSELDDDDFEGEDE

SEQ ID NO: 50485 - DNA, 747 bp, Unknown
  Obtained from environmental sample
  misc_feature (1)..(747): n is a, c, g, or t
gtgaagcttggtatttttggcggcagttttaatccggtacattacgggcattttttccttgttgataccgccatttcaatgttaaaactggacagggtagtaatgatacccgcctttcgttctccttttaaacttgaggcggaggatatggaaggcggcgcaaacgacaggcttgatatgcttgccgccgccgtcgcgggcgacagcaggcttgctattgacgactgtgaaataaggcggggaggggtttcctataccgtagatacaatcgaagacattatcgcccgctacataccggacggaaaaccgacgcttattatcggggacgatcttgccgccgattttccaaaatggcgcgacagtaaaaaaattttggaattggcggacatagttattgtgcgcaggaaaaagcccgccgccggggatgcggatgccaatgtataccgttatgcgcatacacttcttgataacgaaataatgaatatttcttcgcatgagatacggcaaaagataaaaaatggaatggactggcgttcccttgtgccggtgagggccagggtaataatcgaagacaggcggctttacggctataacggcaatgaacagaacttagacgataaggactgttccatgtcggttattttgcgcgtgaagaagaggcgcgcagggtccttaccaccgagcgtttcctacattccagaaacacggctcttttggcgcatgatctttgcctccgcttcggcataa

SEQ ID NO: 50486 - protein, 248 aa, Unknown
  Obtained from environmental sample
  DOMAIN (5)...(170): Cytidylyltransferase
  misc_feature (1)..(248): Xaa is any amino acid
MKLGIFGGSFNPVHYGHFFLVDTAISMLKLDRVVMIPAFRSPFKLEAEDMEGGANDRLDMLAAAVAGDSRLAIDDCEIRRGGVSYTVDTIEDIIARYIPDGKPTLIIGDDLAADFPKWRDSKKILELADIVIVRRKKPAAGDADANVYRYAHTLLDNEIMNISSHEIRQKIKNGMDWRSLVPVRARVIIEDRRLYGYNGNEQNLDDKDCSMSVILRVKKRRAGSLPPSVSYIPETRLFWRMIFASASA

SEQ ID NO: 50487 - DNA, 483 bp, Unknown
  Obtained from environmental sample
  misc_feature (1)..(483): n is a, c, g, or t
ttggcgcatgatctttgcctccgcttcggcataaatccgaaagcgggctaccttgcgggaatcgcccacgatttggcaaaacagacggaacccaaactattattgaaaatggtgaaagacgacggtctgcctgttacagaacttgaaaagggaaaaccaaaccttcttcacggaagggcggcggcggtattgataaaggaacgcttctgtattcataataaagatgtgcttgaggcagtggcttttcacacgtcaggaagagaaaatatgagccccctggcgaaggtgatctatattgccgacaaagttgaagtgtccaggaatattgatcctgccttaagaaagatgtgcttaagtgaaaatttagacagtattctttatgctgttctgaaaaaacaaatcggcaggctggaatcaaagggattgaatttgtcagaggattcattgcggttgttgaataaaatgaaggaaaaagcgcgttga

SEQ ID NO: 50488 - protein, 160 aa, Unknown
  Obtained from environmental sample
  DOMAIN (1)...(106): HD domain
  misc_feature (1)..(160): Xaa is any amino acid
MAHDLCLRFGINPKAGYLAGIAHDLAKQTEPKLLLKMVKDDGLPVTELEKGKPNLLHGRAAAVLIKERFCIHNKDVLEAVAFHTSGRENMSPLAKVIYIADKVEVSRNIDPALRKMCLSENLDSILYAVLKKQIGRLESKGLNLSEDSLRLLNKMKEKAR

SEQ ID NO: 50489 - DNA, 321 bp, Unknown
  Obtained from environmental sample
  misc_feature (1)..(321): n is a, c, g, or t
ttgagtttgtcaaaaacaggcgcttcgcgtcttctgcttggattaattatttttttaattattttgggagccgccgccgcggtatacacactgcggagcaatcccgtagaagacgccattgccgccaaccgtgtaataagtatcctctatgttattgaagaagaaaaaaaacctgtcagcacctatgtattaatgtactatcccgggacaaaacgggccgcgatttttgacatacccggaaatttggggcttttaattacaaaaatcaaccgcgttgaccgtatcgacaaagtgtatgattctgcaaggatcggcagttag

SEQ ID NO: 50490 - protein, 106 aa, Unknown
  Obtained from environmental sample
  SIGNAL (1)...(26)
  misc_feature (1)..(106): Xaa is any amino acid
MSLSKTGASRLLLGLIIFLIILGAAAAVYTLRSNPVEDAIAANRVISILYVIEEEKKPVSTYVLMYYPGTKRAAIFDIPGNLGLLITKINRVDRIDKVYDSARIGS

SEQ ID NO: 50491 - DNA, 2394 bp, Unknown
  Obtained from environmental sample
  misc_feature (1)..(2394): n is a, c, g, or t
gtgattgcaacgctggaggggaatactaccggaaacggaggctctttcggttctttcaccctgccgtccaatatcgatcccggccaatacaggatcatttaccgccgcgccgggacaacgggttccgagcgggagcgtgagcactcaaccgcgtttaccgttgccaattttgaacgcctccgttttgaatcctcgttactgtttaccgattctgtcgtatatcaaggcgataaactaagcgcttccctttccgcttcatggcttgccgggggcgggctttcgggcgcgccctacacatggtatttgacgcgggaacccgcctctgtcataccgggcgggacagagggccagtggcgcaattggaatttcgggtctgaggtcagcgacgaacgctcttttgtcgggcgcggggaagggacgctcggccctgacggaaaagcgggcattagtaacgagacaatcaaccagtttattgaaggcgcggcttacagctaccggcttgaagcctcggtgcaggacacggcgcgtcaagagatatcctcccgcgccgctattctggttcatcccgcttctttctacattgcagcgcgcattgattctggaacagtaagaactgccgccacaggtgatagtgccaccaaaggtggcagtgctgaaaccgttgcaacaaacccgtcagcttatttcatcagcgcggggcaacctgcgacattaagctgggcgcttgtttcacctaacggcgacgggacgggaactaatctgactagtctgactagtcaggacttatcaatacagcttgtccgccacgaatggaaacaggcgcggcagcagggaacaggcggcagagtcaatctggtatgggagcgggttgaggaaattgccgcgcagcgaaacgtaaaaatcgcgcccgctaacgagggcgtctccggcgtgttcaactttacgccggataaaagcggcctttgggaactcaggctttccagccgggatcaaaaacggcgtatagccgcgactcgttctcacttttacgtcacaggttcaggatgggtgcgctggggtttagatgacgtggatacaataagcctcaccaccgaccgcccgagttacgcgccgggtgagacggcaaaaataatgatacgctcgccgctggaaaagggcaaatacctgttaacactggaacgtgaaaacatcatatcccaaaggctcattgagcttaacggctccgccctgaccatcgacatccccatagaagattcgtatctgccggtaatctacgccgcgctcagttcctatacaacgcgatccggcccggcgcagaacagctactacgagccggacatggataaaccaaaggggattttcggcgttacgccgatttatgttgataatgacagcaggcgttaccaaattgagattgatacaggcaggaacacctaccgcgcggcggaagaagctcaggtaaagataaaagtcctgttgaacggcaggcccgcgccgaatacggaagtgagttttctggccgttgaccgcggggtgtttgacctcatcgactaccatgttccggatccgctcgattccttttacgccccctggaatttccccctgggagtgcggggtgcggacagccgttccctcctgatcgatccggtgacatacaacatttccgatctccagggcggtgacagtgataatgaggaaaaggggggtgatggcgcgggtagtttaaaagacgatatgaaagaacgcaaggactggaggccgacggcggtttttgaaccttaccttgtcaccgggccggacgggacagtgaccgtaaaattcaagctgccagattcgcttaccagttaccgctgtaccgctgtcgccataggcgtaaacaacttcggcattaaggaaaacgatctgaaggtaagcgccccgctgacggcgattgccgtgctgccgcgcaaactccgctggcgggacaccggtacggtttcgctcatactgacgaaccttgaaaacgccgcggtagaggccagcgtgtcgcttgcgtcatccgccgagtcgcacaccgggtctgacatcattattgaggttgacggtgcggattccaaaaccgtaaaggtgcttcccggcgcgtcgcaggaagtcactttcaaagtcgccgccgtcggcgtcggcgtcgccaggctcgcctttacactgcgctcgcccgaggtgaacgagcgtatccttaaaacgcttcttgttgacaggcccagcctgaccgagacggttaccacaatcgggaatctggggccggataatccttttatcgaggaaggcatggtgctgccgtcgctggttcccgaaggaacaggcaatgtttccgtaagccttctacctcccggcggcgacgctactcggcgataa

SEQ ID NO: 50492 - protein, 797 aa, Unknown
  Obtained from environmental sample
  DOMAIN (595)...(681): Alpha-2-macroglobulin family
  misc_feature (1)..(797): Xaa is any amino acid
MIATLEGNTTGNGGSFGSFTLPSNIDPGQYRIIYRRAGTTGSEREREHSTAFTVANFERLRFESSLLFTDSVVYQGDKLSASLSASWLAGGGLSGAPYTWYLTREPASVIPGGTEGQWRNWNFGSEVSDERSFVGRGEGTLGPDGKAGISNETINQFIEGAAYSYRLEASVQDTARQEISSRAAILVHPASFYIAARIDSGTVRTAATGDSATKGGSAETVATNPSAYFISAGQPATLSWALVSPNGDGTGTNLTSLTSQDLSIQLVRHEWKQARQQGTGGRVNLVWERVEEIAAQRNVKIAPANEGVSGVFNFTPDKSGLWELRLSSRDQKRRIAATRSHFYVTGSGWVRWGLDDVDTISLTTDRPSYAPGETAKIMIRSPLEKGKYLLTLERENIISQRLIELNGSALTIDIPIEDSYLPVIYAALSSYTTRSGPAQNSYYEPDMDKPKGIFGVTPIYVDNDSRRYQIEIDTGRNTYRAAEEAQVKIKVLLNGRPAPNTEVSFLAVDRGVFDLIDYHVPDPLDSFYAPWNFPLGVRGADSRSLLIDPVTYNISDLQGGDSDNEEKGGDGAGSLKDDMKERKDWRPTAVFEPYLVTGPDGTVTVKFKLPDSLTSYRCTAVAIGVNNFGIKENDLKVSAPLTAIAVLPRKLRWRDTGTVSLILTNLENAAVEASVSLASSAESHTGSDIIIEVDGADSKTVKVLPGASQEVTFKVAAVGVGVARLAFTLRSPEVNERILKTLLVDRPSLTETVTTIGNLGPDNPFIEEGMVLPSLVPEGTGNVSVSLLPPGGDATRR

SEQ ID NO: 50493 - DNA, 945 bp, Unknown
  Obtained from environmental sample
  misc_feature (1)..(945): n is a, c, g, or t
gtgacggttacgttaccggaagcgccgctgaccgcgctgctgtttaacccggctacaataactgtggaagtcggacagagccttcccggatccacagttgcggttaccaagaccccagcttacgcgactgacgtgcttgagtgggtaacggcggctgctggtaccgcgactgttcaatctgataccggtatgattaccggtgtagcggtgggttctacaaccgtaaccgtccgaagcaagacaaatacttcagtgaaagccgacgtaacggttaatgtggtggcggcaacggttaattccaagattatctggagttggaagataggtgatacggcacccaaagcgaaagatacttccagtacaacagccaatgacattaacggtaaaaccgtttatggcaacaacgcggtaactatagcaagcagtcactctaatactaacatacctgacggggcaatggtaatcaataataaccgtttctggataggattaccccaaagccccacatggaatatcaccgctctcacaaatggtattccctcagcagagagtgatgctaacgcagcctattgcaccaacgctcaacttgaattaaacaagccgtttaagattactgtcaaaggcggcagatcagcaggtactggttttagcatcaatttaaataacgcgaggaatgcaaacaatggcggcgttttgaagggtcccagtgataccagtgttcctaatgcaaacggggctgtcgctaacccgcttggagttcttaacgccggaactgatgtatatgtatttaggattgacccgtcgactctgtcggtaaaaactgaagggttggcattaacgccacctgttactgcagcggctgtccttcccactcagttcattcaattccgtgctgacggctcttctaccggctggattgaggagattattattgagtacgaatga

SEQ ID NO: 50494 - protein, 314 aa, Unknown
  Obtained from environmental sample
  DOMAIN (9)...(91): Bacterial Ig-like domain (group 2)
  misc_feature (1)..(314): Xaa is any amino acid
MTVTLPEAPLTALLFNPATITVEVGQSLPGSTVAVTKTPAYATDVLEWVTAAAGTATVQSDTGMITGVAVGSTTVTVRSKTNTSVKADVTVNVVAATVNSKIIWSWKIGDTAPKAKDTSSTTANDINGKTVYGNNAVTIASSHSNTNIPDGAMVINNNRFWIGLPQSPTWNITALTNGIPSAESDANAAYCTNAQLELNKPFKITVKGGRSAGTGFSINLNNARNANNGGVLKGPSDTSVPNANGAVANPLGVLNAGTDVYVFRIDPSTLSVKTEGLALTPPVTAAAVLPTQFIQFRADGSSTGWIEEIIIEYE

SEQ ID NO: 50495 - DNA, 582 bp, Unknown
  Obtained from environmental sample
  misc_feature (1)..(582): n is a, c, g, or t
atggttttcgcagtgaaggagaattacgcattaaccggaaggaattatgtatttaacagtccatacgccgcgataaattccggactgggttatatttccgaggaccgcaaaggtcttggcctggtactgattcaggacgttaaaacaaatattgcccatgccagtctgaaaaagctttctcgctttgggattatggacggtcaaaaagaaataaaagaagcggagcgctaccggaaggaacttaatatcagaatgccctcggtggatcaaattgtgcgaaacctgtccggcggcaaccagcagaaggttgtggtaagcaagagtttgttggcaaatccggacatttttattgttgatgagccgaccaggggtattgacgttggcgcaaagacggaaatctacggaatattgaacaatatgatagccgccggaaaaagcgttatcatggttagttcagagcttcccgaagcgctgggtatggcggaccgtatttacgttatgaacgaaggtaaaataaaaggggagcttaccaaggaagaagcaacccaggaaaaaataatgcatctggctctcgtcggataa

SEQ ID NO: 50496 - protein, 193 aa, Unknown
  Obtained from environmental sample
  DOMAIN (6)...(170): ABC transporter
  misc_feature (1)..(193): Xaa is any amino acid
MVFAVKENYALTGRNYVFNSPYAAINSGLGYISEDRKGLGLVLIQDVKTNIAHASLKKLSRFGIMDGQKEIKEAERYRKELNIRMPSVDQIVRNLSGGNQQKVVVSKSLLANPDIFIVDEPTRGIDVGAKTEIYGILNNMIAAGKSVIMVSSELPEALGMADRIYVMNEGKIKGELTKEEATQEKIMHLALVG

SEQ ID NO: 50497 - DNA, 534 bp, Unknown
  Obtained from environmental sample
  misc_feature (1)..(534): n is a, c, g, or t
atgcagatcctaactcttggaaatgaattgcttaggcaaaaagcgaaaaaagttgacaaaattgacaatgaaataaaagaagcggcaaaacagatgtttgaaatcatcaaaaaagacaaaggggtggggatagccggccctcaaattggattgatgaagcgtatatttgttgtccatatcgagggcgacgaagagcgtgtttttattaatccttcaattctggaaacgtctcaggaaacggcaaaatacgaggaaggctgcctttccgttcccggtatttatgttgatgtggtccgttccgaatcagtaaagattcaggcgtggaacgagaaaggcaaaccttttacaatggaggcaaacgggcttctggcgagggttattcaacatgagtacgatcatcttgagggggttctctttttggaccggttgactgaattaaagagaaacaagcttattgaaaaatatgaaaaagccgcgattaagggagagaaaataaagagaaaaaaaaccaagggagaagaaataccaaagtga

SEQ ID NO: 50498 - protein, 177 aa, Unknown
  Obtained from environmental sample
  DOMAIN (2)...(149): Polypeptide deformylase
  misc_feature (1)..(177): Xaa is any amino acid
MQILTLGNELLRQKAKKVDKIDNEIKEAAKQMFEIIKKDKGVGIAGPQIGLMKRIFVVHIEGDEERVFINPSILETSQETAKYEEGCLSVPGIYVDVVRSESVKIQAWNEKGKPFTMEANGLLARVIQHEYDHLEGVLFLDRLTELKRNKLIEKYEKAAIKGEKIKRKKTKGEEIPK

SEQ ID NO: 50499 - DNA, 507 bp, Unknown
  Obtained from environmental sample
  misc_feature (1)..(507): n is a, c, g, or t
atgtttgccttttgtgccgattttatgacagagcagttccgcatcttcgcgcccgatgttttttgctgttttgaaaaattgaaaattccgccttcctcgtcatataaaaaaacgaaaggcattcaaattttaacaaagtggcagggcttggacgccgcctatcggaaaaccaagagcatatcatttgattacgcaatagctgaaaaatgcaggtgctccgttatggtccgcgcgaattttaactggatcgacataggcaactgggaagaatatgttaatttatccgggagtaaaagcgcgcaggttttcagcgtgtcatcggaaggttgttttgtggattccgacattcccgtcgcccttgccggagtagaggatttaatcgtggtaatccgcggcggaaaaaacggctcccccgcgtccgcgcttatcacaaaaaaaggccaaacccagaaagtccgcgacatagtcgaacaaataaaaaaatccggaaaaacggacattctttga

SEQ ID NO: 50500 - protein, 168 aa, Unknown
  Obtained from environmental sample
  misc_feature (1)..(168): Xaa is any amino acid
MFAFCADFMTEQFRIFAPDVFCCFEKLKIPPSSSYKKTKGIQILTKWQGLDAAYRKTKSISFDYAIAEKCRCSVMVRANFNWIDIGNWEEYVNLSGSKSAQVFSVSSEGCFVDSDIPVALAGVEDLIVVIRGGKNGSPASALITKKGQTQKVRDIVEQIKKSGKTDIL

SEQ ID NO: 50501 - DNA, 588 bp, Unknown
  Obtained from environmental sample
  misc_feature (1)..(588): n is a, c, g, or t
atgcagagcatgcttagcgaattacgtaaaaagtggcgcgatgagggagaaaaatggccgcccatcgtccacgaaatgaggatgcgcataggcataaataccggccccatcataaccggcaacatgggttcgacagtcagaatgaactacacgatgatgggtgacgccgtaaacctcgccgcccgcttggagagcgccgccaaaaactacggcgtctacacgatgatcagccaccacacgcacgcgttggtaagcgataagtttgaaacaagaaagctggacacaataaccgtggtggggaaatcggaaccggttacggtgtacgagttgatcagccgaaagggagagttgaccgacgaggaggccggattgctggatatatataataaaggcatcgacgcctattataatagagacttcggaaaagcgttggagttttttgataagtcgaaggaattggagccgaacaagaagataaatcccgcgaagccgacgccgtcggggaggtttgccgagatgtgcaggaagtacattgacaatccgccgggggcggattgggacggggttaataggctgacgtcaaaataa

SEQ ID NO: 50502 - protein, 195 aa, Unknown
  Obtained from environmental sample
  misc_feature (1)..(195): Xaa is any amino acid
MQSMLSELRKKWRDEGEKWPPIVHEMRMRIGINTGPIITGNMGSTVRMNYTMMGDAVNLAARLESAAKNYGVYTMISHHTHALVSDKFETRKLDTITVVGKSEPVTVYELISRKGELTDEEAGLLDIYNKGIDAYYNRDFGKALEFFDKSKELEPNKKINPAKPTPSGRFAEMCRKYIDNPPGADWDGVNRLTSK

SEQ ID NO: 50503 - DNA, 1416 bp, Unknown
  Obtained from environmental sample
  misc_feature (1)..(1416): n is a, c, g, or t
atgagcgaaatgagcaaggacgccgcatacaatgacgcttccgaaacagcgcagcactataaaaagaacgtcacccgctccttcatccccatcacgccggagcagattgacgcgaagctcacggggaacggtttttacgtcagccgcaaatacgacgggctgatggccgtgctggtctggaacggcaaggatgttgcgggtttcaactcctccggcaatctcctcggaaagttcccctgcttcgacgaggcggcaaaggcgctgaaggccgcgaagctgaacgaggcggtgattgccgcggaactgtacgcggaagaaagcgggggccgctcccgcgtgcatgacacgatcaaggccctgcacgatcccagggaacaggacaagctcgccctggcggttttcgacatcgtttccctggacggcaagccggcttcgtcctggaaagagacgctggagaagctggagggcattttcggcaagggcgtcaaggcaaggccggcgctgacggcaaaggccgcgaacagggaagaggtgaaaaagctctttacggagtgggttgtcgagggcggggccgaaggcgtggtggtgcgcggcgagttgccgctggtgttcaagatcaagcccaagtattcgattgacgccgttgtgatcggcttttccgtgggcgcgcccgcctcggtcgcgggcacgagcggcggcgccgcgccggatgaggtgcgcgccctgcttttggcgctcatggatgaaagcggcgggtatcacgtcatcggcaggacgggcaacggcatagcggcggaagagcgcaaggccctgtacgaaaagctgctgccggcccgtattccttcttcctacatcgaaagcgactccaaccatgtcgctttttacatggtcaagccggaactggtcgcccagatttccgccaatgacgttatttttgaggacagttccggccccatctataaccagcgcctggaaatcggcagcgaaggctgccgccgcaccgggtccgcgcccggcttccatcttatctcgccggtttttgagcgcttccgggacgataaaaaggccgagcctggggatgtgcgccttgggcagatagcggagcttttccacaatccgcatgccgaagggcgcgcgggcggcggggagttgcccaaatcggaactcctcaagcgggaagtgtataaaaaggaaagcggcggcaagctgatggcgctgaaattcctcctgtggaaaaccaacaaggaggcgaacggcatgccggcctatgtggcggcctgcgtcaattacagttccgaccgggccgagccgctgaagcaggacctgcgcatatcgagcgacaggacgcagatcggggcgctgtacgacgaatttcttgccgccaatgtgaagaagggctgggaaaaggtcgggtag

SEQ ID NO: 50504 - protein, 471 aa, Unknown
  Obtained from environmental sample
  DOMAIN (235)...(294): ATP dependent DNA ligase C terminal region
  misc_feature (1)..(471): Xaa is any amino acid
MSEMSKDAAYNDASETAQHYKKNVTRSFIPITPEQIDAKLTGNGFYVSRKYDGLMAVLVWNGKDVAGFNSSGNLLGKFPCFDEAAKALKAAKLNEAVIAAELYAEESGGRSRVHDTIKALHDPREQDKLALAVFDIVSLDGKPASSWKETLEKLEGIFGKGVKARPALTAKAANREEVKKLFTEWVVEGGAEGVVVRGELPLVFKIKPKYSIDAVVIGFSVGAPASVAGTSGGAAPDEVRALLLALMDESGGYHVIGRTGNGIAAEERKALYEKLLPARIPSSYIESDSNHVAFYMVKPELVAQISANDVIFEDSSGPIYNQRLEIGSEGCRRTGSAPGFHLISPVFERFRDDKKAEPGDVRLGQIAELFHNPHAEGRAGGGELPKSELLKREVYKKESGGKLMALKFLLWKTNKEANGMPAYVAACVNYSSDRAEPLKQDLRISSDRTQIGALYDEFLAANVKKGWEKVG

SEQ ID NO: 50505 - DNA, 336 bp, Unknown
  Obtained from environmental sample
  misc_feature (1)..(336): n is a, c, g, or t
ttggaactggcaagttttgttttgggagtcgttacgaacaaccctgttttggttgcccgaaagacacttgccgtgttgggagtagaaacttatttcactttcataatcggccttgatacctgcatgactgctaaaccaaacagaatacaatttgaaaaattttcggagttaacaaactgtcagcctgaaacctgcgtttccgtcggcgaccgctacgacatagatctggacattccgctgagtatgggaatgggagggatactcgttaacggcgtagaggatgtatactgtcttccagaacttctttatagcaaggatgataattatggcgtttga

SEQ ID NO: 50506 - protein, 111 aa, Unknown
  Obtained from environmental sample
  misc_feature (1)..(111): Xaa is any amino acid
MELASFVLGVVTNNPVLVARKTLAVLGVETYFTFIIGLDTCMTAKPNRIQFEKFSELTNCQPETCVSVGDRYDIDLDIPLSMGMGGILVNGVEDVYCLPELLYSKDDNYGV

SEQ ID NO: 50507 - DNA, 1185 bp, Unknown
  Obtained from environmental sample
  misc_feature (1)..(1185): n is a, c, g, or t
ttgggcatttcgtgccttcggcgaacatgcccgaaagcaaaccgattatccaccttggagctacttcctgctatgtgggcgataacaccgacattattcaacaacgcgccgnctcttttacaaataaaaaaactgcttgtaaacgcgatagccaaactctgcgaattcgccgacaaatacaaagcccttccctgcctcgccttcacgcattttcaggcggcgcagccaactacgatgggaaaacgagcaacgctctggatacaggatttattgtccgaccttgaacagcttgagttcacgcttaacggcttaaaattgctcggctgcaaaggcacaacgggaacaggagcgagctttctttccctttttgaaggcaatcatgaaaaagtaaaatctctcgaaaaaaaaatagccgaaaaaatgggctttgaaaaagtatatgcggtaagcggacaaacatattcaagaaaagtcgattattacaccttgtctgttctttcgggtatcgcacaaagcgcgtataaattttctaacgatatccgcctgctttctcatcttaaagaagttgacgaaccgtttgagaacactcaagtaggctcttccgcgatggcgtacaaaagaaacccgatgagaagcgagcgtatcgcttccctagcccgttatgtgacagttgacgctcttaaccccgcgcttaccgccagcgcgcaatggcttgagcgcacactcgatgattccgctaacaggcgcatatcaatccctgaggcgttccttgccgcagaagcaatactttcgctttacatcaatattgtcggcggacttaatgtctaccccaaagtaatagaaaaacatttaaacgaagaactgccttttatggcgacggaaaacattttaatgcactgcgtaaaaaaaggcggcgacaggcaggctctccacgagaaaataaggattcactccatggaagcggcggaaaaaataaaactgcacggcggcgacagcgatttaatcacccgcattttagcggataacacttttgagataaccaaaaaagaaatggataccctgctttccgcagaacaatttacaggcagggcaaaagaacaaacggaagaatttttaattgaagtaaaaaaggttcttgacgcaaataaagaatttttaggcgttgatgttaagataacggtataa

SEQ ID NO: 50508 - protein, 394 aa, Unknown
  Obtained from environmental sample
  DOMAIN (1)...(224): Lyase
  misc_feature (1)..(394): Xaa is any amino acid
MGISCLRRTCPKANRLSTLELLPAMWAITPTLFNNAPXLLQIKKLLVNAIAKLCEFADKYKALPCLAFTHFQAAQPTTMGKRATLWIQDLLSDLEQLEFTLNGLKLLGCKGTTGTGASFLSLFEGNHEKVKSLEKKIAEKMGFEKVYAVSGQTYSRKVDYYTLSVLSGIAQSAYKFSNDIRLLSHLKEVDEPFENTQVGSSAMAYKRNPMRSERIASLARYVTVDALNPALTASAQWLERTLDDSANRRISIPEAFLAAEAILSLYINIVGGLNVYPKVIEKHLNEELPFMATENILMHCVKKGGDRQALHEKIRIHSMEAAEKIKLHGGDSDLITRILADNTFEITKKEMDTLLSAEQFTGRAKEQTEEFLIEVKKVLDANKEFLGVDVKITV

SEQ ID NO: 50509 - DNA, 384 bp, Unknown
  Obtained from environmental sample
  misc_feature (1)..(384): n is a, c, g, or t
ttgtcatataacttttataacaatttatgttataatatccccatgaaaaacataaaagataaattgattttaattaccggcggagcgtccggtatcggacagcttatggcgttcgcttttgcggaaaaacacgcaagagtgattgtttgggacattaacgaaaatgtaatgaaaacaaggaagatgaagcccgcgcaaaaaatatttttatacgcggaatggtctgcgatgtatccgacagaaacgccgtttacactcaggcgcaaaaacttaccgcagagttcggtccgttggacatacttgttaataacgcggggattgtatcgaaaaaaggagagaacgtcgcaggtcccgctttcctcggcgtttccgatgaaaatataa

SEQ ID NO: 50510 - protein, 127 aa, Unknown
  Obtained from environmental sample
  misc_feature (1)..(127): Xaa is any amino acid
MSYNFYNNLCYNIPMKNIKDKLILITGGASGIGQLMAFAFAEKHARVIVWDINENVMKTRKMKPAQKIFLYAEWSAMYPTETPFTLRRKNLPQSSVRWTYLLITRGLYRKKERTSQVPLSSAFPMKI

SEQ ID NO: 50511 - DNA, 654 bp, Unknown
  Obtained from environmental sample
  misc_feature (1)..(654): n is a, c, g, or t
atggtctgcgatgtatccgacagaaacgccgtttacactcaggcgcaaaaacttaccgcagagttcggtccgttggacatacttgttaataacgcggggattgtatcgaaaaaaggagagaacgtcgcaggtcccgctttcctcggcgtttccgatgaaaatataatcaaacttatgaatatcgacgcgctttcacttttctggacaagtaaagcattcctgccttccatgatagaaagaaacacaggtcacatagttacaatttcctcatccgccggaattatcggcgtaaagggattggcggattactgcgccgcaaaattcgccgcattcggttttgacgaatcgctgcgcatggaatttcggcgcatgaaaagcgcgataaaaaccacagtggtttgtccgttctttattaatacaggaatgtttgaaggcgtaaagacgcgcttcccgcttattctaccgattctaaaaaaagaatacgttgtaaaaagaattgtcaaagcggtattgaagaacaaaaaaaggcttctcatgccgcgttttgtatattcgatatatttcctgcggcttctgtccccgaccgtaatggatggggtagccgactttttcggcatcagccacgcaatggacgactttaaaggcagagcgtaa

SEQ ID NO: 50512 - protein, 217 aa, Unknown
  Obtained from environmental sample
  DOMAIN (1)...(122): short chain dehydrogenase
  misc_feature (1)..(217): Xaa is any amino acid
MVCDVSDRNAVYTQAQKLTAEFGPLDILVNNAGIVSKKGENVAGPAFLGVSDENIIKLMNIDALSLFWTSKAFLPSMIERNTGHIVTISSSAGIIGVKGLADYCAAKFAAFGFDESLRMEFRRMKSAIKTTVVCPFFINTGMFEGVKTRFPLILPILKKEYVVKRIVKAVLKNKKRLLMPRFVYSIYFLRLLSPTVMDGVADFFGISHAMDDFKGRA

SEQ ID NO: 50513 - DNA, 330 bp, Unknown
  Obtained from environmental sample
  misc_feature (1)..(330): n is a, c, g, or t
atgcaaaatctgaagggccatgcgcgggccctcatcattgccaccgaagacggctctgagggggttagcggccgtattttggactttttcacgccgatggggtacagcgccgtgtttacctgtggcccggagccaatgcttaaggaggtggccgacagaagtgtggcatgtggaatcccctgctatgtaagcaccgaaagacaaatggcctgcggggtgggggtctgtcttggctgtaaaataaaaaccattggcggaagccggcgttgctgcgccgacggcccgatattcactggcgaggagatctgctttgaaaacaaaggagactga

SEQ ID NO: 50514 - protein, 109 aa, Unknown
  Obtained from environmental sample
  misc_feature (1)..(109): Xaa is any amino acid
MQNLKGHARALIIATEDGSEGVSGRILDFFTPMGYSAVFTCGPEPMLKEVADRSVACGIPCYVSTERQMACGVGVCLGCKIKTIGGSRRCCADGPIFTGEEICFENKGD

SEQ ID NO: 50515 - DNA, 864 bp, Unknown
  Obtained from environmental sample
  misc_feature (1)..(864): n is a, c, g, or t
ttggcggaagccggcgttgctgcgccgacggcccgatattcactggcgaggagatctgctttgaaaacaaaggagactgatctctcggttagcattgccggagtcaaactgcgaaacccggtcattgccgcctccgggacatttggttatggcagggagtacgaaggccttttggacattgcggctctggggggtatctgcacaaaaggcattacattaaaccccaggccaggaaatcagggtgttagaatctacgagactccttcaggagtgatgaactccatcggtctggaaaatccgggcattcccgcttttatcgaaactgagctgccttacctaaaggagctaggcccggtaataatcgccaatttatcaggctctaccgtttcggagtatgtccatggcgcccgtctgctcggcaattcagagatagacatgatagaacttaacgtctcttgtcccaacgttaaatcggggggaatgacctttggccttgaacctgaaaccgctgcttctttaacaaggcaggtacgcaaggccgcttcaaaaaaaccgctaatggtaaaactctcgcccaatgccccggacattgcggcagtggccaaggcctgcgtaaacgccggtgcggacgccatttcgctggtaaataccttcaaggccatggccatcgacatcaacacaagaaagccggtttttgaaaatataagcgcgggtctttccggcccctgcatacatccgattgcccttcgtatggtctgggaactatacgagttgatcaagggtccccattgtggtataggcggtatagcttgtgcctcagacgctctggagtttcttcttgcggagccgccgccatccaggtag

SEQ ID NO: 50516 - protein, 287 aa, Unknown
  Obtained from environmental sample
  DOMAIN (27)...(281): Dihydroorotate dehydrogenase
  misc_feature (1)..(287): Xaa is any amino acid
MAEAGVAAPTARYSLARRSALKTKETDLSVSIAGVKLRNPVIAASGTFGYGREYEGLLDIAALGGICTKGITLNPRPGNQGVRIYETPSGVMNSIGLENPGIPAFIETELPYLKELGPVIIANLSGSTVSEYVHGARLLGNSEIDMIELNVSCPNVKSGGMTFGLEPETAASLTRQVRKAASKKPLMVKLSPNAPDIAAVAKACVNAGADAISLVNTFKAMAIDINTRKPVFENISAGLSGPCIHPIALRMVWELYELIKGPHCGIGGIACASDALEFLLAEPPPSR

SEQ ID NO: 50517 - DNA, 579 bp, Unknown
  Obtained from environmental sample
  misc_feature (1)..(579): n is a, c, g, or t
atgctggttgagtggtctgaatttacggaaaaaggtttgccttgcatgccaggactgccctcaggtgaaaaaaaagcgtcggtaacgataggcgtttttgacggggttcaccgcgggcacaaggcgttaatagagcgcgttgtttcacataacgccgaaaacacgccggtggttatcactttccgggaaaatcacaaaacaaccggcaatgagccgaaagacattcaaacttttgaacaaagggtaatgacattggaaaaatctggaattcaaataattattgttattgattttacggaatcgttcaggcaaatggcgggcattgattttttggaaatgctgttaaaacgctgtaacatcgggtttttcgccgtcggaagcgccttccgctgcggatatcaactggatacggacgcggcggctattcaaaaatttttcgcctcgcgcggcattcccgtagaaatagtccccgaagttacggaagattccctgcctgtaagttcaagccgtatccgcgccgcaattgccgagggaaatatccggctggcggaaacaatgctgggcctcggccgattctga

SEQ ID NO: 50518 - protein, 192 aa, Unknown
  Obtained from environmental sample
  DOMAIN (28)...(174): Cytidylyltransferase
  misc_feature (1)..(192): Xaa is any amino acid
MLVEWSEFTEKGLPCMPGLPSGEKKASVTIGVFDGVHRGHKALIERVVSHNAENTPVVITFRENHKTTGNEPKDIQTFEQRVMTLEKSGIQIIIVIDFTESFRQMAGIDFLEMLLKRCNIGFFAVGSAFRCGYQLDTDAAAIQKFFASRGIPVEIVPEVTEDSLPVSSSRIRAAIAEGNIRLAETMLGLGRF

SEQ ID NO: 50519 - DNA, 1014 bp, Unknown
  Obtained from environmental sample
  misc_feature (1)..(1014): n is a, c, g, or t
gtgggttttgcgcttgcttcttatgagacgtcggacataaagtccgtagacgtaaagtccgcgaatgatacaccagccgcggatgatgtatcacctaaaaataacgaatatgtctgtaaagcttttcttgaatatatttccatagatacaagaattaaaaatgtcgaagaaaaatataaaaaatggactgatcctttaaatataaacgcggaaagccgactgcggctggcggaaactttcgcggttatgggcgaatccttaaaagcgctggaacaaattaacaaggcatgggaacgcagggacaaagctatccgcgcagtctccgccggagaagaaggggtcaggacaaaaaaagagctgctccttgcggcgcggatgtccttacggcttgggcaatacaacgaagcggaaagttttatagacgcaattcttgaacaatgggcaatttcagccgagggcaaagaagcgataaaagaaaaaataaaaattcttaacgatcttaaaagattcggcgaattaaaagattttattttaaaatacgcaaaaaataaaaaagatattaattttcatactttgcttgcccgctgttattttgaattgaaggattataaaaaatccgcggcatcgtgggacaaggcttttgaaatgaacggtgaaaacggcgtctatgcagctaacgccgcaaacgcgtttgatcttacgggaaagaaagaagaggctcttaccaggtttatttcagcggggaaaatttttcttaatcaggacaatcaggcggagcttggggcaataatcccaaagctttcaattttgggcggcaacaactgggaagcccgtatccttgtcgggaaatgggcttttactatcgaagattacaaccgctgtataacggaattttccaccgcaaataagctcagatgcgcaataaagccgcgtcctgaagcagacccggctcattattatttgtgggggcttgccttaaacataaaggaaaaaacattgacgccgtccgtttga

SEQ ID NO: 50520 - protein, 337 aa, Unknown
  Obtained from environmental sample
  DOMAIN (187)...(220): Tetratricopeptide repeat
  misc_feature (1)..(337): Xaa is any amino acid
MGFALASYETSDIKSVDVKSANDTPAADDVSPKNNEYVCKAFLEYISIDTRIKNVEEKYKKWTDPLNINAESRLRLAETFAVMGESLKALEQINKAWERRDKAIRAVSAGEEGVRTKKELLLAARMSLRLGQYNEAESFIDAILEQWAISAEGKEAIKEKIKILNDLKRFGELKDFILKYAKNKKDINFHTLLARCYFELKDYKKSAASWDKAFEMNGENGVYAANAANAFDLTGKKEEALTRFISAGKIFLNQDNQAELGAIIPKLSILGGNNWEARILVGKWAFTIEDYNRCITEFSTANKLRCAIKPRPEADPAHYYLWGLALNIKEKTLTPSV

SEQ ID NO: 50521 - DNA, 600 bp, Unknown
  Obtained from environmental sample
  misc_feature (1)..(600): n is a, c, g, or t
atgggcggcgcaagtttcggctattcgggataccctgcttttaactcgccccagtccctggcgaaaacaatcgcggacacgggatttgacatcgtaaatcaggcgaataaccacgctatggacatggggaaaaagggccttatcgcgactcttgatttatgggacacaatagagggaataacagtaatcggcgcgcgtaaagaaggaaacagcgcccgaataataacaaaaaacaatataagccttggattcttgtcctatacctacggacttaacggcattgctcttccggcggataatccgaatcttgtatctcttatcaacaaaaataaaatggagacggaaattgacgcgctacgtcccttatgtgattttttaattgtttccatgcattggggcgatgaatacaagacggaaccgggaaagacacaaaccgaccttgccctttttttggcggaacacggcgcagaccttattattgggcatcatccccatgttcttcagcgcgcgcaaaccattactcttgaagacggaagaaaacattttgcatctattctctgggaaactttgtctccaaccagagggaaaaagaaaggataa

SEQ ID NO: 50522 - protein, 199 aa, Unknown
  Obtained from environmental sample
  misc_feature (1)..(199): Xaa is any amino acid
MGGASFGYSGYPAFNSPQSLAKTIADTGFDIVNQANNHAMDMGKKGLIATLDLWDTIEGITVIGARKEGNSARIITKNNISLGFLSYTYGLNGIALPADNPNLVSLINKNKMETEIDALRPLCDFLIVSMHWGDEYKTEPGKTQTDLALFLAEHGADLIIGHHPHVLQRAQTITLEDGRKHFASILWETLSPTRGKKKG

SEQ ID NO: 50523 - DNA, 429 bp, Unknown
  Obtained from environmental sample
  misc_feature (1)..(429): n is a, c, g, or t
atgctggaaaagcagttcagccttttctttaagcgcgctttgcgtatgccgggcatcacgggcgagaacctttttgtattgttggaaaggcggcttgataacgtggtttaccgtatgcgctttgcttcgtcaagaacccaggcaagacagcttgtactgcacggtcatgtgcttgtaaacggcagaaaaataacgataccttcatatattgtaaaccctgaaaatgaaatcagcattgccgaaaaaagcaagaatatgacggttattaaggattcgcttagggaattcggcaagtcgggcgttatgccatggctaagccttgatcccgacgcgatgaaagggaagttccttgcgtctccgcgcagaagcgatattaccgatcttggggatattaaggaacaaatgattatagaattatattcaaagtaa

SEQ ID NO: 50524 - protein, 142 aa, Unknown
  Obtained from environmental sample
  DOMAIN (30)...(77): S4 domain
  misc_feature (1)..(142): Xaa is any amino acid
MLEKQFSLFFKRALRMPGITGENLFVLLERRLDNVVYRMRFASSRTQARQLVLHGHVLVNGRKITIPSYIVNPENEISIAEKSKNMTVIKDSLREFGKSGVMPWLSLDPDAMKGKFLASPRRSDITDLGDIKEQMIIELYSK

SEQ ID NO: 50525 - DNA, 549 bp, Unknown
  Obtained from environmental sample
  misc_feature (1)..(549): n is a, c, g, or t
atgacagattcggcacgaggcggattacattctttccgcggccttcgccacgccgggctggatgtctcccgcgtcgagaaggtcgagctggcgcaggcggattttgccgcggcctttgtctcagggcgcatagacgctctggcttcctttgaccagaacttcgcaaacgcccttgccgtgcccggcgcgaaaaaattgatagacggcacggagtacggttccctcaactggagcctgcacatcgcctcgcgcgttttcacggaaaagcacccggaacttctgcgcgcctgttaccgtgctttacgcagggaggctgctcgcgccctggaggagccttctctcatcatggacgcataccggcaattcggcgcgagtgaagcgcaaatctcaatactaaaaactttcgatgtgccgcagattcttcccctggacgcgcaggctgtggcggactttgcccgacaacaaggccagtacgtagaattcggctttataaacgcggcgccgaaagacttcagctctcgtgtgctggatttttcaaacgaggactag

SEQ ID NO: 50526 - protein, 182 aa, Unknown
  Obtained from environmental sample
  misc_feature (1)..(182): Xaa is any amino acid
MTDSARGGLHSFRGLRHAGLDVSRVEKVELAQADFAAAFVSGRIDALASFDQNFANALAVPGAKKLIDGTEYGSLNWSLHIASRVFTEKHPELLRACYRALRREAARALEEPSLIMDAYRQFGASEAQISILKTFDVPQILPLDAQAVADFARQQGQYVEFGFINAAPKDFSSRVLDFSNED

SEQ ID NO: 50527 - DNA, 423 bp, Unknown
  Obtained from environmental sample
  misc_feature (1)..(423): n is a, c, g, or t
atgagttattttttagacacaaatacttgtatatattttttaaaaaatacaaataagttttttttagacaagtttaacagtattaacgcaaacgatataaaaataccttctattgttaccgcagaattacattacggggcattaaaaagcacaaggaaagatgaaaatcttgctaaaatctctaaatttattgctctttatgatgttgtttcttttgataaaaaatctgcggaaatttatggcgaagttcgcagaaaactagaaagtgttggaaatataattggtggcaatgatctgcttattgcttctattgttttagcaaataacggaattttggtaactcataacacaaaagaatttaatagggtggaaaatttggttatagaagattggctaaacctcacctatcaatctcaggtataa

SEQ ID NO: 50528 - protein, 140 aa, Unknown
  Obtained from environmental sample
  DOMAIN (3)...(131): PIN domain
  misc_feature (1)..(140): Xaa is any amino acid
MSYFLDTNTCIYFLKNTNKFFLDKFNSINANDIKIPSIVTAELHYGALKSTRKDENLAKISKFIALYDVVSFDKKSAEIYGEVRRKLESVGNIIGGNDLLIASIVLANNGILVTHNTKEFNRVENLVIEDWLNLTYQSQV

SEQ ID NO: 50529 - DNA, 843 bp, Unknown
  Obtained from environmental sample
  misc_feature (1)..(843): n is a, c, g, or t
atgggcattggcgttccagaacgcggcgaatacataagggttatgctctgcgaacttaaccgcatagcctcgcatttggttttttatgcttgctttggtggcgatttgggcgggcaaacggcattgctttacggattcaaagaacgcgagatgattcatgatatttttgaagaagtgtgcgggcagcgtttgactatgaattactttagacccggcggctcttctaaggatgttccagataccttcattccgagggttaaggcttttttgaaacacatgaagcccacaatgaaagattacgaaactctgcttaccaaaaatgtgatagtgctgtttcgctcgcagggaataggggttctctcaaaagaaaaagccgttgcactaggctgttccggtccggttttaagggcaagcggcattaattacgatgttcgcaaaaatgatccttattcaatttacagttcttttaatttcaatattcccgtagcaaccgagggcgattgctatgctcgctatgttgtgcgtatgcaagaaatttacgagtctatgaaaattttggaacagtgcatagagaagttcccaagcggtccctaccgctccaagccttcaccgagctataaacttccccaaggcagctattatgctcaaacagaaacagcaaaaggcatttacggcacatacataatcgcagacaaaggcgacaaaccataccgcatccatactaggagtccgagctttgcaaatttgatgtccttgaatgaaatgagcaaggggcataaggtttctgatttggttactataatggcaacgctggatcctgttatacctgagattgataggtga

SEQ ID NO: 50530 - protein, 280 aa, Unknown
  Obtained from environmental sample
  DOMAIN (35)...(280): Respiratory-chain NADH dehydrogenase, 49 Kd subunit
  misc_feature (1)..(280): Xaa is any amino acid
MGIGVPERGEYIRVMLCELNRIASHLVFYACFGGDLGGQTALLYGFKEREMIHDIFEEVCGQRLTMNYFRPGGSSKDVPDTFIPRVKAFLKHMKPTMKDYETLLTKNVIVLFRSQGIGVLSKEKAVALGCSGPVLRASGINYDVRKNDPYSIYSSFNFNIPVATEGDCYARYVVRMQEIYESMKILEQCIEKFPSGPYRSKPSPSYKLPQGSYYAQTETAKGIYGTYIIADKGDKPYRIHTRSPSFANLMSLNEMSKGHKVSDLVTIMATLDPVIPEIDR

SEQ ID NO: 50531 - DNA, 756 bp, Unknown
  Obtained from environmental sample
  misc_feature (1)..(756): n is a, c, g, or t
atgaaaaaaaatgtctggctgtcggctccgggacttatttgctgtgccggaaaaaacaggaacgaattatatgactcctgcctgagaggttatcagagcggaatggtaatggttgaattacctggtgacggaaaattccccgttggcatcattcccggagagcttcccgaagttaatttcccgccagcggcttatgctggtggaaccagaattatccgcgttattgacgcggctctggaacagatacgccccgatatagaaaaagccattgaaaaatacggtcctgaaaaaatcggtgtctgtcttggttcctgcgacaatggttccgaagcttcttttttggctcatcaggcgttttttacgctgggcgcttttccggaagattacagtctgtgttttcaaagcgcgtcattttctgcagaatttattgcccgcaaattcggtctttccggtccggtatttacctgtgctaccgcgtgcgcctccggggcaagcgccattatacggggagctgaattgatacacgccggcttgtgcggcgcggtcattgccggtggcgcggatattgtctcacaaactgtttttatggggttccattccctggaagcaatttcggacaacatcaccaatccgttcagcaagaaccggaaagggatcaaccttggtgaaggagcggcattttttctccttgattcacggagaattccgctgttgaactgttgggagttggggaaagcgccgacgctaatcacatga

SEQ ID NO: 50532 - protein, 251 aa, Unknown
  Obtained from environmental sample
  DOMAIN (3)...(235): Beta-ketoacyl synthase, N-terminal domain
  misc_feature (1)..(251): Xaa is any amino acid
MKKNVWLSAPGLICCAGKNRNELYDSCLRGYQSGMVMVELPGDGKFPVGIIPGELPEVNFPPAAYAGGTRIIRVIDAALEQIRPDIEKAIEKYGPEKIGVCLGSCDNGSEASFLAHQAFFTLGAFPEDYSLCFQSASFSAEFIARKFGLSGPVFTCATACASGASAIIRGAELIHAGLCGAVIAGGADIVSQTVFMGFHSLEAISDNITNPFSKNRKGINLGEGAAFFLLDSRRIPLLNCWELGKAPTLIT

SEQ ID NO: 50533 - DNA, 456 bp, Unknown
  Obtained from environmental sample
  misc_feature (1)..(456): n is a, c, g, or t
ttgggagttggggaaagcgccgacgctaatcacatgaccgctccggaaacgaatggggccggggcagcaaaggcaatacgggccgcgcttctggatgcgggactggaaccgaaacacattggctatttaaaccttcatggtacgggtaccgaacttaacgacaaagccgaagctatggccataaagacggtatttaatcccaccccaaaactaagttcaactaaacccatcaccggtcatactctgggtgccgcaggagcattagaagcggcaatttgctggatggtattgacggaaaaaagaggtattccggtacattgctgggatggtgtcagagatgaggaaattccgtttttccctacagaaagtattgatctaaaagcgcctacgatatgtatgagtaatagttttgcttttggcggatgcaatgtcagtttaattttgggaaggagatag

SEQ ID NO: 50534 - protein, 151 aa, Unknown
  Obtained from environmental sample
  DOMAIN (2)...(151): Beta-ketoacyl synthase, C-terminal domain
  misc_feature (1)..(151): Xaa is any amino acid
MGVGESADANHMTAPETNGAGAAKAIRAALLDAGLEPKHIGYLNLHGTGTELNDKAEAMAIKTVFNPTPKLSSTKPITGHTLGAAGALEAAICWMVLTEKRGIPVHCWDGVRDEEIPFFPTESIDLKAPTICMSNSFAFGGCNVSLILGRR

SEQ ID NO: 50535 - DNA, 468 bp, Unknown
  Obtained from environmental sample
  misc_feature (1)..(468): n is a, c, g, or t
ttgttgatcgaaaaagaagaactgcaaaccctaatcccgcataagggaaaaatgtttctcctcagcagggtcattgattatgatcttgcgcatggtatccgggctgagtatgatatcaccgaacattgccttttttacgatcctgctgtggatggcgtaccgagttgggcgggttttgagtttatggctcaggcaatttccgttctttcaggaatcaaatgccgggaaaggagcggaaaaccgcatatgggatttattttaagtatccagtctgtacgaatggaaatccctctgtttaaaaacggcagtacagtacagatatgtgttaaagaaattgattgtacagatatgttttatacttgtgagggagaagcctttctggaaggcagaaaggttatggaaggaaggctcacggttatgaaaacaagtaatgaaatgataaaaaacattgccggggagcggacttaa

SEQ ID NO: 50536 - protein, 155 aa, Unknown
  Obtained from environmental sample
  DOMAIN (12)...(136): FabA-like domain
  misc_feature (1)..(155): Xaa is any amino acid
MLIEKEELQTLIPHKGKMFLLSRVIDYDLAHGIRAEYDITEHCLFYDPAVDGVPSWAGFEFMAQAISVLSGIKCRERSGKPHMGFILSIQSVRMEIPLFKNGSTVQICVKEIDCTDMFYTCEGEAFLEGRKVMEGRLTVMKTSNEMIKNIAGERT

SEQ ID NO: 50537 - DNA, 411 bp, Unknown
  Obtained from environmental sample
  misc_feature (1)..(411): n is a, c, g, or t
ttgccggggagcggacttaaagtgagcaaagaaaaaaaagtgcttataaccggcgcaagcaggggtataggccgggctattgcccttgctgtatccggcgcggggtatcaggtaacggcccattatcacaaggggaaagaagccgctgaatcattgcaaaaggagattcaacaaaaaggcggaaacattgaattgatccaatttgatgtaggaaacagagaagaatgtcaggaaaaactggaaaaatggtcggaaggaaacggcgctttttggggaattatcaacaatgcgggaatctccgccgatgattcttttccgggcatgagcggagaatactgggatactgttcttcgcacagatcttgacagtttctataatgtgcttcatcccctcataagcccatctccgtaa

SEQ ID NO: 50538 - protein, 136 aa, Unknown
  Obtained from environmental sample
  DOMAIN (12)...(136): short chain dehydrogenase
  misc_feature (1)..(136): Xaa is any amino acid
MPGSGLKVSKEKKVLITGASRGIGRAIALAVSGAGYQVTAHYHKGKEAAESLQKEIQQKGGNIELIQFDVGNREECQEKLEKWSEGNGAFWGIINNAGISADDSFPGMSGEYWDTVLRTDLDSFYNVLHPLISPSP

SEQ ID NO: 50539 - DNA, 618 bp, Unknown
  Obtained from environmental sample
  misc_feature (1)..(618): n is a, c, g, or t
atggaaaacagagatttcttggaagaaaattatatcaagggagaaattattgtaaatatagtttgggcaaatatttttggtgttattgtattaataatcgcaatactactttttggaattcccttctatattttatggcatgaaaaatttctgaatgttcagatgattaatcttataatgaattcacccgctcaaataataatggctgttaaaaatttagccatttatttattgatcttatttatacttattgttatccatgaattaattcacggaatatttatttcaatttttgcaaaaaatagatttaaatccgtaaaatttggtatagcgccagcaaggaaattattctcaccttattgtcatagtaaagagaaactaaaaataaaccattacaggattgttgttataatgccattaataattatgggtataataccgacaataatttcaataattattggaaatctatttttattgttttggggaataatatttattatggccgctggtggagatgcattaatatttcttaagacgttaaaacaaaagggagacagctggatatttgatcatcctacagaaccaggtttttatgcatataaaaagacaaattaa

SEQ ID NO: 50540 - protein, 205 aa, Unknown
  Obtained from environmental sample
  misc_feature (1)..(205): Xaa is any amino acid
MENRDFLEENYIKGEIIVNIVWANIFGVIVLIIAILLFGIPFYILWHEKFLNVQMINLIMNSPAQIIMAVKNLAIYLLILFILIVIHELIHGIFISIFAKNRFKSVKFGIAPARKLFSPYCHSKEKLKINHYRIVVIMPLIIMGIIPTIISIIIGNLFLLFWGIIFIMAAGGDALIFLKTLKQKGDSWIFDHPTEPGFYAYKKTN

SEQ ID NO: 50541 - DNA, 1968 bp, Unknown
  Obtained from environmental sample
  misc_feature (1)..(1968): n is a, c, g, or t
gtgtcttctgattactccattgggggtactagttcgcttgttgcctatgcgggtagtactattcgaattacccccgtggcggaaggaacaacgaccattaccgctaccaccgaggagggcggctacacggcaacgtgcgccgtaaccgtaacctgcatttcaaccgagcctgagccgccttccgagttccccggcacgccgggacttaagtttcaaatgcttgacgcggctggaaataccgtcagtgagcaatcgaaatgcgtcgcgtggcgagtcattcaaggcactgctgtcagcggcgatgtggttatacctcccactcgcaacggcacgcccgtaacgcaaatcggcagtgacgcattcaggagcaccgccattaccagcataaccataccgaacagcgttaccagcattgatggtggtagtgttaattattcttccggcgctttcagcggctgtactaaccttgtcagcgtaatctttgagcccggaagcaaacttaccaccataggggagtgcgctttttacggttgcaccagccttaccggcataaccataccaaacagcgttaccagcattaaggcttatgcttttggcagatgtaccgggcttaccaagataaccataccgaacagcgttaccagcattgaaggatatagtatttctagtggtgttggcgcttttaccggctgcaccaaccttaccagcgtaacctttgcctctggaagcaaagttaataccattggtcgttccgctttttccggttgttccaaacttgccagcataaccataccggacagcgttaccagcattggggaggccgctttttccggctgcacggggcttaccagcataaccataccgaacagcgttaccagtattgaggaggccgctttttccggctgcacggggcttaccagcgtaaccgtagggaacggcgttaccaacctgaacgggttttattttgactcgtacaccaaccttgccagcgtaaccatagggaacagcgttgaaagcattaccggttttagtggctgcaaaaacctgaccagcgtaatctttgcccccggaagcaaagccactaccataggatctgccgcttttagaaattgtaccagccttcccggcataaccataccgaacagcgtaaccataattgaagatggtaataataattatcgtcttggcgcttttagtgactgcaaaaacctgactagcgtaatctttgaacccggaagcaaacttaccaccataggggagttcgctttttacggttgtaccgagatgaccgtcataaccatacccaacagcgttaccaccataaagacttgcgcttttggtaattgcaccagacttaccaagataaccataccgaacagcgtaatcagtattgaaggaagtagttttaatagtgctggtgcttttaccggttgcaccaaccttaccagcgtaacctttgcccctacaagcaaagttaccaccattggggtttatgcttttagtaattgcaccaatcttaccagtataaccataccggacagcgttactagcattgggagcagcgctttttccggctgcaccagccttatcagcgttactattccaaacagtgttaccaccattgggggtctggcttttaatggctgtaccaaccttgccagcgttaccattccaaacagcgttaccaccattggggctgatgctttttgggattgcaccagccttgccagcgtaaccataggcaacggcgttatcagcattagggagtttgcttttgaagattgcaccagcctcgccagcgtaacatttcaaggcacgattgcttcaagcgagtttcatggtactgcgttcaacggcatcggcgacttgcgggacaagttttacgcgacagacgcagccaacggaacgccggggacgtacaccacgacagcgccggtgagcagcggctcggtgtggacgaaacaataa

SEQ ID NO: 50542 - protein, 655 aa, Unknown
  Obtained from environmental sample
  misc_feature (1)..(655): Xaa is any amino acid
MSSDYSIGGTSSLVAYAGSTIRITPVAEGTTTITATTEEGGYTATCAVTVTCISTEPEPPSEFPGTPGLKFQMLDAAGNTVSEQSKCVAWRVIQGTAVSGDVVIPPTRNGTPVTQIGSDAFRSTAITSITIPNSVTSIDGGSVNYSSGAFSGCTNLVSVIFEPGSKLTTIGECAFYGCTSLTGITIPNSVTSIKAYAFGRCTGLTKITIPNSVTSIEGYSISSGVGAFTGCTNLTSVTFASGSKVNTIGRSAFSGCSKLASITIPDSVTSIGEAAFSGCTGLTSITIPNSVTSIEEAAFSGCTGLTSVTVGNGVTNLNGFYFDSYTNLASVTIGNSVESITGFSGCKNLTSVIFAPGSKATTIGSAAFRNCTSLPGITIPNSVTIIEDGNNNYRLGAFSDCKNLTSVIFEPGSKLTTIGEFAFYGCTEMTVITIPNSVTTIKTCAFGNCTRLTKITIPNSVISIEGSSFNSAGAFTGCTNLTSVTFAPTSKVTTIGVYAFSNCTNLTSITIPDSVTSIGSSAFSGCTSLISVTIPNSVTTIGGLAFNGCTNLASVTIPNSVTTIGADAFWDCTSLASVTIGNGVISIREFAFEDCTSLASVTFQGTIASSEFHGTAFNGIGDLRDKFYATDAANGTPGTYTTTAPVSSGSVWTKQ

SEQ ID NO: 50543 - DNA, 1653 bp, Unknown
  Obtained from environmental sample
  misc_feature (1)..(1653): n is a, c, g, or t
ttgaaatgttacgctggcgaggctggtgcaatcttcaaaagcaaactccctaatgctgataacgccgttgcctatggttacgctggcaaggctggtgcaatcccaaaaagcatcagccccaatggtggtaacgctgtttggaatggtaacgctggcaaggttggtacagccattaaaagccagacccccaatggtggtaacactgtttggaatagtaacgctgataaggctggtgcagccggaaaaagcgctgctcccaatgctagtaacgctgtccggtatggttatactggtaagattggtgcaattactaaaagcataaaccccaatggtggtaactttgcttgtaggggcaaaggttacgctggtaaggttggtgcaaccggtaaaagcaccagcactattaaaactacttccttcaatactgattacgctgttcggtatggttatcttggtaagtctggtgcaattaccaaaagcgcaagtctttatggtggtaacgctgttgggtatggttatgacggtcatctcggtacaaccgtaaaaagcgaactcccctatggtggtaagtttgcttccgggttcaaagattacgctagtcaggtttttgcagtcactaaaagcgccaagacgataattattattaccatcttcaattatggttacgctgttcggtatggttatgccgggaaggctggtacaatttctaaaagcggcagatcctatggtagtggctttgcttccgggggcaaagattacgctggtcaggtttttgcagccactaaaaccggtaatgctttcaacgctgttccctatggttacgctggcaaggttggtgtacgagtcaaaataaaacccgttcaggttggtaacgccgttccctacggttacgctggtaagccccgtgcagccggaaaaagcggcctcctcaatactggtaacgctgttcggtatggttatgctggtaagccccgtgcagccggaaaaagcggcctccccaatgctggtaacgctgtccggtatggttatgctggcaagtttggaacaaccggaaaaagcggaacgaccaatggtattaactttgcttccagaggcaaaggttacgctggtaaggttggtgcagccggtaaaagcgccaacaccactagaaatactatatccttcaatgctggtaacgctgttcggtatggttatcttggtaagcccggtacatctgccaaaagcataagccttaatgctggtaacgctgtttggtatggttatgccggtaaggctggtgcaaccgtaaaaagcgcactcccctatggtggtaagtttgcttccgggctcaaagattacgctgacaaggttagtacagccgctgaaagcgccggaagaataattaacactaccaccatcaatgctggtaacgctgttcggtatggttatgctggtaatggcggtgctcctgaatgcgtcactgccgatttgcgttacgggcgtgccgttgcgagtgggaggtataaccacatcgccgctgacagcagtgccttgaatgactcgccacgcgacgcatttcgattgctcactgacggtatttccagccgcgtcaagcatttgaaacttaagtcccggcgtgccggggaactcggaaggcggctcaggctcggttga

SEQ ID NO: 50544 - protein, 550 aa, Unknown
  Obtained from environmental sample
  misc_feature (1)..(550): Xaa is any amino acid
MKCYAGEAGAIFKSKLPNADNAVAYGYAGKAGAIPKSISPNGGNAVWNGNAGKVGTAIKSQTPNGGNTVWNSNADKAGAAGKSAAPNASNAVRYGYTGKIGAITKSINPNGGNFACRGKGYAGKVGATGKSTSTIKTTSFNTDYAVRYGYLGKSGAITKSASLYGGNAVGYGYDGHLGTTVKSELPYGGKFASGFKDYASQVFAVTKSAKTIIIITIFNYGYAVRYGYAGKAGTISKSGRSYGSGFASGGKDYAGQVFAATKTGNAFNAVPYGYAGKVGVRVKIKPVQVGNAVPYGYAGKPRAAGKSGLLNTGNAVRYGYAGKPRAAGKSGLPNAGNAVRYGYAGKFGTTGKSGTTNGINFASRGKGYAGKVGAAGKSANTTRNTISFNAGNAVRYGYLGKPGTSAKSISLNAGNAVWYGYAGKAGATVKSALPYGGKFASGLKDYADKVSTAAESAGRIINTTTINAGNAVRYGYAGNGGAPECVTADLRYGRAVASGRYNHIAADSSALNDSPRDAFRLLTDGISSRVKHLKLKSRRAGELGRRLRLG

SEQ ID NO: 50545 - DNA, 738 bp, Unknown
  Obtained from environmental sample
  misc_feature (1)..(738): n is a, c, g, or t
atgaccaatttaacgggggttggcatgagtgacatcatggtcagggccgaaggccttgtcaagaattacatttccggaaacgaggatcttcatattctgcgtgcagtcagctttgaaatccccctcggccgctcggcggcgataagcgggcaaagcggcagcggcaagagcaccctgttgaatatcctgggcggccttgatcactgcgatgcgggaagcgtttttgtcggcggaatggaaattaccgcgcttgcggaaaagggcctttccgcgtaccgcagcaggaaagtcggctttattttccagtttcattaccttctcaaggattttaccgccctggaaaacgtcatgctgcccgcttatatcgccggtatgaaaaaaaagcgagccctggaaagggcgagggaactgcttgccgacctcatgcttgccgaccgcgccgggcatttcccgtcgcagctttcaggaggcgagaggcagcgggtcgccgtcgcccgttccatggttaacgatcctgaccttatcctcgccgacgagccgaccggtaacctcgatccggataacagcgccatggtggccgaactgctctataggggcgctgaaaaatggggtaagacccttttggtagtaacccatgacgaaaaactcgcggccagagccgctcgctgttatactctggcaagcggtttgttaaacgtaaccgaaaaggcggacttgccttctaaggaaggcgcatga

SEQ ID NO: 50546 - protein, 245 aa, Unknown
  Obtained from environmental sample
  DOMAIN (43)...(229): ABC transporter
  misc_feature (1)..(245): Xaa is any amino acid
MTNLTGVGMSDIMVRAEGLVKNYISGNEDLHILRAVSFEIPLGRSAAISGQSGSGKSTLLNILGGLDHCDAGSVFVGGMEITALAEKGLSAYRSRKVGFIFQFHYLLKDFTALENVMLPAYIAGMKKKRALERARELLADLMLADRAGHFPSQLSGGERQRVAVARSMVNDPDLILADEPTGNLDPDNSAMVAELLYRGAEKWGKTLLVVTHDEKLAARAARCYTLASGLLNVTEKADLPSKEGA

SEQ ID NO: 50547 - DNA, 579 bp, Unknown
  Obtained from environmental sample
  misc_feature (1)..(579): n is a, c, g, or t
gtgcgcatggcctatagcgccgccgacgggaagacctatcagttcaacttgatagacactcccggccacgtcgacttctcctacgaggtctcgcgctcgctcgccgcttgcgagggggcgatattggtggtcgacgcctcgcaggggatagaggcgcagaccctcaccaacatataccttgcgctcgacaacgacctggccatcattccggtgatgaacaaggtcgacctgccctccgcgcggcccgacgagatccgccggcagataagcgacctcttgggcgtggctcccgacagcgtcctctcgtgcagcgccaaaaccggagagggcgtgccggcgctgctcgagcgcgtgatcgccgacgtcccgcctccgaaggggctcattgattcgccgctcaaggcgctgatcttcgattccaagttcgacgccttccgcggcgcggtcgcctacgtgcgcgtcgccgacggaacgctatgcaaggggcagtcaatacggtttttcgagaccgggcgggagtacgacgtagacgaggtcgggtttttccgtatgggacgcgtcccgtcgcaaaagctttga

SEQ ID NO: 50548 - protein, 192 aa, Unknown
  Obtained from environmental sample
  DOMAIN (2)...(126): Elongation factor Tu GTP binding domain
  misc_feature (1)..(192): Xaa is any amino acid
MRMAYSAADGKTYQFNLIDTPGHVDFSYEVSRSLAACEGAILVVDASQGIEAQTLTNIYLALDNDLAIIPVMNKVDLPSARPDEIRRQISDLLGVAPDSVLSCSAKTGEGVPALLERVIADVPPPKGLIDSPLKALIFDSKFDAFRGAVAYVRVADGTLCKGQSIRFFETGREYDVDEVGFFRMGRVPSQKL

SEQ ID NO: 50549 - DNA, 558 bp, Unknown
  Obtained from environmental sample
  misc_feature (1)..(558): n is a, c, g, or t
atgaatacgcccatttcaagcaggctaaagcggggatttgattatcatgtctgtctggataaaaaccaatattacagcgtcccgtatcaatatgcgggccaaaacgtgctcttacgctggaattcgcgcacggtagaggtgttttacgaagggcagagaatcgcctgccatgcccggaacaacgatccgcggacgaggtatattaccgagccttcccacatgcccgaggcccacagggcggtttccgattggtcgacaaaacgtttcattttatgggccgcaaagaccggggttaaaacaaaggaatatatctcctttctgttacaacaaaaagatcatcccgaacaagcgttcagaacctgcgcggcgatacttaggctcgcttcaacagtaacaaaggagcggatggaagaagtgtgtactcaagctatgctgcagaatatttattcttatacatatttctcacggctgctggaaagccctgacagccggaaacctgttattcacgggaatctgagaggccaggattattttaagggggaaaaccatgttaaataa

SEQ ID NO: 50550 - protein, 185 aa, Unknown
  Obtained from environmental sample
  misc_feature (1)..(185): Xaa is any amino acid
MNTPISSRLKRGFDYHVCLDKNQYYSVPYQYAGQNVLLRWNSRTVEVFYEGQRIACHARNNDPRTRYITEPSHMPEAHRAVSDWSTKRFILWAAKTGVKTKEYISFLLQQKDHPEQAFRTCAAILRLASTVTKERMEEVCTQAMLQNIYSYTYFSRLLESPDSRKPVIHGNLRGQDYFKGENHVK

SEQ ID NO: 50551 - DNA, 882 bp, Unknown
  Obtained from environmental sample
  misc_feature (1)..(882): n is a, c, g, or t
atggcagccaatattgataaactttataacagcgtaaatgaaaaagggcacgtatgcgtcgggcttgatacctgcgttgattatgtcccgcccgcgcagcggcttaaagacaatgacccgcagtcggttcttgagtttaacaaagcgctgattgacgctacttttgacattgccgcctgttacaaagtgcaaatcgcgtattacgaggaaatgggaacggcaggactttgcgtatacagcgaaacattaaaatacatacgcgcaaaaaactgccttgtaatagcggacataaaacgcggcgacattgcagataccgccgtgcgttatgcgaaagcccacttttcgggtgattttcaggctgattttgtcactcttaacccttacatgggaatggattcgatagacccctggtacacacaagccctaaaaacaggcaaaggcgcttttgtcctaatgcgaaccagtaatgcgggaatgaaggactttgagtaccttgaaattggcggtggaaaacgtgtataccattctgtaggtgataaattaacggcgtttcctgcgaattttctgggaaattacggctacaggctattcggcgtggttacaggttgtacggaaagagacgaagccgccgaaattcgggctaattacggcgatcttttctttctgatacccggttacggaactcagggaggtggggcgaaggatgcggcattattattacgggacggaaacggcggcgttgttaacgcctcaaggtcgattatagccgtatggcgtaaagagccgggaaacgagaacgcgaataattcattcgccgccgaaaaggcgaggcaggcggttattgttatgagagacgatatatttaaagaggcaaggaaataa

SEQ ID NO: 50552 - protein, 293 aa, Unknown
  Obtained from environmental sample
  DOMAIN (16)...(276): Orotidine 5'-phosphate decarboxylase / HUMPS family
  misc_feature (1)..(293): Xaa is any amino acid
MAANIDKLYNSVNEKGHVCVGLDTCVDYVPPAQRLKDNDPQSVLEFNKALIDATFDIAACYKVQIAYYEEMGTAGLCVYSETLKYIRAKNCLVIADIKRGDIADTAVRYAKAHFSGDFQADFVTLNPYMGMDSIDPWYTQALKTGKGAFVLMRTSNAGMKDFEYLEIGGGKRVYHSVGDKLTAFPANFLGNYGYRLFGVVTGCTERDEAAEIRANYGDLFFLIPGYGTQGGGAKDAALLLRDGNGGVVNASRSIIAVWRKEPGNENANNSFAAEKARQAVIVMRDDIFKEARK

SEQ ID NO: 50553 - DNA, 600 bp, Unknown
  Obtained from environmental sample
  misc_feature (1)..(600): n is a, c, g, or t
atgagtcaaagtatcgtatgcgaacttgaaaaaaacacagttgttacggatgaatattttattcttcaattttcatggaaaaagcccgttccaagagccggtcaattttttatggtaaaacacctgcgaggcggcgttctgttaccgcgtccaatcagcgtatttgaatatatagccaaaacaaataccgttaaattccttatacaaaaaaaaggcagggggacggaagaactatcctgcgcccaagcgggagaaaaaattcaactaacgggacctttcggcaactgttgggcggatttcctgccggaaaacggaagagccgcgcttgtcggcggaagcgccggaatagccccgcttgcggcccttgtctcggaaaaaccggattattattttcattttttcgccggttttagaaaaggattcaaggagaaagaacaggaaaacgcaattatgggttacgcggttaactcaaaacgtttttccattgccgcggaagacggcggaaacgccctaaacggcaagattaccgactttttgttcgcgccgcaggattttgacgtaataaatcgcgatgcggtcccacaaccatgcgacttgtaa

SEQ ID NO: 50554 - protein, 199 aa, Unknown
  Obtained from environmental sample
  DOMAIN (6)...(97): Oxidoreductase FAD-binding domain
  misc_feature (1)..(199): Xaa is any amino acid
MSQSIVCELEKNTVVTDEYFILQFSWKKPVPRAGQFFMVKHLRGGVLLPRPISVFEYIAKTNTVKFLIQKKGRGTEELSCAQAGEKIQLTGPFGNCWADFLPENGRAALVGGSAGIAPLAALVSEKPDYYFHFFAGFRKGFKEKEQENAIMGYAVNSKRFSIAAEDGGNALNGKITDFLFAPQDFDVINRDAVPQPCDL

SEQ ID NO: 50555 - DNA, 540 bp, Unknown
  Obtained from environmental sample
  misc_feature (1)..(540): n is a, c, g, or t
atggaaaatattgaatataaagaattaaaattggaggacataaatgacaatttattggataattttaacaggttccaaaatgtgaaaaaatggtggaaaaatataaatgggaatttggtattagttgatgaagaatacactgtggattgggatgaaaaggaaaagtatgctgttgtaaaattattcgttaagttgcttactgaaaacgaaggagttgtttttggtgcatatgataataaaaaattaataggtttttctgttttattgaataataaatttggaactatagaacaatatgttgaattacaatttttacatatatcactagagtatagacataaagggatagggaaaatattatttaaaatgtgtatagaaaaagcaaaaaaacttggagctgaaaaaatatatatttctgcgaatgattctgaggaaactcaaaagttctatttgggtattggatgtaaagacgctatcgaaataaataaaaaatgtgttgaaaaagagccttacgatagacagatggaatataaaatatag

SEQ ID NO: 50556 - protein, 179 aa, Unknown
  Obtained from environmental sample
  DOMAIN (74)...(156): Acetyltransferase (GNAT) family
  misc_feature (1)..(179): Xaa is any amino acid
MENIEYKELKLEDINDNLLDNFNRFQNVKKWWKNINGNLVLVDEEYTVDWDEKEKYAVVKLFVKLLTENEGVVFGAYDNKKLIGFSVLLNNKFGTIEQYVELQFLHISLEYRHKGIGKILFKMCIEKAKKLGAEKIYISANDSEETQKFYLGIGCKDAIEINKKCVEKEPYDRQMEYKI

SEQ ID NO: 50557 - DNA, 645 bp, Unknown
  Obtained from environmental sample
  misc_feature (1)..(645): n is a, c, g, or t
gtgtggcgagcgatccttagggcggggagcttgaaaaaaaaagggcagttgaagcggtggatattgcccaaactcggcgacaagcgactccgcgacttgaaacctgctgtctttgcggaacactttcgtcaacttcggctcggcggaaaaatgaacggcggggggttatgcgccgtctcggtcaataagtctcgtaccgtgctgaacactatcttttccaccgccatcagcgaggacttcatttcatacaaccccattacgcgggtcaaagccttcaaagaggaaaaaaacgaagccccagtgttgacggaggagcaagcgcgtgaacttcatggccttatgttgaaaatgccggatatcgggatgcgcgggctgttgttgatgttgttacataccggagcgcgaacgggggaagcgcgngcgcttacatggaatgatattaatatcgacaagggggtcatcagcattagcaagagcgccgacgacaagaaccgtatcacgccgcctaagagcagagtagtaacgcgtaattgcgatgtcgccgtttttgttgaaatacctaccccaacacaaacgcgacgttcaactctatgcggcgggtcagggcaagttttggacggaaaacaaccttgttttccccaataa

SEQ ID NO: 50558 - protein, 214 aa, Unknown
  Obtained from environmental sample
  misc_feature (1)..(214): Xaa is any amino acid
MWRAILRAGSLKKKGQLKRWILPKLGDKRLRDLKPAVFAEHFRQLRLGGKMNGGGLCAVSVNKSRTVLNTIFSTAISEDFISYNPITRVKAFKEEKNEAPVLTEEQARELHGLMLKMPDIGMRGLLLMLLHTGARTGEARALTWNDINIDKGVISISKSADDKNRITPPKSRVVTRNCDVAVFVEIPTPTQTRRSTLCGGSGQVLDGKQPCFPQ

SEQ ID NO: 50559 - DNA, 555 bp, Unknown
  Obtained from environmental sample
  misc_feature (1)..(555): n is a, c, g, or t
atgtcgccgtttttgttgaaatacctaccccaacacaaacgcgacgttcaactctatgcggcgggtcagggcaagttttggacggaaaacaaccttgttttccccaataatttgggcggtatcattaccaataccgtaccgggaatggagttgaggaaggtggttaaagggacagacttcccgaatacgcatccccacaccctccggcacacattcgcctcaattctgataagcaaaggggcggacgtgaagacggttcagaccatacttggccatagcacggcggctatgactttggacagatacgcccacgcctttgcgaccgcgacggcagcggcgatggtgtcggtgggcgatgccatagccggcggaggcgccaacacgtcccggagctttttacccgaccttgaagaaccctcggaagcggtgaaaaaagtggagacaaaagtggagacacacgacatgaaactggggggtaaaatacgcaacaaaacgacacgcaaagacacgaaaaacacgcaaaaaacgcatcaaacgcaatcaaaacgcatttga

SEQ ID NO: 50560 - protein, 184 aa, Unknown
  Obtained from environmental sample
  DOMAIN (5)...(112): Phage integrase family
  misc_feature (1)..(184): Xaa is any amino acid
MSPFLLKYLPQHKRDVQLYAAGQGKFWTENNLVFPNNLGGIITNTVPGMELRKVVKGTDFPNTHPHTLRHTFASILISKGADVKTVQTILGHSTAAMTLDRYAHAFATATAAAMVSVGDAIAGGGANTSRSFLPDLEEPSEAVKKVETKVETHDMKLGGKIRNKTTRKDTKNTQKTHQTQSKRI

SEQ ID NO: 50561 - DNA, 495 bp, Unknown
  Obtained from environmental sample
  misc_feature (1)..(495): n is a, c, g, or t
ttggatttatggccgagagggcccgggggcgtggctttcctgatcgaggccgtgaccgacaaccgcaaccgtacggtggcggaggtgcgccatctgctgaccaagtacggcggcaacctcggccagaccaactccgtcgcccggatgttcaattccaagggcatcataacggtggccaaggaggacgtgggcgaggacaaactcatggagcttgttctcgaagccggcgccgacgacatgtcagccgagggcgacgagtacgagatcaccactacggttgacgccttcgacgcggtgcgcgaggcgatagtcgccgccaagatcgaaccgacctcagccgagatcacgaaggtagtcgacaatcccgtgaacttagacgccgccgccgcggtcaagataatgaagctggtcgacgcgttggacgaattggatgatactcagcacgtttacgcggggtttgacgttagcgacgaagaggcggcgaagatggattag

SEQ ID NO: 50562 - protein, 164 aa, Unknown
  Obtained from environmental sample
  DOMAIN (6)...(154): Domain of unknown function DUF28
  misc_feature (1)..(164): Xaa is any amino acid
MDLWPRGPGGVAFLIEAVTDNRNRTVAEVRHLLTKYGGNLGQTNSVARMFNSKGIITVAKEDVGEDKLMELVLEAGADDMSAEGDEYEITTTVDAFDAVREAIVAAKIEPTSAEITKVVDNPVNLDAAAAVKIMKLVDALDELDDTQHVYAGFDVSDEEAAKMD

SEQ ID NO: 50563 - DNA, 588 bp, Unknown
  Obtained from environmental sample
  misc_feature (1)..(588): n is a, c, g, or t
atgaaggtatccgcatttctgatttttggtgcgcctggttcgggaaaaggaaccgtaggcgcaaagttatcctcggcagtaggcataaagcatctctcaactggtgacatattcagaggcttgtcgccagcgagcgaaagtggcaaattattttcgagctatgctggagcaggcaagttggtcccagatgaggtgacaattcaaattttttcacgttatataaatggcttaatagatacgaataaatttgaccctgaaagaagttcattccttttggatggaattccgcgcaccgttgcacaggcggagttgataaaaagcgttgttgaagttaagcacgtttttgtccttgatattccagactattcggtgataattgaacgtttgctcaaaagggcaaaaatagaggggcgcaaagacgatgccgatgaaagcgtgatccgcgcccgcctaaacgaatacgaaaccaaaaccgctgctgtcttaggagcttacgatagctccattataacaagaatcaacggagcgcaagaccacgatgaggtattcttggacaccttgtctgcgtacgtgaaggcaaaaaagtaa

SEQ ID NO: 50564 - protein, 195 aa, Unknown
  Obtained from environmental sample
  DOMAIN (8)...(170): Adenylate kinase
  misc_feature (1)..(195): Xaa is any amino acid
MKVSAFLIFGAPGSGKGTVGAKLSSAVGIKHLSTGDIFRGLSPASESGKLFSSYAGAGKLVPDEVTIQIFSRYINGLIDTNKFDPERSSFLLDGIPRTVAQAELIKSVVEVKHVFVLDIPDYSVIIERLLKRAKIEGRKDDADESVIRARLNEYETKTAAVLGAYDSSIITRINGAQDHDEVFLDTLSAYVKAKK

SEQ ID NO: 50565 - DNA, 969 bp, Unknown
  Obtained from environmental sample
  misc_feature (1)..(969): n is a, c, g, or t
gtgcttcgctgcctgggacattcgttcttcaggatgaagaaaccgaaagaggcgatgagcattatccgcaaggcaattgagctggccccggacgacaaagaatccctttacaccctggcggagtgttattatgaagccaaccaggtagaccaggccatcaagatattcagccacctgcgcgccgacccggtaatgggccccagcgcctgccttatatccggaaatatccataatgaggtccgcaggtccgatctggccatacaggactatgaaatgggcttaaggcacgagaatataaggccggatattcttgcggaattgcgttattacctcgccgtttcatacattaagataaacgagataagcaaggccctgcccctgctccactccctgcaggctgacaacgcctcgtacaaagacgtaaacgtgctgataaacaagtaccaggaactcaacgccaacaagaacctccagattttcctgatggccgcgtccgccgattttgtcgcgctctgccgtaaaatagtaatgacctatttcgccaaggcaaaagtaaaagtcttgaatatctcggttcacaaaaccgaatgggcggatattctcgctgaaattaacacccccaagtggtcagatgtggttacgttcaggtttatccgcacccaggactccattggggagcttattgtgcgctacttccattcccacgtgatagatgtaaaggccgtcaaaggcgtctgcatgtccgtaggcgttttcagcgaagaagcaaggcgctataccgaagtccgcattattgatctgatagagaaagaccgcctcacagcaatcatgaacacagtagacgccaaagcggcacagcattgtccaaagcaacaccaaagaaaaagtgagaagttagaagtgagaaatgagaagtgtaagaagcggagttcacttctcactttattcacttgttcccagtttttataa

SEQ ID NO: 50566 - protein, 322 aa, Unknown
  Obtained from environmental sample
  DOMAIN (176)...(275): Restriction endonuclease
  misc_feature (1)..(322): Xaa is any amino acid
MLRCLGHSFFRMKKPKEAMSIIRKAIELAPDDKESLYTLAECYYEANQVDQAIKIFSHLRADPVMGPSACLISGNIHNEVRRSDLAIQDYEMGLRHENIRPDILAELRYYLAVSYIKINEISKALPLLHSLQADNASYKDVNVLINKYQELNANKNLQIFLMAASADFVALCRKIVMTYFAKAKVKVLNISVHKTEWADILAEINTPKWSDVVTFRFIRTQDSIGELIVRYFHSHVIDVKAVKGVCMSVGVFSEEARRYTEVRIIDLIEKDRLTAIMNTVDAKAAQHCPKQHQRKSEKLEVRNEKCKKRSSLLTLFTCSQFL

SEQ ID NO: 50567 - DNA, 783 bp, Unknown
  Obtained from environmental sample
  misc_feature (1)..(783): n is a, c, g, or t
gtgaacacgggtgagacaaatgccgggttatttctttcctcagcgattgacaggtatatccgtgtcgcggtaagcggaagaaaggatagctccctgcgttttttcgccgccgatctgggggaacggaaaagggctacactggtaaatttaaaatacaaacgggaagatcgctgggcaaactacataaaagtagcaatccatctgttttcggagcttgggtttcaggtaaaaggccttaatttcacagtagcaggcgatattccccagcaagtcggactcgcctcttcttcagccatggaaattgcctccgttatcgcgttaaaaggtttttttcacgcgaatataaccgaaagggagcttttgttccggcttaccgccgcaaaggcttcttttttcggcgtcagcgtcagtcccgtggattatcttgtctccttttccgccagaaaagaccagtttcttatagttgacgaaacaggtttgaaggtaaagcgcattaaatccccttttggcaagtataaattaatcattatggactcgcgggttcccagaatgggggttgaagaggagttaaagcagcgtcaggaggacatcaaaaaagggctggatatgctctcgcataacatacaggggtcaagcttccgggattttgccgctactgatcttgaggaatccatgggaaacctgccggaggaaataagaaggcggtgcctgcatattgtccaggagatacgcagggtaaaagacgccgatgattccctaaaagggcggattttccatttttga

SEQ ID NO: 50568 - protein, 260 aa, Unknown
  Obtained from environmental sample
  DOMAIN (80)...(148): GHMP kinases N terminal domain
  misc_feature (1)..(260): Xaa is any amino acid
MNTGETNAGLFLSSAIDRYIRVAVSGRKDSSLRFFAADLGERKRATLVNLKYKREDRWANYIKVAIHLFSELGFQVKGLNFTVAGDIPQQVGLASSSAMEIASVIALKGFFHANITERELLFRLTAAKASFFGVSVSPVDYLVSFSARKDQFLIVDETGLKVKRIKSPFGKYKLIIMDSRVPRMGVEEELKQRQEDIKKGLDMLSHNIQGSSFRDFAATDLEESMGNLPEEIRRRCLHIVQEIRRVKDADDSLKGRIFHF

SEQ ID NO: 50569 - DNA, 675 bp, Unknown
  Obtained from environmental sample
  misc_feature (1)..(675): n is a, c, g, or t
gtgcggaataaaatattaaactcagctgatgaggctgtagctccaataaaagacggttctgtcattatggtcggcggttttatgacctgcggtacgccggaaattttaatcgacgctctggtcaaaaaaggcgttaaaaacctgaccattatttgcgatgacggcggatggccggacaagggcgtcggcaggcttatagccaacgggcaggtgaggcgcctaatcgcgtcccatgtcgggcttaaccccgaagtcgccagacgcagcaataccgatgtcgcgtccgagaaactcgaattgacgttggttccccaggggacgctcgcggaatgcataagggcggacggagcggggctggggggcgttcttactccgacaggagtgggaactataatagccgagggcaagaaggttattaatattgacggcaaagatttcctgctggaaaaacccctccacgccgatttcgccctgattagggcttctaaaattgataaattcgggaacgctgttttttacggaaccaccaaaaattttaaccctcttatagcaactgccgccgattatgtaattgccggggcctgtgagattgtggaacccggcgctatcgatcccgacactgttcatctttcaggcatatttataaacgcgatagtaggaggggaaaagccgtga

SEQ ID NO: 50570 - protein, 224 aa, Unknown
  Obtained from environmental sample
  DOMAIN (6)...(221): Coenzyme A transferase
  misc_feature (1)..(224): Xaa is any amino acid
MRNKILNSADEAVAPIKDGSVIMVGGFMTCGTPEILIDALVKKGVKNLTIICDDGGWPDKGVGRLIANGQVRRLIASHVGLNPEVARRSNTDVASEKLELTLVPQGTLAECIRADGAGLGGVLTPTGVGTIIAEGKKVINIDGKDFLLEKPLHADFALIRASKIDKFGNAVFYGTTKNFNPLIATAADYVIAGACEIVEPGAIDPDTVHLSGIFINAIVGGEKP

SEQ ID NO: 50571 - DNA, 876 bp, Unknown
  Obtained from environmental sample
  misc_feature (1)..(876): n is a, c, g, or t
atggatctgatcctccgcaatattcgcactgaaagaaatctttggggcaatgacaaatatcgtatactttcttacggtgaaccttcatccaaaagctctttccgtgacgctctcggcagaacatggatttccttatattggctcataggctttgaagacgaagttcaaataatgtacattcttcctctgcccaacggacctatcgttgtttcaaccaaacaggacagttctttccttcatatttacgaatgggatatgcataaaatatgcgatcatctttttgctgcctatgatggttcttttgacgaatggaatagttttatcaatcttaaacagtttattcccgattttttaaaagacattcgttttgactggaagagcgcggaacaaaaattctcattaaaaaacggttacctgtctatcggcgccgacaagcaggtgtttgattggaacgctcgttcggaattgtatttggctccttcatggtacaaactcaacggcaaacttgaattcggaattcgtaaagtaatccttacccgcgatcaaaggggaaaggattttataattctgtatcgcggtatcaagcccgatccgaaacttggcacgaatgccatggaaagctggaatgatcttgttatagaaaagcatccctttgacggaaagcctgtcttgtcgcccaaagataacacaggttttgtcgggactattctgaaaccccgacgtcttaatccagatgtgcttttttcactttatctttcccatggaaaatccgcaaaacgaggaaaatttaacgaaagggttcgcggcgctgagaacgggcgtgtctgtagaatattgattcatgtaacccttttttatttcattgaggatgcgtaa

SEQ ID NO: 50572 - protein, 291 aa, Unknown
  Obtained from environmental sample
  misc_feature (1)..(291): Xaa is any amino acid
MDLILRNIRTERNLWGNDKYRILSYGEPSSKSSFRDALGRTWISLYWLIGFEDEVQIMYILPLPNGPIVVSTKQDSSFLHIYEWDMHKICDHLFAAYDGSFDEWNSFINLKQFIPDFLKDIRFDWKSAEQKFSLKNGYLSIGADKQVFDWNARSELYLAPSWYKLNGKLEFGIRKVILTRDQRGKDFIILYRGIKPDPKLGTNAMESWNDLVIEKHPFDGKPVLSPKDNTGFVGTILKPRRLNPDVLFSLYLSHGKSAKRGKFNERVRGAENGRVCRILIHVTLFYFIEDA

SEQ ID NO: 50573 - DNA, 510 bp, Unknown
  Obtained from environmental sample
  misc_feature (1)..(510): n is a, c, g, or t
atgcacggcgtggatatggattcggacagagacctcgcgcttttgaagcgtactcttgaactggccgaaatgggcatatcgcgggctgacggcggcccattcggcgcccttgtcgccaaggatggtcagattgtatcggaagcctggaacactgtggtgtcaggccgcgacccaacggcacacgccgaagtgaatgccatacgcacggcctgcgaaaaactgggggcattccacctgcacggctgcaccctctacgcctcatcagagccatgccccatgtgcctagccgcggcctactgggcgcaagtggacaggatagtctttggcaaccccatgagcaacgccgcctcaataggcttctcggacgaagacctgtatcaggaactggccctgcccatggagcggcgcagaatcccccacaagcagataaccctcgacggcgcaattgaagtcatggagaaatgggcaaggggggaaacaaggtgccgaactgaattccgcccgaagtga

SEQ ID NO: 50574 - protein, 169 aa, Unknown
  Obtained from environmental sample
  DOMAIN (8)...(110): Cytidine and deoxycytidylate deaminase zinc-binding region
  misc_feature (1)..(169): Xaa is any amino acid
MHGVDMDSDRDLALLKRTLELAEMGISRADGGPFGALVAKDGQIVSEAWNTVVSGRDPTAHAEVNAIRTACEKLGAFHLHGCTLYASSEPCPMCLAAAYWAQVDRIVFGNPMSNAASIGFSDEDLYQELALPMERRRIPHKQITLDGAIEVMEKWARGETRCRTEFRPK

SEQ ID NO: 50575 - DNA, 759 bp, Unknown
  Obtained from environmental sample
  misc_feature (1)..(759): n is a, c, g, or t
ttggctcccgggggggtccgaaccgactggtacccaccggcccccggccagctaaccccgtccgtcatcggggatgctgccccagatgactggggtcgcaaggtcattgacaatgccaacaccgcatcgcaacaccgcgatgagtcattttatctgctcaattcgtcatcgaaccgcgaaggtgcgctggactttcaggcaactccagatgcctacattccacgaaacgacgatggcgacgccaccttggctggtctaatggctgcaaatgcagcagttgatgcgggtgcgaagctaactgctgctttgcgaaaatctcttcggaatagctctgcgatcggtggaatgcgcccgaaggcaagcgttatcgacccagatggcacccaatggatcgctaaattcccgcggaccagggatcccttcaacgtcattggggctgaagctgcctgcatttacttagcccaacaagcggggattaataccgaagatgcgaaaattgtgcaggttcaaggcgaagatgttttgctggtaaaacgcttcgaccgggaggggccgttccgcaggcagattgtttctggcctaaccatgatcggtcgcaacagcgcttttcatagtggatcataccctgagcttgcggaaaccttacgtcggttcggtgatgaggccgggccagagttgtttgcccgggcagcattcaacatcgctatcacccctacggatgaccaccttaaaaacccacgccgcatatatcgatgctga

SEQ ID NO: 50576 - protein, 252 aa, Unknown
  Obtained from environmental sample
  DOMAIN (187)...(251): HipA-like C-terminal domain
  misc_feature (1)..(252): Xaa is any amino acid
MAPGGVRTDWYPPAPGQLTPSVIGDAAPDDWGRKVIDNANTASQHRDESFYLLNSSSNREGALDFQATPDAYIPRNDDGDATLAGLMAANAAVDAGAKLTAALRKSLRNSSAIGGMRPKASVIDPDGTQWIAKFPRTRDPFNVIGAEAACIYLAQQAGINTEDAKIVQVQGEDVLLVKRFDREGPFRRQIVSGLTMIGRNSAFHSGSYPELAETLRRFGDEAGPELFARAAFNIAITPTDDHLKNPRRIYRC

SEQ ID NO: 50577 - DNA, 837 bp, Unknown
  Obtained from environmental sample
  misc_feature (1)..(837): n is a, c, g, or t
ttgcgattctatccgtttcctgcggtacggttaatgtccaggaaaagaaaattcaggaaatacggacgcggaacaaggaaattgggcagggacgtgccggttgtttatgtgaccgaagaagaagctgaccaacgggaacggacgcggcgggaagcggatctgaatatcatcgaagttaaaaatgatatttttgttcctgttgattcaacaacgcagagggctctcacaaaagatcaggtagtgcaaaacgcaatgcaggaagcgatggtaacgccgaagaattttatcggcggcacgcagttctacgattacaacgaacataaacaatatcccattgtctgcaaggtattgggattaagcgttttgcagcttgaagacggcgaagtgccgataggcgttccgtatctgtcagacacgctcaggtgggagataaccggagacgtgtggcggacacaggacggcagaaatattcaactggtaatgataaagcctctggagacagggttaagtacgaatatggtgctggtgaccacaaagcgcatataccagatcatgttaaccagcacgagggacagctatatgcctatggtgcggttccgctatccgatgcagatgaatatgtatatgggaacgcagttcaacacgatgcatacgattgaggagcaacgtatacgcaaggaaaaagaagacgaaggttattatctgtcgtataactataaaattaaatccggctggttcaagccggagtggacgccgacagaagcctgggatgacggccataagacttacatcaggcttccgaggggcgtgcttcagatggagtatcccacagtataa

SEQ ID NO: 50578 - protein, 278 aa, Unknown
  Obtained from environmental sample
  DOMAIN (96)...(278): Conjugal transfer protein
  misc_feature (1)..(278): Xaa is any amino acid
MRFYPFPAVRLMSRKRKFRKYGRGTRKLGRDVPVVYVTEEEADQRERTRREADLNIIEVKNDIFVPVDSTTQRALTKDQVVQNAMQEAMVTPKNFIGGTQFYDYNEHKQYPIVCKVLGLSVLQLEDGEVPIGVPYLSDTLRWEITGDVWRTQDGRNIQLVMIKPLETGLSTNMVLVTTKRIYQIMLTSTRDSYMPMVRFRYPMQMNMYMGTQFNTMHTIEEQRIRKEKEDEGYYLSYNYKIKSGWFKPEWTPTEAWDDGHKTYIRLPRGVLQMEYPTV

SEQ ID NO: 50579 - DNA, 753 bp, Unknown
  Obtained from environmental sample
  misc_feature (1)..(753): n is a, c, g, or t
atgcggcgcgtcagacgcggctcctccggcggggaattaggtatgcgtatacaggcgtgtgaaatttttaagcaggcgaaaggtccggtacaatccaggttttcttcgcttatcggccagtatgacgattatgtcaaccaactgatgcgggataaccggacatggcagcttgtcggacttggcgctgtattaatgctggtactgacggtgatcggctggttttatctatcaagccggaaaacagaaacggtgatggtcattgaggtaaatgaactgggaagggcgaagtacgcgggcaaagtcacaggcggaacatttttggaagggtatggcattaaagactacatgatagagagcgttatcgccgattttatcgaatatacccgcaatatttatacagacggcgatgtaatgaacaataactaccgcagggcggcaaatcatcttagcaatgaattgaaagaaaaactccgtaatgaactggtagaggaagatcctttctcacagattgggagaaccaaacggactgtggttattgaaagcgccatacggatgacaaaagctacatggcaatatgactggtatgacattgtaaccgatatgtcgggaagggaaatgcgccgtgcgaggatgagaggaatgttcactatcgcgacacaggaacctcagagtgaaacagaacgcgtgaataacccgttgggtatatttattgtcgactacaatattatccaggtacatgangtgctgcgatga

SEQ ID NO: 50580 - protein, 250 aa, Unknown
  Obtained from environmental sample
  DOMAIN (38)...(246): Conjugal transfer protein
  misc_feature (1)..(250): Xaa is any amino acid
MRRVRRGSSGGELGMRIQACEIFKQAKGPVQSRFSSLIGQYDDYVNQLMRDNRTWQLVGLGAVLMLVLTVIGWFYLSSRKTETVMVIEVNELGRAKYAGKVTGGTFLEGYGIKDYMIESVIADFIEYTRNIYTDGDVMNNNYRRAANHLSNELKEKLRNELVEEDPFSQIGRTKRTVVIESAIRMTKATWQYDWYDIVTDMSGREMRRARMRGMFTIATQEPQSETERVNNPLGIFIVDYNIIQVHXVLR

SEQ ID NO: 50581 - DNA, 753 bp, Unknown
  Obtained from environmental sample
  misc_feature (1)..(753): n is a, c, g, or t
ttggcgggccaggctgaatgcctgctgggtcatggaaatattcttttcgatctttttaaagaaacgctccaaggcgttttgcgagctttcccttatcatgctgagcatgaaatataccagttctttgaatcccattttcctttcccgggtaaaatcctgcgccctttgtttccagcggttctcgaagtctcccgtgtcaattgcgtcctttattatttcagcggttctttccctgtaggatatgttttttttaacattttgccccctcctgttttacaatcggcttcttctttacctccctatatccttaacttgttgacattgcttaaaaacggcaagttcagcataagcagtacaacattagcatggagtgaggactattttattcgttcaatatctattttagccgaattagcaacacatgatcctggtggaaagtttgtaaatagaccagaaaattctatagttatgatattgttaccatactttccacatacatttgtatcttttgaaaaacggttgaatgcgcttaaaattattcgtaatgattttcctgacatcgcattcaaagtattattacaactcttaccaaaccaatatcaaacaacacatattacagataaaccacgttacagaaatcctgtcgataaagaatgggatcctaaaatttcaaatattgaatattataaccactgtaatgaatatacaaaaatagcattagagttagcatctacagacaaaaatatctattag

SEQ ID NO: 50582 - protein, 250 aa, Unknown
  Obtained from environmental sample
  misc_feature (1)..(250): Xaa is any amino acid
MAGQAECLLGHGNILFDLFKETLQGVLRAFPYHAEHEIYQFFESHFPFPGKILRPLFPAVLEVSRVNCVLYYFSGSFPVGYVFFNILPPPVLQSASSLPPYILNLLTLLKNGKFSISSTTLAWSEDYFIRSISILAELATHDPGGKFVNRPENSIVMILLPYFPHTFVSFEKRLNALKIIRNDFPDIAFKVLLQLLPNQYQTTHITDKPRYRNPVDKEWDPKISNIEYYNHCNEYTKIALELASTDKNIY

SEQ ID NO: 50583 - DNA, 699 bp, Unknown
  Obtained from environmental sample
  misc_feature (1)..(699): n is a, c, g, or t
ttggaatgttgcaaaactggttatccactcggctttcgcacttttgtgttgcagggcggggaagatgctcactacacggatgaaattttagtcgatatagttcgcgaaataaaagcggcatacccggactgtgcggtgacgctttcaataggggagcgtagttatgagagctatgagctgttgttcaaagcgggtgcagacaggtacttgcttcgccacgaaaccgccaacgatgagcattataaaaccttgcacccagataccatgtcgcctaccaatagaaaaaagtgtttatacgatttaaaaaagataggctatcaggtggggtgcggttttatggtaggcacgccaaaccaaactctggagcatattgtagatgacttgcttttcattaaagaattgcaaccgcagatggtgggcatagggccttttatcccccattccgatacgcctttaaaggatagcaaggctggcgatgtacacttaacgctgaatatcttggcaatacttcgccttatgcagccgaatttgctcctccccgcgacaacagcccttgggacgcttgatgttcgcggaagggagcgaggtattttagctggagcaaatgtggttatgcccaacctttcccctgttgaagttcgcaaaaaatacctgctttacgacaataaaatctgcacaggcgaagaagccgccgaatga

SEQ ID NO: 50584 - protein, 232 aa, Unknown
  Obtained from environmental sample
  misc_feature (1)..(232): Xaa is any amino acid
MECCKTGYPLGFRTFVLQGGEDAHYTDEILVDIVREIKAAYPDCAVTLSIGERSYESYELLFKAGADRYLLRHETANDEHYKTLHPDTMSPTNRKKCLYDLKKIGYQVGCGFMVGTPNQTLEHIVDDLLFIKELQPQMVGIGPFIPHSDTPLKDSKAGDVHLTLNILAILRLMQPNLLLPATTALGTLDVRGRERGILAGANVVMPNLSPVEVRKKYLLYDNKICTGEEAAE

SEQ ID NO: 50585 - DNA, 774 bp, Unknown
  Obtained from environmental sample
  misc_feature (1)..(774): n is a, c, g, or t
gtgcttataagtgaggatttggtcatattcgcccacccgaaacgggattttataggtaaaaatatacgtgaacggggcatctctttatctattcttgcggatgaattactaaacagcaaagacataacggaatacccgatgatctcttataaaggtgaagattctgtcgctttctttagacggcttcccaacggctggtatctgggcgttgatttaccgagactcccctactataaaagcgaaactaaattattttttatcttcagcatattgggcatggttctggcgtctattttaagctttgtcctgattcgcgttgataccgccagaaacaaagcggacatggaaagcaagtacaagagcgcctttttagcaaacatgagccacgagatacgtacgccaatgaacgccattatcggcatgtcggagcttcttacaaacgaacggctaagcaaacgccaaatgggtttcattgatgatatgaaagtgtccgcctattcgctcctttccataataaacaacatactggatttttcaaaaatggaagccgggaaattttcgcttaccccggtaaactatgatttccgcgcgctgatagataatattattaccatgttcagatatatggcgcaaaggaaagagcttgaatttaagcatgaaagctcgggggatctgccggaatacctttatggcgacgatttaaggctcagacaggttttacaaatatctacgaaaacgcggttaaatataccgaatgggggtacatcgagttaa

SEQ ID NO: 50586 - protein, 257 aa, Unknown
  Obtained from environmental sample
  DOMAIN (119)...(184): His Kinase A (phosphoacceptor) domain
  misc_feature (1)..(257): Xaa is any amino acid
MLISEDLVIFAHPKRDFIGKNIRERGISLSILADELLNSKDITEYPMISYKGEDSVAFFRRLPNGWYLGVDLPRLPYYKSETKLFFIFSILGMVLASILSFVLIRVDTARNKADMESKYKSAFLANMSHEIRTPMNAIIGMSELLTNERLSKRQMGFIDDMKVSAYSLLSIINNILDFSKMEAGKFSLTPVNYDFRALIDNIITMFRYMAQRKELEFKHESSGDLPEYLYGDDLRLRQVLQISTKTRLNIPNGGTSS

SEQ ID NO: 50587 - DNA, 651 bp, Unknown
  Obtained from environmental sample
  misc_feature (1)..(651): n is a, c, g, or t
atgggtatccgcaaggaagatatacccaaattatttgactcttttgaacgctttgaaatgaaaaaaaaccgcagcattgagggaacaggcctcgggcttcctatctgcaagtctattgtggaaatgatgggcggcatgatactggttgacagcgaatatgggaagggaagcgtttttacgataataattcccgctatttcaggcaacaagcctgaagtaaagtccgtgaaagctctaaaaaaagagcggactttatttgcgccaaacgccaacattctgatagtagacgacgacgagattaacctcagggtagcggtgggcctgcttgagttgtttaaaatcagcgcgaaaaccgcttattccggcaaggaagccataagcatggttcaaaagaacgattttgacatagtattcatggatcacatgatgcctgagatggacggcgttgaagcaaccggagaaataaggaaacttggcgcccaatatgaaaaactgcccattatagcgctgacggcaaacgccgttcaggaagtgaaggagatatttttatctaacggcttcagcgggtttatttcaaaacccatcgacatacaagagttaaacgaaatattaagggaatggctgccccctngaaaaattgaggaatattaa

SEQ ID NO: 50588 - protein, 216 aa, Unknown
  Obtained from environmental sample
  DOMAIN (1)...(66): Histidine kinase-, DNA gyrase B-, and HSP90-like ATPase
  misc_feature (1)..(216): Xaa is any amino acid
MGIRKEDIPKLFDSFERFEMKKNRSIEGTGLGLPICKSIVEMMGGMILVDSEYGKGSVFTIIIPAISGNKPEVKSVKALKKERTLFAPNANILIVDDDEINLRVAVGLLELFKISAKTAYSGKEAISMVQKNDFDIVFMDHMMPEMDGVEATGEIRKLGAQYEKLPIIALTANAVQEVKEIFLSNGFSGFISKPIDIQELNEILREWLPPXKIEEY

SEQ ID NO: 50589 - DNA, 591 bp, Unknown
  Obtained from environmental sample
  misc_feature (1)..(591): n is a, c, g, or t
atggatcacatgatgccgaaaatggacggaatggagactacaaaaatcttgcgagaatccggttatacgcaccccattgtagcattgactgcaaatgctttaataggacaggcaaaaatttttatggaaaatggctttgatgattttatatcaaaaccaatagatattcgtcagctgaatactgtgctcaacaagtttattcgcaacaaacagactcccgaagtaattgcccaagcgaaagaaacggtctcggtaaagtctgagccggtagttccagccgtgaaccctgtattgctttcattttttgcaaaagatgcagaaaacgcattgccaattttagaatccactcttgctggtattgacaccatttcagatgatgatattcaattatatgctgttaccgcccacggcattaaaagtgctcttgtgaatattgggagaacagaactttcgcaaacagcttatgctttggaaaaagcaggcaaagcaaaagacaaaaacataatcaaacagcaaacgcaagagttgatagatgagcttaaaaagattattgcggaagttgagcacactaaccacaagccacaagcctag

SEQ ID NO: 50590 - protein, 196 aa, Unknown
  Obtained from environmental sample
  misc_feature (1)..(196): Xaa is any amino acid
MDHMMPKMDGMETTKILRESGYTHPIVALTANALIGQAKIFMENGFDDFISKPIDIRQLNTVLNKFIRNKQTPEVIAQAKETVSVKSEPVVPAVNPVLLSFFAKDAENALPILESTLAGIDTISDDDIQLYAVTAHGIKSALVNIGRTELSQTAYALEKAGKAKDKNIIKQQTQELIDELKKIIAEVEHTNHKPQA

SEQ ID NO: 50591 - DNA, 873 bp, Unknown
  Obtained from environmental sample
  misc_feature (1)..(873): n is a, c, g, or t
ttgctcttttctaccttacccctaatgccacaactccgtcccagaaaagaaattcaaagcatttcggattatgtcccaggcaagtccattgacgaaatcaaggaaaaacacaagctttctcgcgttattaaacttgcctccaacgaaaacccgcttggaccaagcccgtttgcaatagcggcatataaagaatgtgctcaaaaactgcacctatatcccagaggttctgcgcccgaacttgtgaaaaaacttgcattgaaatggaaggttaagccggaaaatttgattgttggcaatggctcagacgagattttggatttggcggcaagggcttatttgaacaaaagcgattatgcggttggggcaaaatccacattttctgtttatgcttcggcaactctgcaaacaggggcaaaatataaagggcttgcacttgaaaatttttgctatccgctgaacggcttgctcaaattcccaaaagcaaaaatcatttttgtttgcaaccccaacaatccaactggaactttttattccaataaaaccatttataaatttttgcaaaaaattcctaaaaactgccttgtcgtgctggatatggcttatgcggaatacgctggcgaaagcgagccacctttgaacaggtggataaagcaattcccaaaccttttatgcacacgcacgtttagcaaactctatggacttgcggggcttagaataggttatggaatagcatctgcaaatattacaaacacgctcaaaaaaataaagccgccttttaattcaaactaccccgctcaaatagcagcagcagcagcacttgaagatgcgaaatttattgaaaatcttttaaagatgaactctgaagggacgtga

SEQ ID NO: 50592 - protein, 290 aa, Unknown
  Obtained from environmental sample
  DOMAIN (40)...(290): Aminotransferase class I and II
  misc_feature (1)..(290): Xaa is any amino acid
MLFSTLPLMPQLRPRKEIQSISDYVPGKSIDEIKEKHKLSRVIKLASNENPLGPSPFAIAAYKECAQKLHLYPRGSAPELVKKLALKWKVKPENLIVGNGSDEILDLAARAYLNKSDYAVGAKSTFSVYASATLQTGAKYKGLALENFCYPLNGLLKFPKAKIIFVCNPNNPTGTFYSNKTIYKFLQKIPKNCLVVLDMAYAEYAGESEPPLNRWIKQFPNLLCTRTFSKLYGLAGLRIGYGIASANITNTLKKIKPPFNSNYPAQIAAAAALEDAKFIENLLKMNSEGT

SEQ ID NO: 50593 - DNA, 441 bp, Unknown
  Obtained from environmental sample
  misc_feature (1)..(441): n is a, c, g, or t
atgaaaacgcccaccattcccacccttctggggccggacggcatgacatcgctgcgcgaatatgccggttatcacggcggtggcagcggatttggagggcagttgcggtcgtggaacccaccgagtgaaagtgtggatgcagccctgttgcccaactttacccgtggcaatgcccgcgcagacgatatggtacgcaataacggctatgccgccaacgccatccagctgcatcaggatcatatcgtcgggtcttttttccggctcagtcatcgcccaagctggcgctatctgggcatcggggaggaagaagcccgtgccttttcccgcgaggttgaagcggcatggaaagagtttgccgaggatgactgttgctgcattgacgttgagcgaaaacgcacgtataccatgatgattcgggaaggtgtggccatgcacgcctaa

SEQ ID NO: 50594 - protein, 146 aa, Unknown
  Obtained from environmental sample
  misc_feature (1)..(146): Xaa is any amino acid
MKTPTIPTLLGPDGMTSLREYAGYHGGGSGFGGQLRSWNPPSESVDAALLPNFTRGNARADDMVRNNGYAANAIQLHQDHIVGSFFRLSHRPSWRYLGIGEEEARAFSREVEAAWKEFAEDDCCCIDVERKRTYTMMIREGVAMHA

SEQ ID NO: 50595 - DNA, 432 bp, Unknown
  Obtained from environmental sample
  misc_feature (1)..(432): n is a, c, g, or t
gtggccagcatgccacgtaagcgaaacaaaaacggggtttaccttaccgaaatcggtacggataccgcgaaagagcagatttataaccgcttcacactgacgccggaaggggatgaaccgcttcccggtgccgttcacttcccgaataacccggatatttttgatctgaccgaagcgcagcagctgactgctgaagagcaggtcgaaaaatgggtggatggcaggaaaaaaatactgtgggacagcaaaaagcgacgcaatgaggcactcgactgcttcgtttatgcgctggcggcgctgcgcatcagtatttcccgctggcagctggatctcagtgcgctgctggcgagcctgcaggaagaggatggtgcagcaaccaacaagaaaacactggcagattacgcccgtgccttatccggagaggatgaatga

SEQ ID NO: 50596 - protein, 143 aa, Unknown
  Obtained from environmental sample
  misc_feature (1)..(143): Xaa is any amino acid
MASMPRKRNKNGVYLTEIGTDTAKEQIYNRFTLTPEGDEPLPGAVHFPNNPDIFDLTEAQQLTAEEQVEKWVDGRKKILWDSKKRRNEALDCFVYALAALRISISRWQLDLSALLASLQEEDGAATNKKTLADYARALSGEDE

SEQ ID NO: 50597 - DNA, 303 bp, Unknown
  Obtained from environmental sample
  misc_feature (1)..(303): n is a, c, g, or t
gtgccagctgcattaatgaatcggccaacgcgcggggagaggcggtttgcgtattgggcgctagcggagtgtatactggcttactatgttggcactgatgagggtgtcagtgaagtgcttcatgtggcaggagaaaaaaggctgcaccggtgcgtcagcagaatatgtgatacaggatatattccgcttcctcgctcactgactcgctacgctcggtcgttcgactgcggcgagcggaaatggcttacgaacggggcggagatttcctggaagatgccaggaagatacttaacagggaagtga

SEQ ID NO: 50598 - protein, 100 aa, Unknown
  Obtained from environmental sample
  misc_feature (1)..(100): Xaa is any amino acid
MPAALMNRPTRGERRFAYWALAECILAYYVGTDEGVSEVLHVAGEKRLHRCVSRICDTGYIPLPRSLTRYARSFDCGERKWLTNGAEISWKMPGRYLTGK

SEQ ID NO: 50599 - DNA, 330 bp, Unknown
  Obtained from environmental sample
  misc_feature (1)..(330): n is a, c, g, or t
ttgacattccaaaatggaatatcaaacaaacagcatggcggcagacgctttatgccttatgcatttactgaacaaggcgttgcaatgttagcgtcagtccttaacagccccaaagcagtaactgtaaacatcaacatcatgcgggcatttgtaaaattaagacactatgtattatcgcaaagcaaagatgaacaaatagcagaactccgcaagctgcttatgctttacattgaaaaaaacgacaagcgtgtaaacgatattattatcgccctaaacaatcttatcgagcaaccaccaaaaaacaagaagattggttttaacactgactaa

SEQ ID NO: 50600 - protein, 109 aa, Unknown
  Obtained from environmental sample
  misc_feature (1)..(109): Xaa is any amino acid
MTFQNGISNKQHGGRRFMPYAFTEQGVAMLASVLNSPKAVTVNINIMRAFVKLRHYVLSQSKDEQIAELRKLLMLYIEKNDKRVNDIIIALNNLIEQPPKNKKIGFNTD

SEQ ID NO: 50601 - DNA, 1332 bp, Unknown
  Obtained from environmental sample
  misc_feature (1)..(1332): n is a, c, g, or t
atgagcgaaagatttgttaatatatacagggaaacgccgatgctgtttccagtggacatgagggattggctgccggaggatcatttagtgcattttgtaatagaggcgatagagcaaataggggtgacggactttaaagtaaaccagcgcggcagcggtagcgaacagtatccgcctgagatgatgctggcgttattgatatacagttatgtgacagggcggtttggttccaggacgatagaatctgcgacatatacggatgtggcgctcagatatatatgcggaggggaagcgcatccggatcattctgtgatatgcttttttcgcaaggataataaggaagcgttcgaagaaacgttcccccccatattggtactagcccggcagatgaagaaactgaaaaaggtgggcggggccagcggcgacggaacaaagattcaagcgaacgcgagcaagcacaaggctgtaagctacaagcgggccggggaaatcatagaagagttgaaggaagaagtgaaagggctgatgaggatggctgaagaggcggacgggaaagcggagaaaaaggtgataaacataccggaagaaataaatcttagggaagagaggaagaaggcgctggaagaagcgagggcccagatggaaaagatgtatgagagggcaaaggaagaaggggctaagaaacagaagaaactggaagaataccagtataatttcaccgatgaggacagccggataatgaaagttggaaacggggagcattatgaacagagctacaacgcgcaggcggtagtggacacggaagggagcatgctgatactggggggatatgtaacgcaacacgcgaatgacaaaaaggaaatggagcccttagtagcgagcgtagacgaggaagtgcgggaaataaagacaatatgtatggataccggatattacagtgaagaggcggtagcggcggtagaaaagaaaaatgaagaaggggagagggaagggcctgaagtattttgtgcggtagagaaagggcatcacgggaagacagtggaagatttgaaagacaagggacccagggggcggcctcctgcaaacatgagtgcgaaagaaaagatggcgaggaaacttaaaaccaagaaagggaaagaggtatacaagaaacggaaagagacggtagagacggtgttcgggataataaaaagtgtaatgggatttcggcaatttatgctgcgtgggatagagaaagttaataccgaatgggcattagtgagggtctcttataatttcaaaaggctgcatcgcttattaggcggtaaaagcctaaccgaatgcctggcatag

SEQ ID NO: 50602 - protein, 443 aa, Unknown
  Obtained from environmental sample
  DOMAIN (239)...(426): Transposase DDE domain
  misc_feature (1)..(443): Xaa is any amino acid
MSERFVNIYRETPMLFPVDMRDWLPEDHLVHFVIEAIEQIGVTDFKVNQRGSGSEQYPPEMMLALLIYSYVTGRFGSRTIESATYTDVALRYICGGEAHPDHSVICFFRKDNKEAFEETFPPILVLARQMKKLKKVGGASGDGTKIQANASKHKAVSYKRAGEIIEELKEEVKGLMRMAEEADGKAEKKVINIPEEINLREERKKALEEARAQMEKMYERAKEEGAKKQKKLEEYQYNFTDEDSRIMKVGNGEHYEQSYNAQAVVDTEGSMLILGGYVTQHANDKKEMEPLVASVDEEVREIKTICMDTGYYSEEAVAAVEKKNEEGEREGPEVFCAVEKGHHGKTVEDLKDKGPRGRPPANMSAKEKMARKLKTKKGKEVYKKRKETVETVFGIIKSVMGFRQFMLRGIEKVNTEWALVRVSYNFKRLHRLLGGKSLTECLA

SEQ ID NO: 50603 - DNA, 678 bp, Unknown
  Obtained from environmental sample
  misc_feature (1)..(678): n is a, c, g, or t
gtgaacaaatatgaagtgttgcgaattcggcgatggcaatactggcgggacaaattgcgttgcgaagacctgctgaccgccgagtcccgaggccagcgggtttcccgcgatgatcgtggagccgtcgcacaccgacgaccagaccaagaccgtgctgtccggcgggtggacgtccctgacccggatgcgggcgggccggccggtgatcgtgcacggcgacggcacctcgctgtggaccgtgacccaccacaccgacttcgcgcgggcgttcgtgccgctgctcgggcacccgcggacgctgggggaggcgttccacatcacgtcggacgacttcctgacctgggaccagatcgcgtacgccctcggcgccgcgctgggcgtgcggccggacatcgtgcacgtgccgtcggacgccatcgccgccgccgacccggaatggggcgcgggcctgctcggcgacaagacccactcgatgatcttcgacaacagcaagatcaaggcgatcgctcccggctggcaggccacgatcccgttcgagcggggcgcccgggagatcgtggactggtacctggccgacgagacgcggcaggtcgtgaacccggaactggacgcgctgatggacaagctcgcggagaggtaccggcccttgccagcctagccagtcctcgcaggccttag

SEQ ID NO: 50604 - protein, 225 aa, Unknown
  Obtained from environmental sample
  misc_feature (1)..(225): Xaa is any amino acid
MNKYEVLRIRRWQYWRDKLRCEDLLTAESRGQRVSRDDRGAVAHRRPDQDRAVRRVDVPDPDAGGPAGDRARRRHLAVDRDPPHRLRAGVRAAARAPADAGGGVPHHVGRLPDLGPDRVRPRRRAGRAAGHRARAVGRHRRRRPGMGRGPARRQDPLDDLRQQQDQGDRSRLAGHDPVRAGRPGDRGLVPGRRDAAGREPGTGRADGQARGEVPALASLASPRRP

SEQ ID NO: 50605 - DNA, 549 bp, Unknown
  Obtained from environmental sample
  misc_feature (1)..(549): n is a, c, g, or t
atgatcgtggagccgtcgcacaccgacgaccagaccaagaccgtgctgtccggcgggtggacgtccctgacccggatgcgggcgggccggccggtgatcgtgcacggcgacggcacctcgctgtggaccgtgacccaccacaccgacttcgcgcgggcgttcgtgccgctgctcgggcacccgcggacgctgggggaggcgttccacatcacgtcggacgacttcctgacctgggaccagatcgcgtacgccctcggcgccgcgctgggcgtgcggccggacatcgtgcacgtgccgtcggacgccatcgccgccgccgacccggaatggggcgcgggcctgctcggcgacaagacccactcgatgatcttcgacaacagcaagatcaaggcgatcgctcccggctggcaggccacgatcccgttcgagcggggcgcccgggagatcgtggactggtacctggccgacgagacgcggcaggtcgtgaacccggaactggacgcgctgatggacaagctcgcggagaggtaccggcccttgccagcctag

SEQ ID NO: 50606 - protein, 182 aa, Unknown
  Obtained from environmental sample
  misc_feature (1)..(182): Xaa is any amino acid
MIVEPSHTDDQTKTVLSGGWTSLTRMRAGRPVIVHGDGTSLWTVTHHTDFARAFVPLLGHPRTLGEAFHITSDDFLTWDQIAYALGAALGVRPDIVHVPSDAIAAADPEWGAGLLGDKTHSMIFDNSKIKAIAPGWQATIPFERGAREIVDWYLADETRQVVNPELDALMDKLAERYRPLPA

SEQ ID NO: 50607 - DNA, 741 bp, Unknown
  Obtained from environmental sample
  misc_feature (1)..(741): n is a, c, g, or t
atgggcgtattgctcgcggattatatttttctttctctcaaagaactgagcaagcttgcgaagaacgccgcgatggttaattccattgttactacgggtatgcataaaatagtcgccgagtattacggctgcgaatgctatgaatgccttacgggctttaagtggattgcggatgttatgcgcaaatgggagaacggcgaggccggaggtaaaagctatgttttcggcactgaggaaagctacggatacaacatatcaacggatgtgcgcgacaaggacggcgtttcggcggcggcgctcaccgcggagatgactctctactggcgcagcaaggggaaaagcctgcttgagcgccttgacgaactttacgctttatgcggttactggcaggaaataggaatctccaaatacttcaaagggcctgagggtcccgcaattatgaacggcatcatggaagaataccggaaaaatccgccgaagactctcggcggcattacgattacaaaagtccgcgattttaaaaacggcgcggacggtcttccgccaagcgacgtgcttcagttcttccttgaagacggtactatcgtaagcgcccgccctagcggaacagagccgaagataaaattttacgctacttgctgcgcgctgattggctcaggttcgcttgaagatgcaaaagccgaagccgcgcgtaaactggacgctataaaaaaagatatccgcgctgtaattggagattaa

SEQ ID NO: 50608 - protein, 246 aa, Unknown
  Obtained from environmental sample
  misc_feature (1)..(246): Xaa is any amino acid
MGVLLADYIFLSLKELSKLAKNAAMVNSIVTTGMHKIVAEYYGCECYECLTGFKWIADVMRKWENGEAGGKSYVFGTEESYGYNISTDVRDKDGVSAAALTAEMTLYWRSKGKSLLERLDELYALCGYWQEIGISKYFKGPEGPAIMNGIMEEYRKNPPKTLGGITITKVRDFKNGADGLPPSDVLQFFLEDGTIVSARPSGTEPKIKFYATCCALIGSGSLEDAKAEAARKLDAIKKDIRAVIGD

SEQ ID NO: 50609 - DNA, 537 bp, Unknown
  Obtained from environmental sample
  misc_feature (1)..(537): n is a, c, g, or t
atgtacaaagacaacggtttgggtcggttattcctgcgtttttcgcagccgttaaacgtgatatggcagaatttaacttacgacaacattatcagccgcgagaaaagtttcggcagcgtagtagcgagaattacggcttacggtactgccgcgttaattgtcgccgctatgcggggagcgctggtaaaaaaagacgacgaagataaagacccggaagaattaatgaaaaagattttttattacatgcttgtttcgcctgttgcggaaagcgttccgcttatggggaatttggttgccggtaccgcggaaatacttgttaccggcgaaggaaaaacttaccagtcccggtattttgacatggcagaaagaatattgaatatggctgttgagttaaaaaaagaagattttgaaggagcgttacgcgatgccgtaaacgcgcttggtcttggagcgggactgcctacgtcggaaattaaccggattataaaagcggttaaaaaacaaagtccttggatcgtattcgggtttgacccgtaa

SEQ ID NO: 50610 - protein, 178 aa, Unknown
  Obtained from environmental sample
  misc_feature (1)..(178): Xaa is any amino acid
MYKDNGLGRLFLRFSQPLNVIWQNLTYDNIISREKSFGSVVARITAYGTAALIVAAMRGALVKKDDEDKDPEELMKKIFYYMLVSPVAESVPLMGNLVAGTAEILVTGEGKTYQSRYFDMAERILNMAVELKKEDFEGALRDAVNALGLGAGLPTSEINRIIKAVKKQSPWIVFGFDP

SEQ ID NO: 50611 - DNA, 957 bp, Unknown
  Obtained from environmental sample
  misc_feature (1)..(957): n is a, c, g, or t
gtgcctggtggaccactcgaggccgatggaatcgatttgctcgatggcctagttttcggatattttgacaatttgatgtctggacatttgtcatttctcggtaaagcaaaagccatgtgcgagcatttgacggtagccttgggggcagcaccgaaagacaccattgaaaggcgaaaatcccaactgctgagtacgcaatttgttgacaaaattgttcccgtcaaaaactttgaagaatgtcccgccataatccgcagcgaaaacattgacgtttatgcctatggaaacccaaagtggcgaattgaaacacctggttgtgttgtcagacacacagaatccgacaggatatcattgtcggtgttgaataccgtaataggacatgcttgtacattaaaatgcaaacattgcagtatgttatcaccatttgcaccaaaagatgcccttatttatgacatccgcaaaagtattgattccttaaaaaaaatagtgctatacgctgatataagttgtcttcatgttatgggcggcgagccgtttttgcacccagaattgtctttattactgacctatgctgtcaattcacctgcaattggaactattaaaattatcacaaatggaactatcttgcctaaaaccagtttagacattttgaccaacccaaaaattatagttcaaatatctgtttatccaaattatgcacaaaaacaagtaaatttcataaattatcttgacaataatggaattcagaaaacattttggcatttggataaatgggtaagccttgtatatcctcaccacgcaaggcagacggacaaaccggctgaaatgattttttcatcgtgtatttataaaatatcatgtttaatactcaaaaatggcattcttgggctttgcggaccaagtgtcataactccgcgcgtacttggatttttcgccaacagagggcgattactttaa

SEQ ID NO: 50612 - protein, 318 aa, Unknown
  Obtained from environmental sample
  DOMAIN (123)...(281): Radical SAM superfamily
  misc_feature (1)..(318): Xaa is any amino acid
MPGGPLEADGIDLLDGLVFGYFDNLMSGHLSFLGKAKAMCEHLTVALGAAPKDTIERRKSQLLSTQFVDKIVPVKNFEECPAIIRSENIDVYAYGNPKWRIETPGCVVRHTESDRISLSVLNTVIGHACTLKCKHCSMLSPFAPKDALIYDIRKSIDSLKKIVLYADISCLHVMGGEPFLHPELSLLLTYAVNSPAIGTIKIITNGTILPKTSLDILTNPKIIVQISVYPNYAQKQVNFINYLDNNGIQKTFWHLDKWVSLVYPHHARQTDKPAEMIFSSCIYKISCLILKNGILGLCGPSVITPRVLGFFANRGRLL

SEQ ID NO: 50613 - DNA, 867 bp, Unknown
  Obtained from environmental sample
  misc_feature (1)..(867): n is a, c, g, or t
atgatgaaggcccgagacctgatggtcagcgccgctcgcaccccggcggtggaccgacgtcgcgtgatcatcgtgaaagacgcggaccggatgaccgaacgcaccgccaatgtgctactcaaagcgatcgaagaaccgccgccggccaccgtttggctactgtgcgcgccgagcacgcgcgatgtgctgccaaccattcgcagccggtgtcgttcggtggtgctccgagtgcctacggcccgcgaggtcgctgcactgctagttcgccgcgacggggtggaaccagaggtcgcgcttggtgccgcgttggcggcgcaatcgcacgtcgggcgggcggcgcgattcgctcgccacagcgatgcgctggaacaacgcggggagattctgcgcttggccgcggcgattcggaccgtgcccgatgccgtgctcgccgccgcccaggtgacttccgaggtcaaggaccaggcgaaactgcgcagcgaggagcgagatgccgccgagcgagccgagttgctccgggtgctcggcatcgcgcccggtacagccattccggccaacctgcgtagccaggtcaaggcgctggaagatgatctaaaaagacgcgccacccgtcaggagcgggacgtgctcgaccaactactccttgatctgctttcgctttaccgcgacgtcctggtgctgcaactcggcgcacaagtcgatctgttcaacgccgccgtggcaccggaagtagccccgagcctggcccagcgcatctcgccccggcagaccgtcgaacccatggacgcggttggggtggcgcgcagccggattcaaaaaagaggtcccgacgctgctcgcatggaagcgatgttcatcacctgttga

SEQ ID NO: 50614 - protein, 288 aa, Unknown
  Obtained from environmental sample
  misc_feature (1)..(288): Xaa is any amino acid
MMKARDLMVSAARTPAVDRRRVIIVKDADRMTERTANVLLKAIEEPPPATVWLLCAPSTRDVLPTIRSRCRSVVLRVPTAREVAALLVRRDGVEPEVALGAALAAQSHVGRAARFARHSDALEQRGEILRLAAAIRTVPDAVLAAAQVTSEVKDQAKLRSEERDAAERAELLRVLGIAPGTAIPANLRSQVKALEDDLKRRATRQERDVLDQLLLDLLSLYRDVLVLQLGAQVDLFNAAVAPEVAPSLAQRISPRQTVEPMDAVGVARSRIQKRGPDAARMEAMFITC

SEQ ID NO: 50615 - DNA, 438 bp, Unknown
  Obtained from environmental sample
  misc_feature (1)..(438): n is a, c, g, or t
atgtatatttcagcaaacacagataaaagcattgacgatgccagtctagtaaatttcgagcgcatatccaaagaaggacgaaagtatgggattgggttggtagtcatatctcaacgtccatctgaagtgaacagaacggtactaagtcaaagtaataattttattgccatgcggttgacaaatgcagatgaccaagccgttgtaaagcgtttacttcccgacagcttaggagactatgcagagatgttacctatacttgatattggtgaggcattggtcgttggtgacgcaagtttattaccaagccttattaaagtaacacaacctactttgaaaccacgaagtgcaacgatagatttttgggacgaatgggctaaggacagcgttactgttgacatcgaagcatcaattgaggcgttaagaaaacagagtaaataa

SEQ ID NO: 50616 - protein, 145 aa, Unknown
  Obtained from environmental sample
  misc_feature (1)..(145): Xaa is any amino acid
MYISANTDKSIDDASLVNFERISKEGRKYGIGLVVISQRPSEVNRTVLSQSNNFIAMRLTNADDQAVVKRLLPDSLGDYAEMLPILDIGEALVVGDASLLPSLIKVTQPTLKPRSATIDFWDEWAKDSVTVDIEASIEALRKQSK

SEQ ID NO: 50617 - DNA, 459 bp, Unknown
  Obtained from environmental sample
  misc_feature (1)..(459): n is a, c, g, or t
atgatgacgagctcctgccggactgagtacgtttcatcatcgcctgaggaaactgaagcttttgggaggcgtttggccgcttatctggaacctggttcggttatcgccctgtcaggcggtttgggcgccggaaagacctgcatggtaaagggaatcgcccgcgccctgggagtcaacgataacataaccagccccacctacacgattgtcaacgaataccggccggaggtcggacgactncacggctgctccctgtaccatattgacgcataccgcctgaacagtgatgaggattttgcttccaccggggcgggcgactgtttttccgcggggggaattacaattattgaatggggcgagcgtattccgtcttccatcccccccagtgctatacgcgtagagattgaaatatccggcccgcaaagccgtatcttccgtttgcggggattaagcctatga

SEQ ID NO: 50618 - protein, 152 aa, Unknown
  Obtained from environmental sample
  DOMAIN (18)...(145): Uncharacterised P-loop hydrolase UPF0079
  misc_feature (1)..(152): Xaa is any amino acid
MMTSSCRTEYVSSSPEETEAFGRRLAAYLEPGSVIALSGGLGAGKTCMVKGIARALGVNDNITSPTYTIVNEYRPEVGRLHGCSLYHIDAYRLNSDEDFASTGAGDCFSAGGITIIEWGERIPSSIPPSAIRVEIEISGPQSRIFRLRGLSL

SEQ ID NO: 50619 - DNA, 732 bp, Unknown
  Obtained from environmental sample
  misc_feature (1)..(732): n is a, c, g, or t
ttggataacagtgcggttcaccctgaaaattacggcttggtagaaaaaatcgcagagaaagctggcaagcctttgaatgaactcataggcaattctgaggctttgcattccattgttgcaaacgatttcaccgatgcagagaacggagttggcaaaaacaccattgcagatattttggcagaacttgaaaaaccaggcagagaccctcgcaaagaattccattatgccaaattcaaccccaaaatcaaaactatgcaagatttgattaccggtagttggttggaaggcgttgttagcaacgtgacgaattttggcgcatttgtggatatcggtgttcaccaagacggcttggtgcatatttccgagatgagcgataattttgtgaaagatgcaaaaaccattttgacaaccggcgatgtggttaaggttagggtggtttctgttgatgccgccaataaacgcatatccctttttatgaagcaagagagcgaacgcagggtaggcggcggtggctttaaaggtggcggcagagatgccaaaggtggctatcaaggcaagggtagtttccaacccaagcctttacctcaggctgcaactctcgcagatttaaaagctcgtttttctggaaaggcacagaaacaggctgctcaaaacattccaaaaaagccaacggcaccagctatcgagtgcgatcgtcctggatgggcggccaggcaccaagctgtcctttag

SEQ ID NO: 50620 - protein, 243 aa, Unknown
  Obtained from environmental sample
  DOMAIN (87)...(160): S1 RNA binding domain
  misc_feature (1)..(243): Xaa is any amino acid
MDNSAVHPENYGLVEKIAEKAGKPLNELIGNSEALHSIVANDFTDAENGVGKNTIADILAELEKPGRDPRKEFHYAKFNPKIKTMQDLITGSWLEGVVSNVTNFGAFVDIGVHQDGLVHISEMSDNFVKDAKTILTTGDVVKVRVVSVDAANKRISLFMKQESERRVGGGGFKGGGRDAKGGYQGKGSFQPKPLPQAATLADLKARFSGKAQKQAAQNIPKKPTAPAIECDRPGWAARHQAVL

SEQ ID NO: 50621 - DNA, 933 bp, Unknown
  Obtained from environmental sample
  misc_feature (1)..(933): n is a, c, g, or t
ttggaaaccgcatctagaagctatgtgcaaagactcttgggaacgtttgctaaaaccgagtttgaaagcgaagttcgccttttattgaaagaatccgcagagttagaggctttcaaggttttcaccaaaaacctatcagatattttactcgccccgcccgcaggccacaaggcggttctcgctcttgacccaggattcaaaagcggaattaaggttgcagttttagaccaaaatggaaaatttatggatcacggcgtaatttacccgctggaaccgcaaaagcaaatttcgcagtctgccgcataccttgcggaactcgttgaaaaatacgatatcgatttgatttccataggcaatggcaccgccagccgcgaaacagacgattttataaaggaaatttccggcaagctgaaaaacaaacgcggagaacgcccagttggagttattgtgaatgaatcgggtgcttctgtttatagcgcgagcgagcttgctataaaggaattccccaaagaagacgtaacaacaagaggtgcaatttccataggtcgccgcttgcaagacccgcttgcggagcttgtgaaagtggaacccaaagccattggtgttgggcaatatcagcacgatgtgaatcaaaaggagctccaaaaacgtttggacgaagttgtggaaagctgcgtgaacaaggttggcgttgatgtgaacagcgcaagcccagctttgctaggctatgtttctggcgtaaataaaaacttggcagatagcattgttaagcacagagacgaacacggtgcatttgcaagtcgcgaggctttgaaagaagtcaagggttttgggcaaaaagcttatgagcaagcagccggattttacgcattcacggtgcagagaaccccttggataacagtgcggttcaccctgaaaattacggcttggtag

SEQ ID NO: 50622 - protein, 310 aa, Unknown
  Obtained from environmental sample
  misc_feature (1)..(310): Xaa is any amino acid
METASRSYVQRLLGTFAKTEFESEVRLLLKESAELEAFKVFTKNLSDILLAPPAGHKAVLALDPGFKSGIKVAVLDQNGKFMDHGVIYPLEPQKQISQSAAYLAELVEKYDIDLISIGNGTASRETDDFIKEISGKLKNKRGERPVGVIVNESGASVYSASELAIKEFPKEDVTTRGAISIGRRLQDPLAELVKVEPKAIGVGQYQHDVNQKELQKRLDEVVESCVNKVGVDVNSASPALLGYVSGVNKNLADSIVKHRDEHGAFASREALKEVKGFGQKAYEQAAGFYAFTVQRTPWITVRFTLKITAW

SEQ ID NO: 50623 - DNA, 996 bp, Unknown
  Obtained from environmental sample
  misc_feature (1)..(996): n is a, c, g, or t
atgaaagaagtatcacttaccggaattaaacccacgggcgatctgcacataggcaattactttggcgcgattaagcccgcgctggaacttgcaaaaacctacgacgcgcgttattttatcgccgactaccacgcgctcaataccatgaaggatccgaaagaactgaacgcgacgatcaggcaggtggccgccggctggcttgccgcggggcttgatcctgaaaaagtaattttttaccgccaaagctccatcccgcaggtgttcgagcttgccaccatgctggcggcctttacttccaagggccttatgaacagggcccacgcctacaaggcggcagtacaggacaacaacgaaaagggcgatgatcccgacgcgggaattaatatgggcctgtttacatacccgatactgatggccgccgatatcattatctttgattcggatattgtgccggtaggcgaagatcaggtgcagcacattgagatggcgcgggacatggtccaggcgataaacgccaactacggcaagcccgtgttgaaacttccccgcgcgggcgtgcaggaaaatgtcgccatagtgacggggcttgacggcagaaaaatgagtaaaagttacggcaatgtgattcctctgtttgccccggaaaaaaccctgcgtaaaacaatcatgcaggtagtgaccaattcccaggcggttgaagaacccaaagaccccgattccagccagattttttcactgtacaaactttttaccaacgcggaagaacaggccgcccttgccgcccgttaccgcgcggggggcatgggctggggcgaagccaaagaagaactgttccgcgccgcgaaccgcgaacttgccccgatacgggagcgttacaacgcaatcatggcggacattcccgctctggacaaaattcttgagcagggagccgcaaaagcccgccccattgcggccgccacggtaaaacgtttcagaaaagcggcggggatagactga

SEQ ID NO: 50624 - protein, 331 aa, Unknown
  Obtained from environmental sample
  DOMAIN (2)...(286): tRNA synthetases class I (W and Y)
  misc_feature (1)..(331): Xaa is any amino acid
MKEVSLTGIKPTGDLHIGNYFGAIKPALELAKTYDARYFIADYHALNTMKDPKELNATIRQVAAGWLAAGLDPEKVIFYRQSSIPQVFELATMLAAFTSKGLMNRAHAYKAAVQDNNEKGDDPDAGINMGLFTYPILMAADIIIFDSDIVPVGEDQVQHIEMARDMVQAINANYGKPVLKLPRAGVQENVAIVTGLDGRKMSKSYGNVIPLFAPEKTLRKTIMQVVTNSQAVEEPKDPDSSQIFSLYKLFTNAEEQAALAARYRAGGMGWGEAKEELFRAANRELAPIRERYNAIMADIPALDKILEQGAAKARPIAAATVKRFRKAAGID

SEQ ID NO: 50625 - DNA, 360 bp, Unknown
  Obtained from environmental sample
  misc_feature (1)..(360): n is a, c, g, or t
atgaaaagcatattctctgaagaaatattgaaaacaaaaatagaggcaaaagaaatatatgttgttcaggaaaacgaggaattaattgggtggcttagatacaatctattttgggataatgttccgtttatgaatttattatattttctggaaaaatacagacgcagcgggatgggaagaaaattggtaaatcattgggaaaatgaaatgagggaaagaggttataaaaatgtattaacctcaacactatcaaatgaggaagcgcagcttttttatagaaaactgggatatacggaaattggcggattaaaatatttagatgaaccattggaaataatattttgtaaaaaaatatcctaa

SEQ ID NO: 50626 - protein, 119 aa, Unknown
  Obtained from environmental sample
  DOMAIN (19)...(106): FR47-like protein
  misc_feature (1)..(119): Xaa is any amino acid
MKSIFSEEILKTKIEAKEIYVVQENEELIGWLRYNLFWDNVPFMNLLYFLEKYRRSGMGRKLVNHWENEMRERGYKNVLTSTLSNEEAQLFYRKLGYTEIGGLKYLDEPLEIIFCKKIS

SEQ ID NO: 50627 - DNA, 663 bp, Unknown
  Obtained from environmental sample
  misc_feature (1)..(663): n is a, c, g, or t
atgaagaggggtttggcagtgaaatcgaaaactgttctttatagattatttatgaggtgtagaaaatatctgccacgtagagtaaaattaatggcaaaacaactgcattttaaaatttatggctggcagatgccttggtcattaattaaatttgaggtacatttaacggataaatgtaatcttaactgtgcgggctgtttgcatttttcatcattatgtaagggaacgaacttattagacgtaaatactcttgaaaaagattataaaagaatttctaagttaacaaatgggaaaatggctaatattcaattgcttggaggcgagccgttgctacatccaaacataaaggactttcttgttttaaccagaaaatattttccagaaatagataatgtcgctcaaattggaatcattgatttggtgacgaatggcgttttattacacgaacagccggacgatttttggacgacatgtaaagacaataatattagaattgttatttctgattttccaatcaaagtaaagtacgaaataatacgagaaaaagcaataagatttagtgttgagtcaagaatgtatagtgaaaaaaggcagtccaaagacaccggtttcggcaaaagaatgggtcaaaataccgatagatgtaaacgggttacagaataa

SEQ ID NO: 50628 - protein, 220 aa, Unknown
  Obtained from environmental sample
  misc_feature (1)..(220): Xaa is any amino acid
MKRGLAVKSKTVLYRLFMRCRKYLPRRVKLMAKQLHFKIYGWQMPWSLIKFEVHLTDKCNLNCAGCLHFSSLCKGTNLLDVNTLEKDYKRISKLTNGKMANIQLLGGEPLLHPNIKDFLVLTRKYFPEIDNVAQIGIIDLVTNGVLLHEQPDDFWTTCKDNNIRIVISDFPIKVKYEIIREKAIRFSVESRMYSEKRQSKDTGFGKRMGQNTDRCKRVTE

SEQ ID NO: 50629 - DNA, 1023 bp, Unknown
  Obtained from environmental sample
  misc_feature (1)..(1023): n is a, c, g, or t
ttgaaggttttcttccccgaccataagttaggcgaaggtttacaagctgacgagccgtctttgttcgcgcccaacgcttttttaaaatacgcgaaatccgcccttctcgcggtattgcctctcgctctggtgctgatcatatctatcggattgattgcccgcgacagaatatttaacgccgatattgtagcgcttggaattttattcgccgcaatcggtatgttcgctttaaatcttggaatgaccggcggcattaccgtattaagctctcaggcgggaaactcgcttaaacaggcatacacggatacgctttatgaaaacaaaacagtaacattaagcggcgtaaacgagaattcgatcattacggtagcgggggagaacgggccggaaacctatatctgggtgcaggggaaaaaagggccgacccttgaaaagtttttttctcacaggcttgtcggcgacaggtatacccatatcccgataaaagacgctctttcctctgaactgggaataatcggcgcttatttcgtgatacttatcattgttttctttcttggattcttcgccatcttcgcggaacccgggcttgccgttaccgccgttacggtagaggagatgacgacgggaacttttaagcgctcaaagttgataatgatcgccgctatgggtgtcggcggcggtatggtgattggtttcgcgcgggtgttgttcagcaatatgctgccttcaggcggcatccatctttcgtggattttggctccttgctatctccttgccctgatcctgacaattttcgcgcctgaagatttttcctcgatagcgtgggacgtcgccggcatcgcgacaggccccatcaccgttccaatcattataacttcaggccttggactcggacgcgattcactgcgggctgacggcgctttcggcattgttgcgacggccagcgtatttccgattatcgtaatattaatatcgggcattgttgataaagcgagatcgaagcgcgtgttaagcaggatgtag

SEQ ID NO: 50630 - protein, 340 aa, Unknown
  Obtained from environmental sample
  DOMAIN (146)...(330): Protein of unknown function (DUF1538)
  misc_feature (1)..(340): Xaa is any amino acid
MKVFFPDHKLGEGLQADEPSLFAPNAFLKYAKSALLAVLPLALVLIISIGLIARDRIFNADIVALGILFAAIGMFALNLGMTGGITVLSSQAGNSLKQAYTDTLYENKTVTLSGVNENSIITVAGENGPETYIWVQGKKGPTLEKFFSHRLVGDRYTHIPIKDALSSELGIIGAYFVILIIVFFLGFFAIFAEPGLAVTAVTVEEMTTGTFKRSKLIMIAAMGVGGGMVIGFARVLFSNMLPSGGIHLSWILAPCYLLALILTIFAPEDFSSIAWDVAGIATGPITVPIIITSGLGLGRDSLRADGAFGIVATASVFPIIVILISGIVDKARSKRVLSRM

SEQ ID NO: 50631 - DNA, 348 bp, Unknown
  Obtained from environmental sample
  misc_feature (1)..(348): n is a, c, g, or t
atgagtttgcaggcccgctacatcgccctgcacgatgaagtcagggtgctgaaacaacaagggcgggaatttgaagatattcttttcctctcacaaaatcttgttacggaaggggaagggtactggctgcgcacgggcggcgtccggcacggccccttttgtaagccttgttatgagtataccggcaagctcatccggcttgaaggccgcaaaaaagtctggcgctgtccgtactgcggtttgttgtatggccgggagcaggcgctgccggagtttttggccgtgaacgccccgtcggcgcggccgggaacactcctctccttcggcgttccggcaaaatattgttga

SEQ ID NO: 50632 - protein, 115 aa, Unknown
  Obtained from environmental sample
  misc_feature (1)..(115): Xaa is any amino acid
MSLQARYIALHDEVRVLKQQGREFEDILFLSQNLVTEGEGYWLRTGGVRHGPFCKPCYEYTGKLIRLEGRKKVWRCPYCGLLYGREQALPEFLAVNAPSARPGTLLSFGVPAKYC

SEQ ID NO: 50633 - DNA, 645 bp, Unknown
  Obtained from environmental sample
  misc_feature (1)..(645): n is a, c, g, or t
ttggcagaaggtttttcaaaggctgatatagtatttttgtgcataaaaccgcaaatcttctcaaaaatttccgcctctttgcgcaaagagatggaggctgccaacaaagaaactattgtagtttccataatggcaggggtaacgcttctctctttacgcacggctttaaagatgaagaatattgtccgcacaatgccaaacatcgccgttacggtgaaaaaagggacagttgccatagcagcagaagaagggattgaagagagcgtattgcaaacggttgaatttttattctccacttgcgcaaataccgtcagagttcttgaaagccaaatggatgcggttacagggctttccggtagcggacctgcgtttgttttccagttcatagaagcactcgtgatgggtggtgttaaagttggtttaaaaagagatgcagcgatgcagctggcgttatccacagtagaaggctcaatagaaatgttaaaagattctaaattaaatcctggcgagctgacggcaaatgtttgcagcccggcaggaacaacaatagctggaattcaagaacttgaaaataaggcgtttagaggagcggttatggctgcagttgaagctgcggtaaaacgctctacggaactcggaaaatga

SEQ ID NO: 50634 - protein, 214 aa, Unknown
  Obtained from environmental sample
  DOMAIN (1)...(197): NADP oxidoreductase coenzyme F420-dependent
  misc_feature (1)..(214): Xaa is any amino acid
MAEGFSKADIVFLCIKPQIFSKISASLRKEMEAANKETIVVSIMAGVTLLSLRTALKMKNIVRTMPNIAVTVKKGTVAIAAEEGIEESVLQTVEFLFSTCANTVRVLESQMDAVTGLSGSGPAFVFQFIEALVMGGVKVGLKRDAAMQLALSTVEGSIEMLKDSKLNPGELTANVCSPAGTTIAGIQELENKAFRGAVMAAVEAAVKRSTELGK

SEQ ID NO: 50635 - DNA, 528 bp, Unknown
  Obtained from environmental sample
  misc_feature (1)..(528): n is a, c, g, or t
atgcctcaatcacttctggaacagagacgacgacctggaagaataaggaaagggaatatggcggaagatcggatgctcgaattcatcaaaggactgagggcgaaacgccctgatttgcaggccgtcctggaaggcgtctatgcggcgcacagggttatccttgccgaatgggccgccattgacccgcactatctccgttatccgcccggacattactactcgccgctgccttcgaagcgggagttcctttccgtcgcggaaaaaatatacgggacgtcttcctgcccgatgggagtaaacctgcgggtcaaagaacagttccggctggttgcccgtctggcaaaatattatgacgaactcccgtttgccgaagaagctcaggagacgtgccgctattattgcaacaatacgtatttctgtcatgccgatgcgtattggctgtatgccctgatgcgggaatatcgtccccaacggatcatcgaggttggttccgggttttcaacgcgctgttatgctggatgtgaatga

SEQ ID NO: 50636 - protein, 175 aa, Unknown
  Obtained from environmental sample
  misc_feature (1)..(175): Xaa is any amino acid
MPQSLLEQRRRPGRIRKGNMAEDRMLEFIKGLRAKRPDLQAVLEGVYAAHRVILAEWAAIDPHYLRYPPGHYYSPLPSKREFLSVAEKIYGTSSCPMGVNLRVKEQFRLVARLAKYYDELPFAEEAQETCRYYCNNTYFCHADAYWLYALMREYRPQRIIEVGSGFSTRCYAGCE

SEQ ID NO: 50637 - DNA, 693 bp, Unknown
  Obtained from environmental sample
  misc_feature (1)..(693): n is a, c, g, or t
atgtcaaaaaaggtatcgcacggcgatgaaaatttggaaataattgagcatacgctctccaacgccgaaacgtttattcagaagtatcaaaatcatctgatatatggctttggagcagccattttgttagttgcagcatttttcgcctaccaaaattggtacaaagcaccgcttgaggaggaggcgcaaacgcagctgtttgcagccgtacaatactttgaacaggattcgctcagccttgcgcttgacggcgatggcagcaacttcggcttgcttgatgtggcagaccgctacagcagcaccaaagcaggaaaccttgcccgctactacgccggcttgagctacctgcataacggtatgtacgaagaggctattgaatacctaaaaaagtacagcgcaggcgacaagctgagcaaggcgctctcgcttggcaacattggcgatgcctacagcgagctgaaggactacagcaacgccatatcgtactacaagaaggctgcaaacgccgccaacagccgcattaccacgcctcgctttttgatgaaggcagggttagtgcttgaaaccgaaggtagatatgccgaagcagctaagctgtacgagcgaataaagaaagattttttcgacacaagcgaaggtcgtgaagccgacaagtacattgtccgcgcacagctgctggcagagcaacagtag

SEQ ID NO: 50638 - protein, 230 aa, Unknown
  Obtained from environmental sample
  DOMAIN (140)...(173): Tetratricopeptide repeat
  misc_feature (1)..(230): Xaa is any amino acid
MSKKVSHGDENLEIIEHTLSNAETFIQKYQNHLIYGFGAAILLVAAFFAYQNWYKAPLEEEAQTQLFAAVQYFEQDSLSLALDGDGSNFGLLDVADRYSSTKAGNLARYYAGLSYLHNGMYEEAIEYLKKYSAGDKLSKALSLGNIGDAYSELKDYSNAISYYKKAANAANSRITTPRFLMKAGLVLETEGRYAEAAKLYERIKKDFFDTSEGREADKYIVRAQLLAEQQ

SEQ ID NO: 50639 - DNA, 870 bp, Unknown
  Obtained from environmental sample
  misc_feature (1)..(870): n is a, c, g, or t
atgccggcatttccgaaaagaagaagcagtgcagacaccggggaacgggctttcgcatacgccaaagcctgcggtatcattggcaaatcttttgtcggaaggcggatgtccgcgttgggaaaattgaatgcgctctccgaattcgggcggctggtttttcctgaagcgtcgaatgaactgcccggaagggaactcctggtcgatcttgaaaggcggcttttacagcgcacgatacggcacatactcgccgtgatcaattcatattcaaatccgccggaactgctgatacgccagcttcgctcctgcgaatacgccgttcttaagacatgcctgcaccacattgtcgcagacaagccgattcccaatgcgttatgcgacattgaaaaatacgggaccgtgcgttttaacgcgtatcccgatcttaaggcgatggtaagcggcaccgaatttgagtttatcctttcaaaagaccttaaagccgccgattttgagctaacctcgctggaagcggagcttgatttacagtattacaccctgcttatgaaaagccttcaacgccttcccgccgaagaccgccttctcgctcagcggatacttgccgaggaaatctccctgcgtaactgcgtatgggcgttgcggctgcgtacctattttgaaaaaactgcggaagaaacgcaaaagtaccttatgaatctggaaattccccaatgtccgccgttggaaatccccggcgatatatccccccgcttttcatcccaaagaggtgcggattccggcaagctctccctggcccaggaagccgaagagtcattgtattttccgctggataaccgttccatggagaggatggcgctgggaaagcctgcttaa

SEQ ID NO: 50640 - protein, 289 aa, Unknown
  Obtained from environmental sample
  misc_feature (1)..(289): Xaa is any amino acid
MPAFPKRRSSADTGERAFAYAKACGIIGKSFVGRRMSALGKLNALSEFGRLVFPEASNELPGRELLVDLERRLLQRTIRHILAVINSYSNPPELLIRQLRSCEYAVLKTCLHHIVADKPIPNALCDIEKYGTVRFNAYPDLKAMVSGTEFEFILSKDLKAADFELTSLEAELDLQYYTLLMKSLQRLPAEDRLLAQRILAEEISLRNCVWALRLRTYFEKTAEETQKYLMNLEIPQCPPLEIPGDISPRFSSQRGADSGKLSLAQEAEESLYFPLDNRSMERMALGKPA

SEQ ID NO: 50641 - DNA, 909 bp, Unknown
  Obtained from environmental sample
  misc_feature (1)..(909): n is a, c, g, or t
atgacgcaatttaatcccgttgatcatccacatcgccgctacaacccgctcaccgggcaatggattctggtttcaccgcaccgcgctaagcgcccctggcagggggcgcaggaaacgccagccaaacaggtgttacctgcgcacgatccagattgcttcctctgcgcaggtaatgtgcgggtgacaggcgataaaaaccccgattacaccgggacttacgttttcactaatgactttgcggctttgatgtctgacacgccagatgcgccagaaagtcacgatccgctgatgcgttgccagagcgcgcgcggcaccagccgggtgatctgcttttcaccggatcacagtaaaacgctgccagagctcagcgttgcagcattgacggaaatcgtcaaaacctggcaggagcaaaccgcagaactggggaaaacgtacccatgggtgcaggtttttgaaaacaaaggcgcggcgatgggctgctctaacccgcatccgcacggtcagatttgggcaaatagcttcctgcctaacgaagctgagcgcgaagaccgcctgcaaaaagaatattttgccgaacagaaatcaccaatgctggtggattatgttcagcgcgagctggcagacggtagccgtaccgttgtcgaaaccgaacactggttagccgtcgtgccttactgggctgcctggccgttcgaaacgctactgctgcccaaagcccacgttttacggatcaccgatttgaccgacgcccagcgcagcgatctggcgctggcgttgaaaaagctgaccagtcgttatgacaacctctcccagtgctccttcccctactctatgggcgcgcacagcgcgccatttaatggcgaagagaatccacagtggcagctgcacgcatgcaagtctgacatctaa

SEQ ID NO: 50642 - protein, 302 aa, Unknown
  Obtained from environmental sample
  DOMAIN (178)...(301): Galactose-1-phosphate uridyl transferase, C-terminal domain
  misc_feature (1)..(302): Xaa is any amino acid
MTQFNPVDHPHRRYNPLTGQWILVSPHRAKRPWQGAQETPAKQVLPAHDPDCFLCAGNVRVTGDKNPDYTGTYVFTNDFAALMSDTPDAPESHDPLMRCQSARGTSRVICFSPDHSKTLPELSVAALTEIVKTWQEQTAELGKTYPWVQVFENKGAAMGCSNPHPHGQIWANSFLPNEAEREDRLQKEYFAEQKSPMLVDYVQRELADGSRTVVETEHWLAVVPYWAAWPFETLLLPKAHVLRITDLTDAQRSDLALALKKLTSRYDNLSQCSFPYSMGAHSAPFNGEENPQWQLHACKSDI

SEQ ID NO: 50643 - DNA, 363 bp, Unknown
  Obtained from environmental sample
  misc_feature (1)..(363): n is a, c, g, or t
atggtgctttccgatggcgaggacaaaccggacgaccaccccgaatatgggggcttggctgcctttgacaaataccgggcggaacaggcaaagtggatcgaacaagagctgcagggcgccactgcaaaatcagcgttgtaccgcgtagtgttcacccacattccggcctacattgcgtttgagccagtcgggggcagggcgacgtcgcactcgcttgccatgctttcaaaactatggacacccctcttcgtcaagggcaaggttgacttggtgatttcgggcacacccaccgccacgagtggcggcaaggtgatgcggaaaggggcgaatacgccctgttggtggccacaaaccaagagatag

SEQ ID NO: 50644 - protein, 120 aa, Unknown
  Obtained from environmental sample
  misc_feature (1)..(120): Xaa is any amino acid
MVLSDGEDKPDDHPEYGGLAAFDKYRAEQAKWIEQELQGATAKSALYRVVFTHIPAYIAFEPVGGRATSHSLAMLSKLWTPLFVKGKVDLVISGTPTATSGGKVMRKGANTPCWWPQTKR

SEQ ID NO: 50645 - DNA, 342 bp, Unknown
  Obtained from environmental sample
  misc_feature (1)..(342): n is a, c, g, or t
gtggggcttgccggtgacgtggaaggccgtgtcttgtttgacatgaccaaagaaaccgccttggcagtagcgggggctatgaacggcggagaagtcttcaccgtttttgacgagatgcccaaggctacgattcaggaacttgccaatatgatcacggcgcaggcggttaccaagctgcatgatttaaatttcaaattcgacctgactccgcctgctttgtttaccggtgaaaacatggaaatttccaccaagttcgatttggaagccctggttatacctctggatcttggcgagggcggaaggatagaggtaaacgtagcaatccgcgaaaaagcaaaatag

SEQ ID NO: 50646 - protein, 113 aa, Unknown
  Obtained from environmental sample
  DOMAIN (39)...(75): CheC-like family
  misc_feature (1)..(113): Xaa is any amino acid
MGLAGDVEGRVLFDMTKETALAVAGAMNGGEVFTVFDEMPKATIQELANMITAQAVTKLHDLNFKFDLTPPALFTGENMEISTKFDLEALVIPLDLGEGGRIEVNVAIREKAK

SEQ ID NO: 50647 - DNA, 651 bp, Unknown
  Obtained from environmental sample
  misc_feature (1)..(651): n is a, c, g, or t
atgaaagaaaatctggcaatggaacggatttgcctcacgacaataaaagcttacaacgacgaggaaaagtatctttttctaaattttcagaatatgattgaaaaaacggaacgcctaatatccgaaataaataaaattcatcttgaattttcaaatgattactttgaaacgggaaaagtggaaaagataaatctatccaaaaccatagccaatgttcccaaacaacacatcttgaattatcgcctgaatttgcacgagagcataaatgattatttgataggtgcaaatttggatgatgtgaattattactaccgcgtaaaaacaagcgaaagcattgaagagaaaattatacgatttcaaagcagagaagagcaatttcctgtaaataactggatgaatgatatttttggagctaggattatattatgttcaaatgatattgaagctattttaaagttgctggacggctggcaggaaaaatacggattgaagaactggtacacaagggacaaggaaggctataaaggcatacacatttattttaaaaataaaagtaatttttatttcccttgggaacttcaaatctgggacaaaaagaatgttgaaaaaaatattgaaagtcacagaaaatttaaaaggaaatttgtataa

SEQ ID NO: 50648 - protein, 216 aa, Unknown
  Obtained from environmental sample
  misc_feature (1)..(216): Xaa is any amino acid
MKENLAMERICLTTIKAYNDEEKYLFLNFQNMIEKTERLISEINKIHLEFSNDYFETGKVEKINLSKTIANVPKQHILNYRLNLHESINDYLIGANLDDVNYYYRVKTSESIEEKIIRFQSREEQFPVNNWMNDIFGARIILCSNDIEAILKLLDGWQEKYGLKNWYTRDKEGYKGIHIYFKNKSNFYFPWELQIWDKKNVEKNIESHRKFKRKFV

SEQ ID NO: 50649 - DNA, 792 bp, Unknown
  Obtained from environmental sample
  misc_feature (1)..(792): n is a, c, g, or t
atgcgtctcccgggcacttccaaaatttcggccctgccaggcgtgggtgggaagaggcgcgaactgcttgagggcgcgggcatcttcaccatcgcggatctgctgtgggcactgccctaccgctacatagacaggggaagcatcgcgccgataggcgacctgcactcgcgcctagagatttttcaggcggagggcgcaacggtatcgctgctgggcacgatactggacataaggcaaagcgtttcgcgctacaagaggatgccaataacagaagcactgcttggcgatgagactggctcgatacgcctgatatggttcaaccagccgcacctgcccaaaatgatgggctcgggggacacgatattcgtatggggccaggtacagcaagaccgcagaggcttcgtgatgcaggccccggcctgggagatgatctccggccacgaccccgacgcggcgggccaagacagagatgcggccaacaataatacagcggtctcgttcacaagcaggtactatccgctataccgccgcatttccacaatgcagggcagaacgcgcaaaaaattggtgtcggacgcgctggccatcgtggatgccgaggacaattttttgccgctggaactggcaaaggggctgcctagcctaatggacgcactgcgcctgctacacgcgccgccagaccactgcgatccggccgagctacagtcccatggcacgcccgcgctccaaaggctaatcttagaagagctatttgccctcgcgctgggcgcgggaacttccccgaatcactag

SEQ ID NO: 50650 - protein, 263 aa, Unknown
  Obtained from environmental sample
  DOMAIN (68)...(144): OB-fold nucleic acid binding domain
  misc_feature (1)..(263): Xaa is any amino acid
MRLPGTSKISALPGVGGKRRELLEGAGIFTIADLLWALPYRYIDRGSIAPIGDLHSRLEIFQAEGATVSLLGTILDIRQSVSRYKRMPITEALLGDETGSIRLIWFNQPHLPKMMGSGDTIFVWGQVQQDRRGFVMQAPAWEMISGHDPDAAGQDRDAANNNTAVSFTSRYYPLYRRISTMQGRTRKKLVSDALAIVDAEDNFLPLELAKGLPSLMDALRLLHAPPDHCDPAELQSHGTPALQRLILEELFALALGAGTSPNH

SEQ ID NO: 50651 - DNA, 477 bp, Unknown
  Obtained from environmental sample
  misc_feature (1)..(477): n is a, c, g, or t
gtgggaaccgggggaatggtgaccaaactagatgccgtgcaaattgctacgtcatcgggcatacccactattttggcgggcgctaatcaaattagcgaggctctaaagggcggcgatgtgggaacttatttcgccgctggccacagaaaagccagtgggcgcatgcattggttagctcatgctgcggtggtaaaggggcgtttaaccttggacgatggcgcaaccgctgccgtgcgcaattccggagcatcactgcttgcagtcggagttaccaaggtcactggcgattttgatgctggggacccggtggaactgattgaccggaacggtcacgccatcgcgcgcggcctcgccggcttcaactccatcgaattgccgcaactcctgggccgaaactcccggtggctccgggaggcgttaggtgaacgctttgaccggcccgtggtgcatcgggacgatttggtgctggttgagtag

SEQ ID NO: 50652 - protein, 158 aa, Unknown
  Obtained from environmental sample
  DOMAIN (66)...(140): PUA domain
  misc_feature (1)..(158): Xaa is any amino acid
MGTGGMVTKLDAVQIATSSGIPTILAGANQISEALKGGDVGTYFAAGHRKASGRMHWLAHAAVVKGRLTLDDGATAAVRNSGASLLAVGVTKVTGDFDAGDPVELIDRNGHAIARGLAGFNSIELPQLLGRNSRWLREALGERFDRPVVHRDDLVLVE

SEQ ID NO: 50653 - DNA, 1407 bp, Unknown
  Obtained from environmental sample
  misc_feature (1)..(1407): n is a, c, g, or t
atgctcagggtggataaaaaactggatgaagctctgcttacggtaaacaaaggcttggagatgaattccaattttttgcctggcaggcttgccagagggcgcatacttttagaaaaaggcgatttggctggagccaaaagcgattttgaggccgtagcagagcatgattccttttgctcctgtgcgcaaaaactgtttttggaaacagcagagaaattggggcagcctccagaaacggaaatatatcagaaaattttaggaactattgaacccggagttgtggttaaggtaaaagtaaagtcaaaaaccgaacctgctggcgtaaatgccgccttagacgatcttttaagcgaagatgacagtgaagacaaagaagatactgtgatttccgatttgcttttgaaaacttttgagaatatatttgaacctaacaagaaagaagaacctatccctgaccttgtaccttattcgccgccgcctaaggtatcagctcctaaagcacaagcagctcctaaaccgccaccagcccccaaggcaccacccgccgcaccagacttagactctctggtaaatgagcagttgaaatccaaagtggaaaatgtaccggatttaaccagcgatatggattctttgctagcatcggcagcgtctttgccaccagtttctggtgctttaacttctccaagccctccagatgtagatgcccttataaatgagcagttgaaatccaaagtagaagacgcaccagatttaacaggcgatatggattccttgctcgcatcggcttcagacatattatccgcttctggtactttaaccgctccaagttcctctactccagacatagattctttggtagcagagcagcttacatccagagtggacaatatgccagatttaacaggcgatataagttccttgctttcatctatgcctgctgaaccctctcttgagccatcacttgcggctggttattcttttccatccatcacttttccgccagtacccgtctctggtactccaaaccctccgagttccccaaccacaccggatatagatgctctaataaatgagcaattaaagtctaaagtagaagatgtaccagatttaacaggcgatataagttccttgcttgcatctaataccataagctctccaaacccaccagatttagatgccctgataaatgagcagttgacacccaaaatggaaaacctgccagatttaaccggagatatagattctctgcttgcatctgcgccagctgtaggtacagaaccagagcttatgccttatgtgccgccaactgacaatgcagatcccgcacttgctcaaaagccaactatgactttggcagaactctatatggatcagggtttgccgcaaaaagcagctgcgggtttataa

SEQ ID NO: 50654 - protein, 468 aa, Unknown
  Obtained from environmental sample
  misc_feature (1)..(468): Xaa is any amino acid
MLRVDKKLDEALLTVNKGLEMNSNFLPGRLARGRILLEKGDLAGAKSDFEAVAEHDSFCSCAQKLFLETAEKLGQPPETEIYQKILGTIEPGVVVKVKVKSKTEPAGVNAALDDLLSEDDSEDKEDTVISDLLLKTFENIFEPNKKEEPIPDLVPYSPPPKVSAPKAQAAPKPPPAPKAPPAAPDLDSLVNEQLKSKVENVPDLTSDMDSLLASAASLPPVSGALTSPSPPDVDALINEQLKSKVEDAPDLTGDMDSLLASASDILSASGTLTAPSSSTPDIDSLVAEQLTSRVDNMPDLTGDISSLLSSMPAEPSLEPSLAAGYSFPSITFPPVPVSGTPNPPSSPTTPDIDALINEQLKSKVEDVPDLTGDISSLLASNTISSPNPPDLDALINEQLTPKMENLPDLTGDIDSLLASAPAVGTEPELMPYVPPTDNADPALAQKPTMTLAELYMDQGLPQKAAAGL

SEQ ID NO: 50655 - DNA, 669 bp, Unknown
  Obtained from environmental sample
  misc_feature (1)..(669): n is a, c, g, or t
atgaggaccggttttgcctgtattttctcaggtcctccgggaaccggaaaaacggaaaccgcttatcagatagcgcgtaaaacaggcagggacataatgcttgtaaacatagcggaaaccaaaagcatgtggttcggggaaagcgagaagcgcattaagtcactgtttgaccgctaccgtggtatcgtgaaaaacggcggtcttgcgccaatcttgttatttaatgaagcggacgccgttttgggaaagcgcagggaattgtcgcaatcgcgcagcggtcccgatcaaaccgagaacgcaattcagaatattatccttcaggaaatggaaaatctgaacggcatccttatcgccacaaccaacatgacagttaaccttgacaaggcttttgaacgccgtttcctatataaaattgaatttgaaaaaccaaatacggaatctaaaattcaaatgtggcaaaattttattccaaatcttaatgaagatgacgcggcaaaactcgcgggtaaatatgatttctcaggcggacagatagagaacatagtccgtaaaaataccgtttcctatatcttaaagggaacagagccaaatttatcaattcttgaaagtttttgcaaagaagaaatgctggaaaaaccagttacaagaattgggttctgcagtgaataa

SEQ ID NO: 50656 - protein, 222 aa, Unknown
  Obtained from environmental sample
  DOMAIN (6)...(191): ATPase family associated with various cellular activities (AAA)
  misc_feature (1)..(222): Xaa is any amino acid
MRTGFACIFSGPPGTGKTETAYQIARKTGRDIMLVNIAETKSMWFGESEKRIKSLFDRYRGIVKNGGLAPILLFNEADAVLGKRRELSQSRSGPDQTENAIQNIILQEMENLNGILIATTNMTVNLDKAFERRFLYKIEFEKPNTESKIQMWQNFIPNLNEDDAAKLAGKYDFSGGQIENIVRKNTVSYILKGTEPNLSILESFCKEEMLEKPVTRIGFCSE

SEQ ID NO: 50657 - DNA, 981 bp, Unknown
  Obtained from environmental sample
  misc_feature (1)..(981): n is a, c, g, or t
ttgctcatctcggctatgacggcttttatgggtctatacctcatggattcatttcatgttcttaaggatcaaaccgatacattggaccaaaaaggggtggctcccttgggatatcttgtaagaaccgccgataatgtgcaggaaatgcgcgtacaggctaggggatggaagtttgcgagaaccaacgaggagcgtgcagctagtttaatagggatgaacaaagcacatgcagttgcaacggaattgataaacaagcagattgagctatttcctgctgaagatggaaagcaaggtttaagggacttgcaaaccgtaattgacaagtttaaagaggaaatgcacaattacacgagaagtgctaaagactattatgctgctactgggatatacttggacccatttccgcaaagtatattgaacttaggtgcagagatgagggataaatgcgaaacagcaatagagaaaagaattgatgtgaccgaggagctggttggcaaaatttcagagaaagagaatcaatctatcaccgctaccattaccatttcagccgtggtattgctcatctctatatttcttggtatgaccctgacttcttccatcactaagcccttggacacggttgttgatgttctttccgagattgagaaaggtgatatgaccgcccgtgcccatatggtgcgtagagataggataggcgtgctatccagggcattggatagcttgtccgcgagattgcaaggcatattcagtaacctccgcaatgattcggacatcatcgccggtgcggcagaaaaactttccagcgttagcaagcaggtatctagaactgcggaagaaaacgtgtcgcaaagtacgatagttgcgagtacctctgaacagacagccgcaaacataaatgcaatgtctaacgcancggaagaatctgccgtgaatgtcagtgaatgttgcagatgccccaaacaagatgtcctacaaacatga

SEQ ID NO: 50658 - protein, 326 aa, Unknown
  Obtained from environmental sample
  SIGNAL (1)...(22)
  DOMAIN (178)...(247): HAMP domain
  misc_feature (1)..(326): Xaa is any amino acid
MLISAMTAFMGLYLMDSFHVLKDQTDTLDQKGVAPLGYLVRTADNVQEMRVQARGWKFARTNEERAASLIGMNKAHAVATELINKQIELFPAEDGKQGLRDLQTVIDKFKEEMHNYTRSAKDYYAATGIYLDPFPQSILNLGAEMRDKCETAIEKRIDVTEELVGKISEKENQSITATITISAVVLLISIFLGMTLTSSITKPLDTVVDVLSEIEKGDMTARAHMVRRDRIGVLSRALDSLSARLQGIFSNLRNDSDIIAGAAEKLSSVSKQVSRTAEENVSQSTIVASTSEQTAANINAMSNAXEESAVNVSECCRCPKQDVLQT

SEQ ID NO: 50659 - DNA, 438 bp, Unknown
  Obtained from environmental sample
  misc_feature (1)..(438): n is a, c, g, or t
atgcaggcaactgctcaagttttagacaacgcactaaacaatattggcgtgacaaatttggtaggtcatcgcaaagcctttgtaaattgcagctacgaccttttagtgagtgagatactatacattcttgaccctaaaatctttgttttagaagttttggaagcagtgcacatagacgaaagagtagtaggagccataaaagacttccgtgaaaaaggctataccattgccatagacgattttgtgccaagcattgaggaattcgaacgtattttgccaattctcccatacacaaacattgtaaaactggaataccctccaattcctcttggagatatagaaaagaccgttaaatctcttcatcagaagggaataaaagttctcgcagaaaaaattgaaaccgaagtggattttaatatatgcagagccgcagactga

SEQ ID NO: 50660 - protein, 145 aa, Unknown
  Obtained from environmental sample
  misc_feature (1)..(145): Xaa is any amino acid
MQATAQVLDNALNNIGVTNLVGHRKAFVNCSYDLLVSEILYILDPKIFVLEVLEAVHIDERVVGAIKDFREKGYTIAIDDFVPSIEEFERILPILPYTNIVKLEYPPIPLGDIEKTVKSLHQKGIKVLAEKIETEVDFNICRAAD

SEQ ID NO: 50661 - DNA, 702 bp, Unknown
  Obtained from environmental sample
  misc_feature (1)..(702): n is a, c, g, or t
ttgcccaactacaaaggagccgcgctgacggagcttaagcagataattgacgaagaaatcatcaaggaccgcctccaggctgtaagggaggatgcggccaagttggtacccattgaagaaggggccgagatcggccacattgttaccttggacataaaaaccaagccgcaagggatgaaggccaagtatttctatgaccagaagatcatcttgaaagagggtcagccctttgacaccgaaattttgggcttgaaagtagatggtcacaaaaaattcaccatccagatgccccaaaatgatacaggcaagaccttggcgggtaagcaggttcattatgaagtatgggtgctggacgtcagatcgaaggccctgcccgaacttaacgatgaatttgccaaggatttgggcaagcatgaaaacttgcagggcctgatggacgaaattcgcaaagagtgcgaagaattggtggaggccgaggcgaccgcccgcttgcagagcgaccttttggaccaactgctggacgcttccacatttgaggtgccaggcagcatggtcaatttgcagcttgacgattattgccgcgagtttatggacaccttggccaggcgcggcgtccgccccaggcaggtcaattgggcagcatactggcggcaccatttggtggaacccaaaaagggccgtgccggactgggtatctgttga

SEQ ID NO: 50662 - protein, 233 aa, Unknown
  Obtained from environmental sample
  misc_feature (1)..(233): Xaa is any amino acid
MPNYKGAALTELKQIIDEEIIKDRLQAVREDAAKLVPIEEGAEIGHIVTLDIKTKPQGMKAKYFYDQKIILKEGQPFDTEILGLKVDGHKKFTIQMPQNDTGKTLAGKQVHYEVWVLDVRSKALPELNDEFAKDLGKHENLQGLMDEIRKECEELVEAEATARLQSDLLDQLLDASTFEVPGSMVNLQLDDYCREFMDTLARRGVRPRQVNWAAYWRHHLVEPKKGRAGLGIC

SEQ ID NO: 50663 - DNA, 561 bp, Unknown
  Obtained from environmental sample
  misc_feature (1)..(561): n is a, c, g, or t
gtgcccacaacaaagtattggagccgctatttgagcctttaccaattaggttttggaagcgaccgtggaataggctaccgcgattcaagtcaggatttgctcggcgttatgagccacatgcccgaagaagcctgtttgctcgcagaaaatctgctctccgttcaattggaagacggcaatgccatgcaccagtattttccaagcacaatggaggcaaacgaaggcgattcccgcgaaaaggaagaccgcccaaaatactatggcgatgaccatctgtggattgtgctgacggttgcgtcttatttaaaggaaactggaaatttgaaattcctaagcaagccaattcccttttacaacaagaaaaaagatattaagcatagggaaaaaggttcggtgttggaacatttgaagcgcagccttgcattcacctggaaagaccgtggcactcatggcattccgcatcttggctttgcagattggaacgatacagttaatttgccgacaggagcggaatcccttttcaacgcaagccttttaacaaaattcctagctagaagatga

SEQ ID NO: 50664 - protein, 186 aa, Unknown
  Obtained from environmental sample
  misc_feature (1)..(186): Xaa is any amino acid
MPTTKYWSRYLSLYQLGFGSDRGIGYRDSSQDLLGVMSHMPEEACLLAENLLSVQLEDGNAMHQYFPSTMEANEGDSREKEDRPKYYGDDHLWIVLTVASYLKETGNLKFLSKPIPFYNKKKDIKHREKGSVLEHLKRSLAFTWKDRGTHGIPHLGFADWNDTVNLPTGAESLFNASLLTKFLARR

SEQ ID NO: 50665 - DNA, 738 bp, Unknown
  Obtained from environmental sample
  misc_feature (1)..(738): n is a, c, g, or t
atgatacgttctctccttttaatcgcattaatggcagtcctctcctttgccgccgccccagcttcagctccattgtctgttaaagatggtaaaattgtggacaaaagcggcaacccctttgtgctacgcggtatgagcctgttctggaataaatggtcagaaggttcaaagtactacgttgagagtaccgttaccacccttaaagcctctccttggaatgcaaatgttattagagttgcagcgggcaaagataatgatgtaaatggcaattatgatgatgtcaaaaaatttatggattggacttggaatgccgggatttatgttattgcggattggcacgctcacaccttacagcaaaccgctgcggaggatttttttgataaggtcgcttcttatgcaaaacaacagggctacaaccacgttatttatgagatattcaatgaaccttgcagtggtcaatcccagtgtgggcaaaattatacttgggcgcaaataaaagactattccataaaagttataaagaaaatcagagccaaagatagcaatggtttaatagtggtgggtacgcctagtttttcatccaatataggtgctgcaagagcagaaccaattactggagatgaagccaaaaacatcttatatagcctgcatttttatgcttcggatccaagccatgacacttttaaagggagtcttacagctgcttattggcaaaaatttcccgatttttgcaactga

SEQ ID NO: 50666 - protein, 245 aa, Unknown
  Obtained from environmental sample
  SIGNAL (1)...(23)
  DOMAIN (30)...(245): Cellulase (glycosyl hydrolase family 5)
  misc_feature (1)..(245): Xaa is any amino acid
MIRSLLLIALMAVLSFAAAPASAPLSVKDGKIVDKSGNPFVLRGMSLFWNKWSEGSKYYVESTVTTLKASPWNANVIRVAAGKDNDVNGNYDDVKKFMDWTWNAGIYVIADWHAHTLQQTAAEDFFDKVASYAKQQGYNHVIYEIFNEPCSGQSQCGQNYTWAQIKDYSIKVIKKIRAKDSNGLIVVGTPSFSSNIGAARAEPITGDEAKNILYSLHFYASDPSHDTFKGSLTAAYWQKFPDFCN

SEQ ID NO: 50667 - DNA, 693 bp, Unknown
  Obtained from environmental sample
  misc_feature (1)..(693): n is a, c, g, or t
ttgattcggcacgtaagaggttccaactttcaccataatgaaataagatcactaccgggcgtattttttgagttatcgagattttcaggagctaaggaagctaaaatggagaaaaaaatcactggatataccaccgttgatatatcccaatggcatcgtaaagaacattttgaggcatttcagtcagttgctcaatgtacctataaccagaccgttcagctggatattacggcctttttaaagaccgtaaagaaaaataagcacaagttttatccggcctttattcacattcttgcccgcctgatgaatgctcatccggaatttcgtatggcaatgaaagacggtgagctggtgatatgggatagtgttcacccttgttacaccgttttccatgagcaaactgaaacgttttcatcgctctggagtgaataccacgacgatttccggcagtttctacacatatattcgcaagatgtggcgtgttacggtgaaaacctggcctatttccctaaagggtttattgagaatatgtttttcgtctcagccaatccctgggtgagtttcaccagttttgatttaaacgtggccaatatggacaacttcttcgcccccgttttcaccatgggcaaatattatacgcaaggcgacaaggtgctgatgccgctggcgattcaggttcatcatgcccgttga

SEQ ID NO: 50668 - protein, 230 aa, Unknown
  Obtained from environmental sample
  DOMAIN (41)...(230): Chloramphenicol acetyltransferase
  misc_feature (1)..(230): Xaa is any amino acid
MIRHVRGSNFHHNEIRSLPGVFFELSRFSGAKEAKMEKKITGYTTVDISQWHRKEHFEAFQSVAQCTYNQTVQLDITAFLKTVKKNKHKFYPAFIHILARLMNAHPEFRMAMKDGELVIWDSVHPCYTVFHEQTETFSSLWSEYHDDFRQFLHIYSQDVACYGENLAYFPKGFIENMFFVSANPWVSFTSFDLNVANMDNFFAPVFTMGKYYTQGDKVLMPLAIQVHHAR

SEQ ID NO: 50669 - DNA, 861 bp, Unknown
  Obtained from environmental sample
  misc_feature (1)..(861): n is a, c, g, or t
gtgataataaccggtgaaacggccaggaaagagaagagcgaatccgccattaataccctcagcggctttgccggggattttgtggtagccacagccggaagcgaccttgagtcgatcctggcgggcaggggcgcggggacggctgatatgtcgcgtaacgtttgggacaaggccctggtcaatctggatattggcgggggtaccaccaatatcggggttttcaggcttggcgctccggcagatacgagttgcctggatatagggggaaggcagattatcatagacccaaaaacaaatactttgacctatgtcgcggaaaaaatgaaaaccctgggcaaacgcatgggtataggccttgctgagggacggattgccgctcatagcgacatagaaaggctctgcacccggctagcggagatcttcgccgaatccatcgggcttgccccggcctcggaggatttggagctttttataaccgcccatcccctgcgttcgcaatggcaattcgccgggcttacctattcaggcggcgtggcggattttatctacaatgaatatgatccgggggggaacccctacccttacggtgatataggcgccgttctgggaaaccggatccgcgtctgccctgttttgaaccggatagaaagaatggttcctaaagagactatccgggccacagtggtgggggcaggttccaatgccgtcgatatttccggttccaccatcgcatggagcgacaaatcgatacttcccgtccggaacgtcccgatagttaaaatgactgctgaggatgaaggagacgcctacgggctctttcccggcagggttgccgaaaaaaatcccgtggttcagggatga

SEQ ID NO: 50670 - protein, 286 aa, Unknown
  Obtained from environmental sample
  DOMAIN (1)...(286): Ethanolamine utilisation protein EutA
  misc_feature (1)..(286): Xaa is any amino acid
MIITGETARKEKSESAINTLSGFAGDFVVATAGSDLESILAGRGAGTADMSRNVWDKALVNLDIGGGTTNIGVFRLGAPADTSCLDIGGRQIIIDPKTNTLTYVAEKMKTLGKRMGIGLAEGRIAAHSDIERLCTRLAEIFAESIGLAPASEDLELFITAHPLRSQWQFAGLTYSGGVADFIYNEYDPGGNPYPYGDIGAVLGNRIRVCPVLNRIERMVPKETIRATVVGAGSNAVDISGSTIAWSDKSILPVRNVPIVKMTAEDEGDAYGLFPGRVAEKNPVVQG

SEQ ID NO: 50671 - DNA, 603 bp, Unknown
  Obtained from environmental sample
  misc_feature (1)..(603): n is a, c, g, or t
atgatcctgacgcttcaccacgagaccccccagcagcgccatttggagcgcgtggccgaggttttgcagagagacggcgtgatagcctatccgacggacaccctgttcggccttggctgcctggcgagcaggaaaaagggctttgaaaggatactcacaatcaaggggcgggacagaaagcgacccatgagcatcctctgctccgacatggaaatgctctgccgctacatgttccacctggacacacccacgttccgcgttctcaggcagatattccccggcccctacaccgcggtgctgccagcaagccgcgaagtcccgcgccacctgcaaaacaagcagacggtgggtctgcgcgtgccggaccacatcttctgcacggccatcaccaaaatgcttggggagcccatcatcaccaccagttgccaccgcgcgggagagccgcccatgcagacggcctgggagatagacgacgaaatagggcacgttctggacatggtgatagactgcggcgtgcccgagggcacggccagcaccatcctggacttcaccaccgaaccggcgtcggtcataagggagggcgcgggccagtggccaatttga

SEQ ID NO: 50672 - protein, 200 aa, Unknown
  Obtained from environmental sample
  DOMAIN (19)...(194): yrdC domain
  misc_feature (1)..(200): Xaa is any amino acid
MILTLHHETPQQRHLERVAEVLQRDGVIAYPTDTLFGLGCLASRKKGFERILTIKGRDRKRPMSILCSDMEMLCRYMFHLDTPTFRVLRQIFPGPYTAVLPASREVPRHLQNKQTVGLRVPDHIFCTAITKMLGEPIITTSCHRAGEPPMQTAWEIDDEIGHVLDMVIDCGVPEGTASTILDFTTEPASVIREGAGQWPI

SEQ ID NO: 50673 - DNA, 549 bp, Unknown
  Obtained from environmental sample
  misc_feature (1)..(549): n is a, c, g, or t
gtggggggacaacaaccggggccagctcggcataggcgacaccacgagccgcagcttccctctcctcgtgggcacgccaagcggccaggcgaccgcgcctggcgccgacgccaactagcaaccagcatttccatggagcgtcaaatgaccaagaccaagcacatcatcaatacgctggtggccgcattcgcgctggccatgctcttccccgccatttcctgcggcggcgggggcggcggcaggaacaataatgtagttgaccagatcaaggtcacgggcgtgagcgtcgcgcccaccgaaatgatcctgaaggagggggacagcgggtggatatcccacaccatcgcgcccagcaacgccctcgtgaaggacatctcgtggaagagcgacagggaggccgtggcgacggttggccaggacggccgcgtggaaggcaagtcggaaggcacggccaccataaccgttaccacgaaggacggcggtttcacagccacctgcagggtgacagtgtccacaaaccatcgtgcccgtcacaggtgtctcgcttaa

SEQ ID NO: 50674 - protein, 182 aa, Unknown
  Obtained from environmental sample
  DOMAIN (90)...(168): Bacterial Ig-like domain (group 2)
  misc_feature (1)..(182): Xaa is any amino acid
MGGQQPGPARHRRHHEPQLPSPRGHAKRPGDRAWRRRQLATSISMERQMTKTKHIINTLVAAFALAMLFPAISCGGGGGGRNNNVVDQIKVTGVSVAPTEMILKEGDSGWISHTIAPSNALVKDISWKSDREAVATVGQDGRVEGKSEGTATITVTTKDGGFTATCRVTVSTNHRARHRCLA

SEQ ID NO: 50675 - DNA, 912 bp, Unknown
  Obtained from environmental sample
  misc_feature (1)..(912): n is a, c, g, or t
ttgcctctgaagtggttctgcttgactccggcgaaaggacggacaggcggggcaacaggagaaacgccttccctgcggccgcgccttgccgacatcgccaggcattgcaacgagtattacaaaaagcgcctgaacaaggagacgggtcttctgcgtcagcgcaactacgccgacaagaaccggctggatcgcctggaagacttgcttcgcgcccttgcggacagcctggatcagggcaaggcttttctcgtgcggctgggacgctatggcggcgcggaggacaaaaccatcgccggcttggcgcggatcaagattttgggcggcaaggacaagccgccgtccgtccgggaggagacaagcaccctctggctggcggcggagcgggaaaaacagccggatggccttgtgcccttcggctgggccttggtggaaatagacccgcaggaagaatgcgcgcctttgcggcaatggtgtgaagaggaacgccggggcaggccggatatgcggcttgtgcatgaaaaggcggcagcggaaagatcgcgcatccttgccgcgcaggccgaggcggaacggctcgaagccgagcgtcagacccggatgcgggcggaacaggaggcgcgggagcgggcggagcgggagcaggccgccctgagtcccgagcagcgccgtgtgcgggacttttgccgcaaactggcagcgcatcctcccttgaaagcgaaagacgccggagccgccattctgggcgaatgcgccgcgttttttgagtccgcgtttacctggcctgtcgcggaacagcggcagtgcgccgatctgcttgcccccctgctgaaagaaaaaaacatgtttttgggcaaacgggagaaagcgttcaaagacgcattgaaacgcctgagcggccacgttcatggctga

SEQ ID NO: 50676 - protein, 303 aa, Unknown
  Obtained from environmental sample
  misc_feature (1)..(303): Xaa is any amino acid
MPLKWFCLTPAKGRTGGATGETPSLRPRLADIARHCNEYYKKRLNKETGLLRQRNYADKNRLDRLEDLLRALADSLDQGKAFLVRLGRYGGAEDKTIAGLARIKILGGKDKPPSVREETSTLWLAAEREKQPDGLVPFGWALVEIDPQEECAPLRQWCEEERRGRPDMRLVHEKAAAERSRILAAQAEAERLEAERQTRMRAEQEARERAEREQAALSPEQRRVRDFCRKLAAHPPLKAKDAGAAILGECAAFFESAFTWPVAEQRQCADLLAPLLKEKNMFLGKREKAFKDALKRLSGHVHG

SEQ ID NO: 50677 - DNA, 894 bp, Unknown
  Obtained from environmental sample
  misc_feature (1)..(894): n is a, c, g, or t
atgcgcatccggcaggaagtgatcctgggtatcggcggcgccgaaatgcttgacctgctcggctacaaagacctcaagacctatcatatgaacgagggtcacgcggcctttttgacctttgaattgctggcgcggttggaatggaaaaactcggcggtgcgccagcattgtgtctttacgacgcacactccggtgccggccggtcacgatgaatttgattatgagctggtgcaccgggtgatgggcgcctatactccttggcacgtgcacgatattgccggcaaagaccggctcaatatgaccgtgctggcgttgaatatgagccgttatgccaacggcgtggctaaaaaacacggcgaggtgtcgcgcctgatgttcccggattttaatattgattcgattaccaacggggtgcattccgtaacctggacggctccggcttttcaggagttgtatgataaatatattccgcaatggaggcaggacccggaaaaactggccggggcggataaaatccccgccgcagaaattcagtcggcgcatttgaccgagaaaaacaaactgctggcttacatccgggaaaaaaccggcgaggaatttgcgccggatattttgactatcggttttgcccggcgggcggcgacctacaaacgcggtgatttgcttttcacggatatcgagcggttggtgcggatttgttccggcaaggtgcagtttgtttttgcgggcaaagcccacccgcgcgatctgcccggcaaagaagttatccggcgcattgttcagatcgcggtcaaactgcgcgccgaacataaactccgggtcgtggtttttggaaggattaccaaatgccggctgggcgctctggctgaacgccccgtgtggatgtctggctga

SEQ ID NO: 50678 - protein, 297 aa, Unknown
  Obtained from environmental sample
  misc_feature (1)..(297): Xaa is any amino acid
MRIRQEVILGIGGAEMLDLLGYKDLKTYHMNEGHAAFLTFELLARLEWKNSAVRQHCVFTTHTPVPAGHDEFDYELVHRVMGAYTPWHVHDIAGKDRLNMTVLALNMSRYANGVAKKHGEVSRLMFPDFNIDSITNGVHSVTWTAPAFQELYDKYIPQWRQDPEKLAGADKIPAAEIQSAHLTEKNKLLAYIREKTGEEFAPDILTIGFARRAATYKRGDLLFTDIERLVRICSGKVQFVFAGKAHPRDLPGKEVIRRIVQIAVKLRAEHKLRVVVFGRITKCRLGALAERPVWMSG

SEQ ID NO: 50679 - DNA, 753 bp, Unknown
  Obtained from environmental sample
  misc_feature (1)..(753): n is a, c, g, or t
atgccccgtgcacacaccattatgtggctccggcctcacatcaagaggaatttttcggacttcttaaaaccatacggtcttgactatgacagcgagcctgataaagactacaatccagtcatggcggcaaagagcaattacatccttcgctcaaagatttccgaggccaaattcaggcagttcgccaggctgttctgcgtggacctgaacgccacccagatggcacaagtgacgggcctcaaccgcaacaccgtcaacaggctcctgcatgggctgcgggagcggatggccgccgcctgtgaggacgggtcgcccgtgaagggcgaggtggagttggacgagtcctacttcggggcaaggagggtcaggggaaagagggggcgcggcgcatcgggcaagaccgtcgtcttcggcatctccaagagggagggcggcgtgtacacggagcgtagtcccagactgctccagggcgacgctccagggggtcatcagggggcgcatagacccggagagcgtcgtccactcagacggatgggccggctacaacgggcttgtggacatgggctacaagaagcactacagggtcatgcacggggcgaacgagttcgccagggggcggtgccacatcaacggcatggagagcttctggggctacgccaagaccaggctcgcgcgcttcaggggcctgcgcaaagaaaacttcctgctacacttgaaggagtgcgagttcaggttcaaccaccggcacgatga

SEQ ID NO: 50680 - protein, 250 aa, Unknown
  Obtained from environmental sample
  misc_feature (1)..(250): Xaa is any amino acid
MPRAHTIMWLRPHIKRNFSDFLKPYGLDYDSEPDKDYNPVMAAKSNYILRSKISEAKFRQFARLFCVDLNATQMAQVTGLNRNTVNRLLHGLRERMAAACEDGSPVKGEVELDESYFGARRVRGKRGRGASGKTVVFGISKREGGVYTERSPRLLQGDAPGGHQGAHRPGERRPLRRMGRLQRACGHGLQEALQGHARGERVRQGAVPHQRHGELLGLRQDQARALQGPAQRKLPATLEGVRVQVQPPAR

SEQ ID NO: 50681 - DNA, 411 bp, Unknown
  Obtained from environmental sample
  misc_feature (1)..(411): n is a, c, g, or t
gtggagaaaaaaatgaatatgtcagatgtgatagcgaaagctaaggaagctgccgagaaagctgcggcggaaaaagccgctcagacgaatccgggagtacaagtgcccaacataccaaggcccgtacccaatccaaatacaatactgtctcgcgccgaggtggaggcaatcatcgataacatggcaaggcagaagaacatgcagcacgccagatggtcggtttcgatagtcgatcttatggcagttttgggcatgaacagcagtcttggcgcacgtgcggcgcttgccgccaagctgggctattccggtcgtgacccagacggttccgccgaaaagaatttgtggattcacgcggagttgttaaaagtccttgcccaaaacggaggcagggtgccaccgaacctgttctag

SEQ ID NO: 50682 - protein, 136 aa, Unknown
  Obtained from environmental sample
  misc_feature (1)..(136): Xaa is any amino acid
MEKKMNMSDVIAKAKEAAEKAAAEKAAQTNPGVQVPNIPRPVPNPNTILSRAEVEAIIDNMARQKNMQHARWSVSIVDLMAVLGMNSSLGARAALAAKLGYSGRDPDGSAEKNLWIHAELLKVLAQNGGRVPPNLF

SEQ ID NO: 50683 - DNA, 603 bp, Unknown
  Obtained from environmental sample
  misc_feature (1)..(603): n is a, c, g, or t
atgccagccaagcgcaaatacaaagattcggtttttacttccttgttcaaagacaaaaagcgtctgctggaattatacaatgcgatagaaggaacttcctacaaggatcctaacataataaccataaacacactggaaggcgttctgttcgcaaataggcaaaacgatatatctttcacaataggtggcaaattggttgtgctcatagagcatcaatctagcgtaaatgaaaacatgcctttgcgttttttgatatatgtttctaaggtgtatgaaaagataatagatcccaaaggcatttacaagcaaagcttgataaaaatcccaagacccgaattcatagttctatacaacggcgtagaaaaatacccaagagaaaaaatattaaaactttcagacgcattcgagcaaataggcataaagaaagctcctgagctggaattgtcagtccgcgtgcttaacataaacaagggtcacaacccgaagcttgagcaaaggagcaagaacttggcaggttattccgcttttgtagcaaaggttagagaatttcagtctaatggtaaacccttgaaagaagctatagaaagtgcagtccgttattga

SEQ ID NO: 50684 - protein, 200 aa, Unknown
  Obtained from environmental sample
  misc_feature (1)..(200): Xaa is any amino acid
MPAKRKYKDSVFTSLFKDKKRLLELYNAIEGTSYKDPNIITINTLEGVLFANRQNDISFTIGGKLVVLIEHQSSVNENMPLRFLIYVSKVYEKIIDPKGIYKQSLIKIPRPEFIVLYNGVEKYPREKILKLSDAFEQIGIKKAPELELSVRVLNINKGHNPKLEQRSKNLAGYSAFVAKVREFQSNGKPLKEAIESAVRY

SEQ ID NO: 50685 - DNA, 735 bp, Unknown
  Obtained from environmental sample
  misc_feature (1)..(735): n is a, c, g, or t
gtgtttccattgaaatttaaataccttataattgcttttagcatacttatcgttctttttctattaataacggctctactgccggtatttacccagaatccggcatataccgtgaatttacgaaatatggtgtctcctttattgatcctcatgtcggtagtccttatatgttttggcatatttttccttgttaattatcggctgtttttgcttctggaaagagaggattggcccgctttagcctattatttggaacaaaaaatttttgttaaaaacaaatataatagccggtatgtaaggcttttagccagttcttacatggttatttccgattatgcctctgtaattaaactggaaaacaaggctctttctgttaaaaaatccgttgtggagaaaaatgtcctgattttcggatctgccagggtaattaacggtgattataaaggggcggcggacttttttaaaacgcagcttgaaaacggcaaattgaataaaccggacatggaatgggttcgctggttttacggtttttcatgcttacttgagagcgcttttgacaaggctgagcaggaatttatgtctatggctgtttcttcgggcgacgcccttataaccggtgtttcggcttatttccttacagttaatctggcaaataaatcattaaaaaggcaggattgtttaactgccgccgcacaccggccgcaaacgggtgacgaaaatgctgaaaacccttaa

SEQ ID NO: 50686 - protein, 244 aa, Unknown
  Obtained from environmental sample
  SIGNAL (1)...(25)
  misc_feature (1)..(244): Xaa is any amino acid
MFPLKFKYLIIAFSILIVLFLLITALLPVFTQNPAYTVNLRNMVSPLLILMSVVLICFGIFFLVNYRLFLLLEREDWPALAYYLEQKIFVKNKYNSRYVRLLASSYMVISDYASVIKLENKALSVKKSVVEKNVLIFGSARVINGDYKGAADFFKTQLENGKLNKPDMEWVRWFYGFSCLLESAFDKAEQEFMSMAVSSGDALITGVSAYFLTVNLANKSLKRQDCLTAAAHRPQTGDENAENP

SEQ ID NO: 50687 - DNA, 1002 bp, Unknown
  Obtained from environmental sample
  misc_feature (1)..(1002): n is a, c, g, or t
atgcacaaggcggtttttcagacttcggagcggggcgtaattgccgacaataaggcggtaaacgccggcaggagtttccaatgggcaagggaatacgattccgaatttgaaagggacggtcttggacgcatcaccattgacaagaaatattatatgcctgttgtgcgtgatgttccggttttccccggcagagaaatcaaaccgggcgagaaatggatctatgaagggcacgaagtgcatgatttccgcgaaggttttgggatacaggaaccgtatcgaattccttttacggcaaactatgtttatctgggtcaccgatcctggaaaggaaagctttacccgacattttcggtaaactaccggattaattcaacaccacgggccttcaggggcagagtatggccggtaaagatcactgcggagtcggatcagacggtgttttgggataacaacatggggcagccggttgcgtataacgaaaatttccggtacatatttgaactgtccaacggaagagtatttgaataccgcggcgttgccgaggccgagattatcgaatccgcccgcatggacaaggagcaaatcgccggggatatagctgaggaattacaccgccttgatataccggaagtgtcagtgcgcgttgtggacgagggaataacgatcagcctggacgacatacggttccaggcggattcggccgtaatgcttccgggtgaaaaagagaaacttgataaaatcgttgacatactcaagcgctaccaggagggtgacataatggttggcggacacaccgcccgagtcggttcggaagaaagcagcaggaagctttccgtggaaagggcttccgttgtagcggattacctcattgagaaaaaggcccgcccccaggagcgcgtggtggtacgcggtttcggctccgaaaggccggtggcggacaacggcaccgatgaaggccgccgtaaaaaccgccgggtagagataacaattcttgaaaattag

SEQ ID NO: 50688 - protein, 333 aa, Unknown
  Obtained from environmental sample
  DOMAIN (228)...(324): OmpA family
  misc_feature (1)..(333): Xaa is any amino acid
MHKAVFQTSERGVIADNKAVNAGRSFQWAREYDSEFERDGLGRITIDKKYYMPVVRDVPVFPGREIKPGEKWIYEGHEVHDFREGFGIQEPYRIPFTANYVYLGHRSWKGKLYPTFSVNYRINSTPRAFRGRVWPVKITAESDQTVFWDNNMGQPVAYNENFRYIFELSNGRVFEYRGVAEAEIIESARMDKEQIAGDIAEELHRLDIPEVSVRVVDEGITISLDDIRFQADSAVMLPGEKEKLDKIVDILKRYQEGDIMVGGHTARVGSEESSRKLSVERASVVADYLIEKKARPQERVVVRGFGSERPVADNGTDEGRRKNRRVEITILEN

SEQ ID NO: 50689 - DNA, 612 bp, Unknown
  Obtained from environmental sample
  misc_feature (1)..(612): n is a, c, g, or t
atggataaactcatcatcaagggggcgcgggagcataacctaaaaaacatcgatctggaactgcccagggataaactgatagttgtttcaggactttccggttcaggcaagagctctcttgcttttgacacgattttcgccgaagggcagcggcgttatgtggaaagcctttccgcctacgcccggcagtttttgggacgcatggacaagcccgatctggattacattgaggggctttccccggcgatttctattgagcaaaagaccacccaccgcaatccgcgttccaccgtcggcaccgtcaccgagatttacgattactaccgcctgctctacgcgaggatagggattcccccattgcccgattctgcggcaagggagataacgggagcagcccgtccgatttatttcatagaaaagcatttttacagatggggccgaggggcacaaggggtggcagcttcctcgcggccccgtcatcaaggggaaaaaaaaggggggaaccacctagaaaaattaatttggatggacgccccggccaggggcccgggcttttcatccagaaatcggaaggggtttgaacgggggtggtttcctgtggaagccttgtga

SEQ ID NO: 50690 - protein, 203 aa, Unknown
  Obtained from environmental sample
  misc_feature (1)..(203): Xaa is any amino acid
MDKLIIKGAREHNLKNIDLELPRDKLIVVSGLSGSGKSSLAFDTIFAEGQRRYVESLSAYARQFLGRMDKPDLDYIEGLSPAISIEQKTTHRNPRSTVGTVTEIYDYYRLLYARIGIPPLPDSAAREITGAARPIYFIEKHFYRWGRGAQGVAASSRPRHQGEKKGGNHLEKLIWMDAPARGPGFSSRNRKGFERGWFPVEAL

SEQ ID NO: 50691 - DNA, 405 bp, Unknown
  Obtained from environmental sample
  misc_feature (1)..(405): n is a, c, g, or t
gtggttccccccttttttttccccttgatgacggggccgcgaggaagctgccaccccttgtgcccctcggccccatctgtaaaaatgcttttctatgaaataaatcggacgggctgctcccgttatctcccttgccgcagaatcgggcaatgggggaatccctatcctcgcgtagagcaggcggtagtaatcgtaaatctcggtgacggtgccgacggtggaacgcggattgcggtgggtggtcttttgctcaatagaaatcgccggggaaagcccctcaatgtaatccagatcgggcttgtccatgcgtcccaaaaactgccgggcgtaggcggaaaggctttccacataacgccgctgcccttcggcgaaaatcgtgtcaaaagcaagagagctcttgcctga

SEQ ID NO: 50692 - protein, 134 aa, Unknown
  Obtained from environmental sample
  misc_feature (1)..(134): Xaa is any amino acid
MVPPFFFPLMTGPRGSCHPLCPSAPSVKMLFYEINRTGCSRYLPCRRIGQWGNPYPRVEQAVVIVNLGDGADGGTRIAVGGLLLNRNRRGKPLNVIQIGLVHASQKLPGVGGKAFHITPLPFGENRVKSKRALA

SEQ ID NO: 50693 - DNA, 852 bp, Unknown
  Obtained from environmental sample
  misc_feature (1)..(852): n is a, c, g, or t
ttgagcatgagacatcccacattgagcgatatcgaatacaaaagacgtaagcgcacgaccaagcgtgatgaatttttgcgtatcatgaatgactgtatcccctgggacgaatgggttgcgtatattgttccctattatccgaagggagagcgcgggcgtcctcccatgggcattgaaaaaatgctccggatgtacctgttgcaatgctggttcaacctttccgatgaggggcttgaggacgccatttatgacagctacgccatgcgcacgttcatgggtgtcaacttttttgatgagcaggttcccgatgcaacaactttgctcaaatttcggcatctgctggaaaagcacaacatcggcaaggtattttttgatgccatcaacagggccctcaacgagcgaggacatatgatgcgtggtggaaccattgtggacgcgacgcttataagcgctccgagttcaacgaaaaatgagaagaaagagcgtgaccccgagatgcatcagaccaagaagggcaaccagtggcacttcggcttgaaatgccatgtgggcgttgatgcgggcagcggctatgtgcacagcattgcgacgacagcggccaatgtgtctgacatcacgatggcctggcaactgatccgcgaagacgacgaggtggtgtatggcgattcgggttatcttgggattgagcaccgagaagaagtgaaaagctcgccgagcttgtcaacaaaagcgtatcgcatcaaccgccgtcgccagagcgtccagaggctgcccgaaggcttcattgattgggagcgccatattgagcggcgtaaatcgtccgtgcgcagcaaggtggagcatccattttga

SEQ ID NO: 50694 - protein, 283 aa, Unknown
  Obtained from environmental sample
  DOMAIN (141)...(266): Transposase DDE domain
  misc_feature (1)..(283): Xaa is any amino acid
MSMRHPTLSDIEYKRRKRTTKRDEFLRIMNDCIPWDEWVAYIVPYYPKGERGRPPMGIEKMLRMYLLQCWFNLSDEGLEDAIYDSYAMRTFMGVNFFDEQVPDATTLLKFRHLLEKHNIGKVFFDAINRALNERGHMMRGGTIVDATLISAPSSTKNEKKERDPEMHQTKKGNQWHFGLKCHVGVDAGSGYVHSIATTAANVSDITMAWQLIREDDEVVYGDSGYLGIEHREEVKSSPSLSTKAYRINRRRQSVQRLPEGFIDWERHIERRKSSVRSKVEHPF

SEQ ID NO: 50695 - DNA, 966 bp, Unknown
  Obtained from environmental sample
  misc_feature (1)..(966): n is a, c, g, or t
ttgagcggcgtaataaacatggacgccggcaaaacgcggaagttcaagccaatcaccgaatacatccatgaggcgggaatgaaagttggcattgtgtccaccgtaacgctgaaccacgcgacgcctgcgtcgttctacgcgaaggttccctcgcgaagcgattactacgatattgccgtccagctcgcgaaaagcaattttgactatttcggcggcggttccattcttcagcggacaggaaaaaacaacgatcaattggatgctgttgagatcgctaagaccaacggttttacctatgtcgacacgaaagacggctttaacgctctgaaacccggcagcgggaaagttatcgccataagcccccgcttgcaggatgacggcgcgatgcagtacgagattgaccgaaagccggacgagctttccctcgccgatttcaccagaaaggggctcgagctgttggataacccaaaaggcttttttatgatggttgaaggcggaaaggttgactgggcctgccacgccaatgacgcaggcgcggcaattcacgatgtgcttgcaatggacgccgccattcgcgttgcgcttgatttcgctaagaaccatccaggggaaaccctcatcgtggttacaggcgatcacgagacaggcggccttaccatcggtttttgcggaaccccgtacgacacgttttttgacagggttgccctgcaaaacgcttcttatgtcgcttttgacgacgaggtccttaagcccctacaaggaaaagaacttctctgggcaatgtctacctcgccgatctgctttcggcatttaacgagtcgtttggcattgatttcatttctctttccagcttccagaaagagcaaattgaatttgcctttcaacgttcaatgggtaatgagcagatccgctcttttgccgaagaccaatacntgctctacggcggttatgagccgctcacggtaa

SEQ ID NO: 50696 - protein, 321 aa, Unknown
  Obtained from environmental sample
  DOMAIN (1)...(240): Alkaline phosphatase
  misc_feature (1)..(321): Xaa is any amino acid
MSGVINMDAGKTRKFKPITEYIHEAGMKVGIVSTVTLNHATPASFYAKVPSRSDYYDIAVQLAKSNFDYFGGGSILQRTGKNNDQLDAVEIAKTNGFTYVDTKDGFNALKPGSGKVIAISPRLQDDGAMQYEIDRKPDELSLADFTRKGLELLDNPKGFFMMVEGGKVDWACHANDAGAAIHDVLAMDAAIRVALDFAKNHPGETLIVVTGDHETGGLTIGFCGTPYDTFFDRVALQNASYVAFDDEVLKPLQGKELLWAMSTSPICFRHLTSRLALISFLFPASRKSKLNLPFNVQWVMSRSALLPKTNTCSTAVMSRSR

SEQ ID NO: 50697 - DNA, 744 bp, Unknown
  Obtained from environmental sample
  misc_feature (1)..(744): n is a, c, g, or t
atgctgtttcgcgaaaaacttgggcgtaacatcgacgatctttgggtttcccagcccgataacggcgaacaggcgatggaaatcaccgaaagccttgtccgttcaggcgcggtggacgtaattgtcgtggactcggtagcggcgcttaccccgcaatcggaaatcgagggcgaaatgggggacgcgcaaatgggagcgcaggctcgtttaatgagtcaggctctgcgcaaacttacggcgactatcggcgaatcacgcacaattttaattttcatcaaccaaatccgcatgaagatcggcgtctttttcggcaaccccgaaaccaccacaggcggcaacgctttaaaattttattcgtcgttacggcttgaagtgcgtaaaactgaaacaatcgaggtcagcaaggacgcggacgctatctgcagcagggtgcgcgttaaagttgtaaaaaacaaagtacctccgccgatcagaaaaacggaaatagaattgatattcggcaaaggtatttcggcgacaggcagtattttagattgcgcggtaaagtacgatattatcaaaaaaagcggcgcttggtattcctacaacgaggagaaaatagggcagggcagggacaacacaagagagtaccttgaacaacaccccgattttacaaaagacttggaagcaaaattaagagcgcatattttcccggacagagaaccgcctaaagcaaccgcaccgcagaacagccggaagggctaa

SEQ ID NO: 50698 - protein, 247 aa, Unknown
  Obtained from environmental sample
  DOMAIN (1)...(231): recA bacterial DNA recombination protein
  misc_feature (1)..(247): Xaa is any amino acid
MLFREKLGRNIDDLWVSQPDNGEQAMEITESLVRSGAVDVIVVDSVAALTPQSEIEGEMGDAQMGAQARLMSQALRKLTATIGESRTILIFINQIRMKIGVFFGNPETTTGGNALKFYSSLRLEVRKTETIEVSKDADAICSRVRVKVVKNKVPPPIRKTEIELIFGKGISATGSILDCAVKYDIIKKSGAWYSYNEEKIGQGRDNTREYLEQHPDFTKDLEAKLRAHIFPDREPPKATAPQNSRKG

SEQ ID NO: 50699 - DNA, 642 bp, Unknown
  Obtained from environmental sample
  misc_feature (1)..(642): n is a, c, g, or t
ttgccttttatcgcggatctgccgcaggggcaaaagacaggattttttcttgatcaaagagataaccacctgcttacaggcaaatatgccgccatgctgcaaaaagaggcgggaacaaacctgcgtatccttgacgcctgctcttacacaggcggttttggccttcacgcgctgggcgccgggggaaggctcaccatgcttgatacgtcgcaggcggcgcttgaaacggcgcgaagaaacgccgcactgcacggagcagaagatcgcgtaacaacagttgaagccaatgtttttgacgaattgcgtaatttagcgcggcgcaaagagcagtttgacatggtaatactcgatccacccgcctttgcaaagtcgcgaagttctcttgaagaagccctgcgcggctacaaggaaataaatctgcgcgcaataaaacttatccgtcccggcggcgtctttataacctgctcatgcagtcaggcggcagatgaaatcctctttaagcgcatgataaccgaagccgccgcggacgcgcagcgccaccttgtacagcttgatttccgctttcaggcgcaggatcatccggtacttgtcggctataacgagtcgttatatctaaagtgcggtttttatcgggtaatttaa

SEQ ID NO: 50700 - protein, 213 aa, Unknown
  Obtained from environmental sample
  DOMAIN (19)...(183): Conserved hypothetical protein 95
  misc_feature (1)..(213): Xaa is any amino acid
MPFIADLPQGQKTGFFLDQRDNHLLTGKYAAMLQKEAGTNLRILDACSYTGGFGLHALGAGGRLTMLDTSQAALETARRNAALHGAEDRVTTVEANVFDELRNLARRKEQFDMVILDPPAFAKSRSSLEEALRGYKEINLRAIKLIRPGGVFITCSCSQAADEILFKRMITEAAADAQRHLVQLDFRFQAQDHPVLVGYNESLYLKCGFYRVI

SEQ ID NO: 50701 - DNA, 573 bp, Unknown
  Obtained from environmental sample
  misc_feature (1)..(573): n is a, c, g, or t
ttggctttacccgagctttatttgggcgtacatttcccatccgatctcttagccggctggggcgtgggcgctataatccttcttttaatgtatggcttaagccagctttttaaaaaacactgtttcaataaacatttaatcggtcaaacacgctcgcaaaacattctggcggccattttgacgcttgtcatgatcagcatttatcccggcgacagatccctccccgccgttttcctgggcttctgccttggctacaacataatgaaaaagaatttcccctttagcccatatagcgaaataaaagaaaaaaaactttcggttatgctgttacgctgcattacaggctttgcgggccttgttgtcatttactttgtactgaggctgctatttcccggcgaggggagcctttttaattatgtttctctgtggggcgaggcttccccgttttacgagctggggcgctttatccgctacggcgtggtcgggctttgggcgtccgctggagccccgatgatttttcagcgcatggggctttctttcgcggcgagtaagagtgaagaacccaaaaaatga

SEQ ID NO: 50702 - protein, 190 aa, Unknown
  Obtained from environmental sample
  misc_feature (1)..(190): Xaa is any amino acid
MALPELYLGVHFPSDLLAGWGVGAIILLLMYGLSQLFKKHCFNKHLIGQTRSQNILAAILTLVMISIYPGDRSLPAVFLGFCLGYNIMKKNFPFSPYSEIKEKKLSVMLLRCITGFAGLVVIYFVLRLLFPGEGSLFNYVSLWGEASPFYELGRFIRYGVVGLWASAGAPMIFQRMGLSFAASKSEEPKK

SEQ ID NO: 50703 - DNA, 582 bp, Unknown
  Obtained from environmental sample
  misc_feature (1)..(582): n is a, c, g, or t
atggagacaaggttatattcaaatgttttctgcggaaaatacgcaactcatgccggggattctcatgtggggaatcgaggtaatcagggtaattcaaagggagggggagccctgcccctgacggcggtactgaaacttgttacagagctgggaaccgacaaattttatcttccggcaattctattcattttatggtggattgatgaaaagaagggcttccgcctgggaatccttatgcttttatccgcgtgggtaaatacctttttaaaatatactttcaaacagccccggccttttaatctggatccgtctttgggcttggcttacgaagggacttatggcgcaccatcagggcacgcccagtacgcggtttctttttgggttccgactggccgcttggcttgccgggggaaagcctggccgcaagcgtatcgttgtatgggcctcggcaccctttttgttctattgattggctttacccgagctttatttgggcgtacatttcccatccgatctcttagccggctggggcgtgggcgctataatccttcttttaatgtatggcttaagccagctttttaa

SEQ ID NO: 50704 - protein, 193 aa, Unknown
  Obtained from environmental sample
  DOMAIN (71)...(174): PAP2 superfamily
  misc_feature (1)..(193): Xaa is any amino acid
METRLYSNVFCGKYATHAGDSHVGNRGNQGNSKGGGALPLTAVLKLVTELGTDKFYLPAILFILWWIDEKKGFRLGILMLLSAWVNTFLKYTFKQPRPFNLDPSLGLAYEGTYGAPSGHAQYAVSFWVPTGRLACRGKAWPQAYRCMGLGTLFVLLIGFTRALFGRTFPIRSLSRLGRGRYNPSFNVWLKPAF

SEQ ID NO: 50705 - DNA, 432 bp, Unknown
  Obtained from environmental sample
  misc_feature (1)..(432): n is a, c, g, or t
ttggaagcaaaactaattagacgtcttgaagattttcttctggaattgggcagaggattcatgttcgtgggaagccaacagcgaatcacgctgggaaatatccattattatgtggacatggttttttataacaaggttcttaaagcttatgtgttgatcgatctaaaaaccggggatttaaaacctgaatatgtgggacagatgaatgcctatctcaattattacaagactgaagtaaacgatgctggagataatgctccggttgggatcatcttgtgcaggaatcaaaaggattttgtcgctgaatacgccttaggtggattaagcaatcaggtttttgcggcaaactatgtatactacatccccgctaaagaacagttaatagcggaagttaaaactttgctggaaaaggaagaagaaccctatgcctga

SEQ ID NO: 50706 - protein, 143 aa, Unknown
  Obtained from environmental sample
  DOMAIN (1)...(134): Protein of unknown function (DUF1016)
  misc_feature (1)..(143): Xaa is any amino acid
MEAKLIRRLEDFLLELGRGFMFVGSQQRITLGNIHYYVDMVFYNKVLKAYVLIDLKTGDLKPEYVGQMNAYLNYYKTEVNDAGDNAPVGIILCRNQKDFVAEYALGGLSNQVFAANYVYYIPAKEQLIAEVKTLLEKEEEPYA

SEQ ID NO: 50707 - DNA, 804 bp, Unknown
  Obtained from environmental sample
  misc_feature (1)..(804): n is a, c, g, or t
atgcaaatattcaattttttaaagcaaaaggtacctttatatgtatgggtgcctttattgacctttgtcgtgtttgcgcctgcgattatcttaggtcctaaatatttaattacagtgttgctcgcaagttcttttgtttttattttaattctttttgtcaacgcaaaaagcaagcaaaaagctattgaaaaaaaactagaagaatcaaataaatcacttagcattttaacaaacatactaggcagttcagatgcactgatatacataactgttccagatactggagaaattctttttataaatgaacgagcaaaagaacgttatgcaattaaaggcaactgcgtagggctactctgttataaagttttgcaaaatggaatggaacagatgtgcgatttttgcccctgccgcaaattagaaaaaaatcccaagggagttattgtatgggaagagcgcagcaatttgacaaaacgcgtatatcgcaatacagacagatacatagaatggcataacggcaaaactgttcatattcagtattccacagatatcacagagttggtatcctcaagagaacttgctgaacagaacaaccgcaacaaaaatttattcttatcccgcatgagctacgaaattcgctctcctatgaacgttattctcggaacaagcgaaactcagcagcacgaccaaacgctagagttcaaagtaagagatgcgtttgcaatgataaataattctgcgcatctattgttcaacaccgtaaactccacgctagacctatttaaaatggaatcgggaaaggaatga

SEQ ID NO: 50708 - protein, 267 aa, Unknown
  Obtained from environmental sample
  DOMAIN (199)...(265): His Kinase A (phosphoacceptor) domain
  misc_feature (1)..(267): Xaa is any amino acid
MQIFNFLKQKVPLYVWVPLLTFVVFAPAIILGPKYLITVLLASSFVFILILFVNAKSKQKAIEKKLEESNKSLSILTNILGSSDALIYITVPDTGEILFINERAKERYAIKGNCVGLLCYKVLQNGMEQMCDFCPCRKLEKNPKGVIVWEERSNLTKRVYRNTDRYIEWHNGKTVHIQYSTDITELVSSRELAEQNNRNKNLFLSRMSYEIRSPMNVILGTSETQQHDQTLEFKVRDAFAMINNSAHLLFNTVNSTLDLFKMESGKE

SEQ ID NO: 50709 - DNA, 495 bp, Unknown
  Obtained from environmental sample
  misc_feature (1)..(495): n is a, c, g, or t
atggaagaaaatttagagaaaaacgaggtatcggaagaagtagataggcttgtggaagaggctgaaagcacctcagtagaggaaattgcaaaagaggcaaatatagcagaggcacaagaaaaagagagaattgctcaagataaatacttgaggctttttgcagagtttgaaaattaccgtatgcgctcggcaaaagagcaactggagttgataagcacggccaatggtaagcttttggaaaagctcgccgatgttaaggataattttgaccgagcctttgccgaagagaacaaaacaggagatttagcggcatttgaaaagggaattaagttgatacaagagcagtttaacaaggttttaagcgattttgggttagaaaccatagatccctccggagaggcatttgatccaaatatgcacgaggcacttatgaagcagccttctgaaaatgttgaagaaggcaaaatcattcaagtgtatcaaaacgggttataa

SEQ ID NO: 50710 - protein, 164 aa, Unknown
  Obtained from environmental sample
  DOMAIN (19)...(163): GrpE
  misc_feature (1)..(164): Xaa is any amino acid
MEENLEKNEVSEEVDRLVEEAESTSVEEIAKEANIAEAQEKERIAQDKYLRLFAEFENYRMRSAKEQLELISTANGKLLEKLADVKDNFDRAFAEENKTGDLAAFEKGIKLIQEQFNKVLSDFGLETIDPSGEAFDPNMHEALMKQPSENVEEGKIIQVYQNGL

SEQ ID NO: 50711 - DNA, 372 bp, Unknown
  Obtained from environmental sample
  misc_feature (1)..(372): n is a, c, g, or t
atgggtgtagataaaagtccgctttgcggacatgaatttaggaccgtaggtccaagcatcctggtcagcccaggaaaaggatttttttcaatggccaagaaactgtatgtcggaaacctttcctacaacaccaccgaggacagcttgcgtaatcatttcgcaagctttggcaatgtagtctcctcaaagatcattgttgatcgggagaccggcaactcaaagggattcggttttatcgaaatgggttccgatcaagaagctgcggcggcaatcgccggtacaaacgggtctgaatttgaaggaaggcagatccgcgttaacgaagcaatggacaagccgcgcagggaacgctccggcggcggtaactggtaa

SEQ ID NO: 50712 - protein, 123 aa, Unknown
  Obtained from environmental sample
  DOMAIN (35)...(106): RNA recognition motif. (a.k.a. RRM, RBD, or RNP domain)
  misc_feature (1)..(123): Xaa is any amino acid
MGVDKSPLCGHEFRTVGPSILVSPGKGFFSMAKKLYVGNLSYNTTEDSLRNHFASFGNVVSSKIIVDRETGNSKGFGFIEMGSDQEAAAAIAGTNGSEFEGRQIRVNEAMDKPRRERSGGGNW

SEQ ID NO: 50713 - DNA, 534 bp, Unknown
  Obtained from environmental sample
  misc_feature (1)..(534): n is a, c, g, or t
ttgcgggaggcaggactaaaggcagtctctgtcatttgttcatccccaatatgggatcaagacaaaaccattctcctttttatgtccatgaacaatgaaatcgataccttgccccttctggaagcaaccttaaaagataaaaaaaaggtttttttaccccgggtggaagaaggagggcaacgtaaaattcgattttacagagttcaggattcctggaaccccggttcctggaatcgagattccctaaaccaaaattcctacggcatcctcgaaccctttcccaaagacccccttgaagccgcggattttcctgccttaatattcaccccgggtctggcctttgacaggcaagggaaccggctgggccggggaaaaggttattacgatcgtttctttgcggaacttgaaggcaaaaaattcgaggctgtgggcctctgcatggagattcagattatttcatcggcgcccgtagaaaaatgggattataaagttacctatctttgcgccgatggcttctatcggaccgaatcttga

SEQ ID NO: 50714 - protein, 177 aa, Unknown
  Obtained from environmental sample
  DOMAIN (1)...(170): 5-formyltetrahydrofolate cyclo-ligase family
  misc_feature (1)..(177): Xaa is any amino acid
MREAGLKAVSVICSSPIWDQDKTILLFMSMNNEIDTLPLLEATLKDKKKVFLPRVEEGGQRKIRFYRVQDSWNPGSWNRDSLNQNSYGILEPFPKDPLEAADFPALIFTPGLAFDRQGNRLGRGKGYYDRFFAELEGKKFEAVGLCMEIQIISSAPVEKWDYKVTYLCADGFYRTES

SEQ ID NO: 50715 - DNA, 315 bp, Unknown
  Obtained from environmental sample
  misc_feature (1)..(315): n is a, c, g, or t
atgagcatggctattggctacggcttgtacgagaagatgatatacgaccccaaaaccggaaagctcctcaacggcaatttgcttgactacaaactgccgacgattatggatcacccgaggcttgaggctgaatttatcgagaaccccgagccgaccagcccctatgggacaaagtccctcggcgagccgccgaccgtgccgggcgcgtccgctatccgtaatgccgtgcttaacgccacaggcgttgggatcaataccatcccgctcacgccccatgtgctttttacggaattcagtaaagcgggactgatatag

SEQ ID NO: 50716 - protein, 104 aa, Unknown
  Obtained from environmental sample
  misc_feature (1)..(104): Xaa is any amino acid
MSMAIGYGLYEKMIYDPKTGKLLNGNLLDYKLPTIMDHPRLEAEFIENPEPTSPYGTKSLGEPPTVPGASAIRNAVLNATGVGINTIPLTPHVLFTEFSKAGLI

SEQ ID NO: 50717 - DNA, 678 bp, Unknown
  Obtained from environmental sample
  misc_feature (1)..(678): n is a, c, g, or t
atgtacaaaaaaatgctctccatgacggttactcctgaaaaagcgcctaacaaacccgaatatgttgaaattgaatttgaaaagggcattcccgtttcgcttaacggaaagaaaatggacggcgtggctcttataaaccagcttaacaaaatcggcggggcgaacggaatcggcatcgtagaccttgttgagaacagggttgtcggcatgaagagccggggtgtgtacgaaacgcccggcgggtctattctttattacgcgcacggcgagcttgaacacatctgtcttgacaggcagacttactctttcaaacagcaggcggctcttaaaatgggcgagcttatctacggcggtctttggtttactccgttacgcgaagctatttccgcttttgttgactgcactcaacagacggtctgcggcaaggtgaggctcaaactttacaagggttcgattagcgctgcgggagttacgtccgccaattcgctttacaataccagtctcgccagttttacaacgggcgaattgtttaatcacgcggacgccaagggttttatcaaactttacggcttgccggtttatgtgcgggcgctcatgcagcttgagaaaaagggcggagcanaagcggctgcggggaaagcggcgtcaactaaagccaaaacaacaggaaagaagtga

SEQ ID NO: 50718 - protein, 225 aa, Unknown
  Obtained from environmental sample
  DOMAIN (1)...(199): Arginosuccinate synthase
  misc_feature (1)..(225): Xaa is any amino acid
MYKKMLSMTVTPEKAPNKPEYVEIEFEKGIPVSLNGKKMDGVALINQLNKIGGANGIGIVDLVENRVVGMKSRGVYETPGGSILYYAHGELEHICLDRQTYSFKQQAALKMGELIYGGLWFTPLREAISAFVDCTQQTVCGKVRLKLYKGSISAAGVTSANSLYNTSLASFTTGELFNHADAKGFIKLYGLPVYVRALMQLEKKGGAXAAAGKAASTKAKTTGKK

SEQ ID NO: 50719 - DNA, 861 bp, Unknown
  Obtained from environmental sample
  misc_feature (1)..(861): n is a, c, g, or t
gtgctccacgcgatgtggaactcgttactaaaagaaaagcagaaaataggggaaggcgagccaatggttctttattcgcagattgcacctaattacgattcgctgagcgatctgtatgagagcttcaacgaaaaagaaaggaaggctgtatttgtgaaaataacagagagaatcaaaagtgtggatatggtatttatagatgaaatccaatatctagaaaaaaagtacaaagccatgaatttggtgcttgaagtaataaaattcatggggctcataaacaaaccaatggtgatgacatcgcagaaaacagatattgacaaaactgggctggttccagagcttgccgaacgtcttgagaattttgagtatataaaaattcctccgccagataccgaagatcgccttaaaatgctggaagattttatgaaaaaagagaacctaagcctggaaaaccagcagcttaaggatatttgggcaaaaaacacggagaagtgtccgctaaaatgtttgatgaacaagctaaaccgccttatttgcgaagcggaaggcagtgtaataaccgccaaaacaatggaacagctttttgaggcaaaaaattctgtggaaaaaatactgtccgtcataagcgcacgctttaagatagaccctaaaacgctggtaaacgaggagagaaaatttgcttatgaaaggtctgttgcgatgtattttataaaatgcgcgaataggggtatggatttttgcgaagttgggaaaaaacttggcagaagcgaaaacacggcaagagcggcctacgatggcatagaatttgcgttaaacggcggcaaggaacactttcaacaaattaagacccgcacaaattaa

SEQ ID NO: 50720 - protein, 286 aa, Unknown
  Obtained from environmental sample
  misc_feature (1)..(286): Xaa is any amino acid
MLHAMWNSLLKEKQKIGEGEPMVLYSQIAPNYDSLSDLYESFNEKERKAVFVKITERIKSVDMVFIDEIQYLEKKYKAMNLVLEVIKFMGLINKPMVMTSQKTDIDKTGLVPELAERLENFEYIKIPPPDTEDRLKMLEDFMKKENLSLENQQLKDIWAKNTEKCPLKCLMNKLNRLICEAEGSVITAKTMEQLFEAKNSVEKILSVISARFKIDPKTLVNEERKFAYERSVAMYFIKCANRGMDFCEVGKKLGRSENTARAAYDGIEFALNGGKEHFQQIKTRTN

SEQ ID NO: 50721 - DNA, 858 bp, Unknown
  Obtained from environmental sample
  misc_feature (1)..(858): n is a, c, g, or t
atggcgagtgcggagtcggaaggcatccggcaacgtcagaaattccgcaaggagagcaagcagctagtccgcgaagcctacaatggcaaacacccgaaacgtttcaggaaggctatgaaggcaaagaaacgccttcgcaccatagcctgccatcagatacgtgagcttgagcagaagatgagcgagagccagaacttggtctatcgcaatgagttggagcttttcaagtgcgctgccaatcagcagaaaaacgacaaggacaaggtttacagcctgcacaagcaattcacgaagtgcatagccaaagggaagccgcacaagccttacgagttcggaaacaaggtggggattgtttccggcggagtgaaggggaggaagataatactcgccgtcaagggcttcatagacaatgtttttgacgggcatacaattgagcctctgcttgcgcagatgcaggcaaacaagatagctcttccggacgagcttgcctacgaccgcggcggcaaaggcaggagcgagataatgggtgtcaaaattcttataccctctcctccgaaaaaaacagatgccgctttgcaaaagctgtccaagcggctgaagcaccgccgaagagcagccatagaaccgataatcgggcacttgaagagcgatttccgcatggctaggaactatcttggcggcgtggcgggcgttgagataaatgcgttcatgtctgcctgcgcttggaatctgaggaaaatgatggaagtgctcaagaagaaattcttgctctttatttttcaaacgcttttaccgcaaaatttattccgtatcgccgctttatccgaggttgataaggaacgactaaatagaatataa

SEQ ID NO: 50722 - protein, 285 aa, Unknown
  Obtained from environmental sample
  misc_feature (1)..(285): Xaa is any amino acid
MASAESEGIRQRQKFRKESKQLVREAYNGKHPKRFRKAMKAKKRLRTIACHQIRELEQKMSESQNLVYRNELELFKCAANQQKNDKDKVYSLHKQFTKCIAKGKPHKPYEFGNKVGIVSGGVKGRKIILAVKGFIDNVFDGHTIEPLLAQMQANKIALPDELAYDRGGKGRSEIMGVKILIPSPPKKTDAALQKLSKRLKHRRRAAIEPIIGHLKSDFRMARNYLGGVAGVEINAFMSACAWNLRKMMEVLKKKFLLFIFQTLLPQNLFRIAALSEVDKERLNRI

SEQ ID NO: 50723 - DNA, 642 bp, Unknown
  Obtained from environmental sample
  misc_feature (1)..(642): n is a, c, g, or t
atgtttatggaaaaacttttcaagttacagcaaaatggaacaactgtacagcgggagatcctggcgggtcttacaacatttttaacaatggcttacattcttgcggttaatccgggaatgttaggaaaaattggcgatggcatgacgcctgaggcagtctttacagctactgcaatagcttctgctattgctactattgtgatggcgttttttgcaaaacttccgatagctcttgcgcctggtatgggacttaacgcattttttacttacactgttgtttttggattgggctattcatggcaagtcgctcttaccgcagtttttcttgaaggtattttatttgttatactttcgttatttaatgttcgtgaggcgatcatcacggcaattccaaaaaatctaaaaaaagctgttgccgtaggtattggtctttttatcgctcttattggattttacaatgcgggtcttgtagttggtgatacgggtacaataattggtttttctaaagatttttttgctataacggaagttaacaatggtccgcctcttttggcgtttattggactgattattattgcggttctttatgttttaaaaattccccggctcaatcctttatccgaattattggtactactataa

SEQ ID NO: 50724 - protein, 213 aa, Unknown
  Obtained from environmental sample
  misc_feature (1)..(213): Xaa is any amino acid
MFMEKLFKLQQNGTTVQREILAGLTTFLTMAYILAVNPGMLGKIGDGMTPEAVFTATAIASAIATIVMAFFAKLPIALAPGMGLNAFFTYTVVFGLGYSWQVALTAVFLEGILFVILSLFNVREAIITAIPKNLKKAVAVGIGLFIALIGFYNAGLVVGDTGTIIGFSKDFFAITEVNNGPPLLAFIGLIIIAVLYVLKIPRLNPLSELLVLL

SEQ ID NO: 50725 - DNA, 480 bp, Unknown
  Obtained from environmental sample
  misc_feature (1)..(480): n is a, c, g, or t
gtgctgatggggattgccctctttatgacgatttttatcatgtggccgacttttaccacgatttatgaaaattcctttaggccgctggccgccggtgagttaaacgtggaaggggcgtaccgtgaagcggaagctcccttgcggctttttatgtacagccagatgcaggcaaggcccgacaatatccgcctgttcatggccatgaggggcctggacagacccaacaccctcgcggatgtaccgacatacgtgctgatcccggccttcattcttaacgagctgacagtcgcttttaaaatcgggattctgctttttattcctttcatcgtaattgacatggtggtggcaagcgccctcatgtccatgggcatgatcatgctgcccccgatcatgatctccatgccgttcaagctcatcctctttattcttgtggatgggtgggggcttttaacgaatcagctggttcgttcctttatgtga

SEQ ID NO: 50726 - protein, 159 aa, Unknown
  Obtained from environmental sample
  DOMAIN (2)...(155): FliP family
  misc_feature (1)..(159): Xaa is any amino acid
MLMGIALFMTIFIMWPTFTTIYENSFRPLAAGELNVEGAYREAEAPLRLFMYSQMQARPDNIRLFMAMRGLDRPNTLADVPTYVLIPAFILNELTVAFKIGILLFIPFIVIDMVVASALMSMGMIMLPPIMISMPFKLILFILVDGWGLLTNQLVRSFM

SEQ ID NO: 50727 - DNA, 417 bp, Unknown
  Obtained from environmental sample
  misc_feature (1)..(417): n is a, c, g, or t
ttgccgcatttcccgaaggattcaaccgaccgtaaccgtacatcgccttttgcgtttaccggaaacaagtttgagttccgtatgcttggttcttctttttcaattgccggacccaatattgtattgaatacggtaattgcggaagttttacggcagtttgcggatcgtctggagaaagcgaaagattttaacagtgatttggcggagcttatcaaaaacacataccacgaacacaagaggatcatttttaacggcaataattactccgaagaatggttagcggaagctcaaaagcgcggattgtcaaactataagaccactgtagaagcgcttcccgaatttatttcaccgaaaagcattgatctgtttaccaagcaccacgttttcaccgaagcgcgaaattcgctcgcggtatga

SEQ ID NO: 50728 - protein, 138 aa, Unknown
  Obtained from environmental sample
  misc_feature (1)..(138): Xaa is any amino acid
MPHFPKDSTDRNRTSPFAFTGNKFEFRMLGSSFSIAGPNIVLNTVIAEVLRQFADRLEKAKDFNSDLAELIKNTYHEHKRIIFNGNNYSEEWLAEAQKRGLSNYKTTVEALPEFISPKSIDLFTKHHVFTEARNSLAV

SEQ ID NO: 50729 - DNA, 354 bp, Unknown
  Obtained from environmental sample
  misc_feature (1)..(354): n is a, c, g, or t
ttgttgtttttagtcgcggtaattaaagcggtggatgagtatcaggatgtgttgagagtttcaacggcaagcgccggaaacgatcaccggttgggcgcaaacgaagcgcctcccgccattgtgtccgtatttctcggagaagaattgacagagattcttgaatcaattgaagcgggaacgaattaccagggtaaggaaaaacgccacatggagattggcgtaaggctttgccgcatttcccgaaggattcaaccgaccgtaaccgtacatcgccttttgcgtttaccggaaacaagtttgagttccgtatgcttggttcttctttttcaattgccggacccaatattgtattga

SEQ ID NO: 50730 - protein, 117 aa, Unknown
  Obtained from environmental sample
  misc_feature (1)..(117): Xaa is any amino acid
MLFLVAVIKAVDEYQDVLRVSTASAGNDHRLGANEAPPAIVSVFLGEELTEILESIEAGTNYQGKEKRHMEIGVRLCRISRRIQPTVTVHRLLRLPETSLSSVCLVLLFQLPDPILY

SEQ ID NO: 50731 - DNA, 861 bp, Unknown
  Obtained from environmental sample
  misc_feature (1)..(861): n is a, c, g, or t
ttgacaagatcggccgaccatttccagagcacgcacctggaactcgacgtcgccaatgtggtcgccaatgccatgaaggattgggcggttgaaaaaggcgcgactcactatacccactggttccagcccatgaccggcgtcacggcggaaaagcacgacagcttcatttcccccaccagcgatggcaaaatcatcatggagttttcgggcaaggaactcgtccgcggtgaacccgacgcctccagtttcccgtcgggcggcttgcgcgccacctttgaagccaggggctacaccgtctgggacacgacctcgtatgctttcatcaaggacggaaccctttgcatccccaccgctttttgctcatacagcggcgaggcgcttgacaaaaagacccctctgctccgttccatggaggctctcgacaaacaagcgctccgcattctaaggcttttcggcaacacgacggcgcatcgcgtcgcctcggaagtcggcccggaacaggagtatttcctcatagacaaggaaatgttcctgaagcgcccggacttgatttacacgggacggaccgtgttcggcgcgcgcccgcccaaagggcaggaacttgacgatcattatttcggcagcttgaagccgagggtctccgccttcatgaaggagcttgaggaagaactttggcgtctcggcgttcgcgccaagaccaagcacaatgaagtggctccggcccagcatgaactggcgcccatatattcgacgaccaacatagccaccgatcacaaccagttgaccatggaactcatgaaaagcgtggccgaccggcaccggctggcctgcctcttgcatgaaagccctttgccggcgtaa

SEQ ID NO: 50732 - protein, 286 aa, Unknown
  Obtained from environmental sample
  misc_feature (1)..(286): Xaa is any amino acid
MTRSADHFQSTHLELDVANVVANAMKDWAVEKGATHYTHWFQPMTGVTAEKHDSFISPTSDGKIIMEFSGKELVRGEPDASSFPSGGLRATFEARGYTVWDTTSYAFIKDGTLCIPTAFCSYSGEALDKKTPLLRSMEALDKQALRILRLFGNTTAHRVASEVGPEQEYFLIDKEMFLKRPDLIYTGRTVFGARPPKGQELDDHYFGSLKPRVSAFMKELEEELWRLGVRAKTKHNEVAPAQHELAPIYSTTNIATDHNQLTMELMKSVADRHRLACLLHESPLPA

SEQ ID NO: 50733 - DNA, 792 bp, Unknown
  Obtained from environmental sample
  misc_feature (1)..(792): n is a, c, g, or t
ttgccgagtactgggaacgggcctttcccgttgatattgtatgtccacggcggggcatttatcggcgggaattgggagttatctagtaacaaaaacaacgggcttctttcaagcgctccaagcaagggttatgccattgccagtgccggatacctcttgtacaagaacaataaagcgtctttcccgcaaatggtggaggatattttggcggctatacgccatttaagagccaacgcagaaacataccatcttgacccaaataagttcgtcatagcgggttactcggcgggaggctacctgactaatatagtttgcgccctttccggtgccgcgacccacacttatgatataaccacgctcggcaacgctggtgtttccagtaatgttcaggcggcggcaagttcgtcggggcttacggatttctccaagttggtagaacaatccggaagtacaatgcacaatactatggctggcggaccattggggggcaacttaacagacaatacggaactcatgagaaataatctccaaaagcaaaatccgttgaattgggtctcgacgaacacgccacccttgtatatgcggcatggcactggcgataatatagttccctatcagcagtcgaaaatattgtttgaaaaaatcaagagcattacgccgagcacgcagcttgatgacaaggtgaaatacaacgaaataaaagacggaggtcacgctgactttgccagcggttcgaactcggacacgcccgccatattggacttcttggataaagcgttgggtagaaagtaa

SEQ ID NO: 50734 - protein, 263 aa, Unknown
  Obtained from environmental sample
  DOMAIN (12)...(243): alpha/beta hydrolase fold
  misc_feature (1)..(263): Xaa is any amino acid
MPSTGNGPFPLILYVHGGAFIGGNWELSSNKNNGLLSSAPSKGYAIASAGYLLYKNNKASFPQMVEDILAAIRHLRANAETYHLDPNKFVIAGYSAGGYLTNIVCALSGAATHTYDITTLGNAGVSSNVQAAASSSGLTDFSKLVEQSGSTMHNTMAGGPLGGNLTDNTELMRNNLQKQNPLNWVSTNTPPLYMRHGTGDNIVPYQQSKILFEKIKSITPSTQLDDKVKYNEIKDGGHADFASGSNSDTPAILDFLDKALGRK

SEQ ID NO: 50735 - DNA, 312 bp, Unknown
  Obtained from environmental sample
  misc_feature (1)..(312): n is a, c, g, or t
atgcctgcgccgctccaactgacattcgttagttttaaagcaaactcatatataatcgtagagggtaaaagaaacgcagacagtttctttataatccgtacgggaaaagtaagactctccaaagaagttcaaattgtagccgaagagcagggcgatatgctcggacccggcgatttcttcggcgttgtatccacaatgtccggtcacagccatattgagacagcgcaggctattactgacgttacccttatttcagttcaaaaagaacaattcaacccaattattacagggcaatgccccgtgtcgcgatga

SEQ ID NO: 50736 - protein, 103 aa, Unknown
  Obtained from environmental sample
  DOMAIN (9)...(100): Cyclic nucleotide-binding domain
  misc_feature (1)..(103): Xaa is any amino acid
MPAPLQLTFVSFKANSYIIVEGKRNADSFFIIRTGKVRLSKEVQIVAEEQGDMLGPGDFFGVVSTMSGHSHIETAQAITDVTLISVQKEQFNPIITGQCPVSR

SEQ ID NO: 50737 - DNA, 429 bp, Unknown
  Obtained from environmental sample
  misc_feature (1)..(429): n is a, c, g, or t
atgatgccgtcttttttcatggctaatttcgataatggcgccatgggcatattccagacaagccggattagcatagggaagaagaattggcttgcactggaaatcaacggaacaaaaggcagtttgtgttttaatttggaacgtataaacgagttggaagtttacataaaagaggagaatactgaaatagaaggcttccgtaccgtaatgatcaccaatcctgaatatatgtatatcaaaaattggtggcctgcagggcacgtcattggttgggaacacacttttatccatcaatactatgaatttttcacagccattgctacaggtaaacaggtacccactacttttgaagatgggctaaaggttcaaaaaataatttccagcctggtggaatcaggaaaaaatagacaatgggtaaaaattaactag

SEQ ID NO: 50738 - protein, 142 aa, Unknown
  Obtained from environmental sample
  misc_feature (1)..(142): Xaa is any amino acid
MMPSFFMANFDNGAMGIFQTSRISIGKKNWLALEINGTKGSLCFNLERINELEVYIKEENTEIEGFRTVMITNPEYMYIKNWWPAGHVIGWEHTFIHQYYEFFTAIATGKQVPTTFEDGLKVQKIISSLVESGKNRQWVKIN

SEQ ID NO: 50739 - DNA, 366 bp, Unknown
  Obtained from environmental sample
  misc_feature (1)..(366): n is a, c, g, or t
atgaaacttggcgcattctcaatcctgtttaatgatctatcactcgatgatgtacttgatctgtacataaaactaggactgactgccatagaaatcggttcggcagcctattctgcttccagccatatcaacatcgacgagttatatggccattctgataaaatcaagagctttaagaaaaagataaccgacaggggtattgttataagtgctttgggtgctgcaggaaacccaattcaccccaatcaggaaattgccaaagcacaccacgaagcttttgagaaaagcgttattatcgcatcggaaatgggagttgatgtaattaatctgctttccggtgtacctggcgggggtcccaggcgataa

SEQ ID NO: 50740 - protein, 121 aa, Unknown
  Obtained from environmental sample
  misc_feature (1)..(121): Xaa is any amino acid
MKLGAFSILFNDLSLDDVLDLYIKLGLTAIEIGSAAYSASSHINIDELYGHSDKIKSFKKKITDRGIVISALGAAGNPIHPNQEIAKAHHEAFEKSVIIASEMGVDVINLLSGVPGGGPRR

SEQ ID NO: 50741 - DNA, 372 bp, Unknown
  Obtained from environmental sample
  misc_feature (1)..(372): n is a, c, g, or t
atgttcagcatggtaaaacttctgccggtagatcatcaaataattccgcctgtaaaagaaaaaatacaaaatggtattttggaaatcggcggagtaaagagggtggatttaaagtttgaatttctgccgaccacagaggcggtttttgatacgctggttccccaatatataaagggcgtgatttacggggcgatggtggaagcgtacgcaagcgaacaaagcgcccgcatgaaggcaatggacgaggcttccaagagcgccgaagatatgctcgcctctctgcggataagttacaaccgcgcgcgtcaggcgggcattacgcaggaaatggcggaaataacaggcggttcttcagcgctggctgataggtag

SEQ ID NO: 50742 - protein, 123 aa, Unknown
  Obtained from environmental sample
  DOMAIN (1)...(120): ATP synthase
  misc_feature (1)..(123): Xaa is any amino acid
MFSMVKLLPVDHQIIPPVKEKIQNGILEIGGVKRVDLKFEFLPTTEAVFDTLVPQYIKGVIYGAMVEAYASEQSARMKAMDEASKSAEDMLASLRISYNRARQAGITQEMAEITGGSSALADR

SEQ ID NO: 50743 - DNA, 561 bp, Unknown
  Obtained from environmental sample
  misc_feature (1)..(561): n is a, c, g, or t
gtggaaagggctggttcaggtattgtagcttacattaataatcacagttttttggataaccccacattcagaggtatgcgttggaatctgcttaaaagttttgacaaaatatacattattgatcttcatggaaatgccaagaaaaaggaaactgctccagatggaagcaaagatgaaaatgtctttgatattcaacagggagtgagcattaatatttttgtaaagaatagcaaaaggatattaaccacggaggactgctgtttggctacaccaaacagcttggagttacacggaggaaaggaaagcataaaattggcagatgtatatcattatgatttatatggtttgcgtaatgataaatatgattttctctttgagcaaaaaattgattcagtaaaatggaaaaaattggaactttcaatgccccaattcttttttgttcggaaaaattttgcaaatcagtcgcaatatgagactggattttctttagtggataccttccaattaaattcagttggaattgttaccggaagagatgatttaggaactgtcccaaaataa

SEQ ID NO: 50744 - protein, 186 aa, Unknown
  Obtained from environmental sample
  misc_feature (1)..(186): Xaa is any amino acid
MERAGSGIVAYINNHSFLDNPTFRGMRWNLLKSFDKIYIIDLHGNAKKKETAPDGSKDENVFDIQQGVSINIFVKNSKRILTTEDCCLATPNSLELHGGKESIKLADVYHYDLYGLRNDKYDFLFEQKIDSVKWKKLELSMPQFFFVRKNFANQSQYETGFSLVDTFQLNSVGIVTGRDDLGTVPK

SEQ ID NO: 50745 - DNA, 771 bp, Unknown
  Obtained from environmental sample
  misc_feature (1)..(771): n is a, c, g, or t
ttgattatgtcggcgaacttgcggattacgacatactgtgcagggaaaacggcgccgcgtctgaaattaaaaaaattccgtgcggtcaaagatgaaaaagaaatcgccattatccgtaaagccgcgggaataacaaacgagcttattgatcaactggaaaaaaatgtacgcgggggaaaaataaaaacagaagcggacgcggctttgttaattgaggttgaggcacgcaagcgcggctgtgaggggacaagttttgaaaccctcgccgcgggtcccgcgcgaagttttgctattcacgcttttcccaactggacatattccccattcggcggcgacgggctttctattctggactttggcgtaagattagacggctattctacggatgtgacccttacttttgcccgcaatttaaatcccaaacaggaaaaactggtcaatcttacggaaaaagctgccaaactcgcgctttcaatggcacatatcggaacgcccgcaaaaaacatagccgcggccgtagacgctctttttgcaaaatccaaaaaacagatgcctcacggtctcggtcacggtctcggccttcaggaacatgaataccctattatttcaaaccgcagcacaaatgaatgggtacttgaaccgggaatgatcttcacgatagagcccggtctctacgaccctctcctgggcggctgccgcctcgaaaacgacgtgttaatcacagaaaccggtcacgaagcgcttacaagctcgcatattatccgtctatag

SEQ ID NO: 50746 - protein, 256 aa, Unknown
  Obtained from environmental sample
  DOMAIN (36)...(250): metallopeptidase family M24
  misc_feature (1)..(256): Xaa is any amino acid
MIMSANLRITTYCAGKTAPRLKLKKFRAVKDEKEIAIIRKAAGITNELIDQLEKNVRGGKIKTEADAALLIEVEARKRGCEGTSFETLAAGPARSFAIHAFPNWTYSPFGGDGLSILDFGVRLDGYSTDVTLTFARNLNPKQEKLVNLTEKAAKLALSMAHIGTPAKNIAAAVDALFAKSKKQMPHGLGHGLGLQEHEYPIISNRSTNEWVLEPGMIFTIEPGLYDPLLGGCRLENDVLITETGHEALTSSHIIRL

SEQ ID NO: 50747 - DNA, 600 bp, Unknown
  Obtained from environmental sample
  misc_feature (1)..(600): n is a, c, g, or t
atgttcaatttttgcccgtcatgcgcttcaaaaaaaatcgcttttgaaaacggaaagcgtttccgttgtcccgattgcggttttacttattatcacaatgtcgccgcggcaaccggttgtattatcgttgtgccggaaaatggaaaatccgaggaaataggacggccatttaaccattcgtcatgtaaggagtcggacaggatcatatttcttgttcggggcaaagagccgggtatcggtaaactcgatcttcccggcggctttgtcgatccgagcgagggcgtcctcgacggcgtataccgcgaattacgggaagaaattaactggacaccgcatattcctgagggcgcaagattgtcggatgtctttaaattattcgcttcttttccaaatgtgtactgttataagggcataaattacaatacatgtgatatgtatttttcagtccatgcgcctgggtctaaaccggaagaactgcgtcgggaaaaagccgaaatctcggagattcgatttttaaaacctgaagaaattgatttctcccggntcgcttttccatctaccgtgaaggccgtaaaaacgtatcttaacatccttgactaa

SEQ ID NO: 50748 - protein, 199 aa, Unknown
  Obtained from environmental sample
  DOMAIN (34)...(197): NUDIX domain
  misc_feature (1)..(199): Xaa is any amino acid
MFNFCPSCASKKIAFENGKRFRCPDCGFTYYHNVAAATGCIIVVPENGKSEEIGRPFNHSSCKESDRIIFLVRGKEPGIGKLDLPGGFVDPSEGVLDGVYRELREEINWTPHIPEGARLSDVFKLFASFPNVYCYKGINYNTCDMYFSVHAPGSKPEELRREKAEISEIRFLKPEEIDFSRXAFPSTVKAVKTYLNILD

SEQ ID NO: 50749 - DNA, 585 bp, Unknown
  Obtained from environmental sample
  misc_feature (1)..(585): n is a, c, g, or t
atgtatcgaggtaatatggctgctaatcattcaatccccggcgaataccgtagagcggctgatcgtctgtttttcaaggacggattttccaaggggcataaacctgatataaaagccgcctgtgaatttgccaagtcgcttggtataggcatagaataccagcgtttactcgcgctcgaaaaaaacagcggtgagttacggacttttcttgatcagtttcaaaataatttgtctttgttgattaaaaaaacatgggtggaaaaatccgatgaagaacgcaagggaaaattgcaggatgacattcccttatttatgactacagttgagcagacggattatataaaagccataaatgaatttagtgagattcttgatgaattagcctatctgttttttggcgctcagagcgaaaaagaagactttgccgagtatactttccgcattgacgtgcaaatggggcttttttggtggtacggaagcaagcttgagttgttaaaagacataaaaactcaaaatatcgacaataatgataaagtgttatgggcaattttgcttttaggactctgttatctgacaaatttttaa

SEQ ID NO: 50750 - protein, 194 aa, Unknown
  Obtained from environmental sample
  misc_feature (1)..(194): Xaa is any amino acid
MYRGNMAANHSIPGEYRRAADRLFFKDGFSKGHKPDIKAACEFAKSLGIGIEYQRLLALEKNSGELRTFLDQFQNNLSLLIKKTWVEKSDEERKGKLQDDIPLFMTTVEQTDYIKAINEFSEILDELAYLFFGAQSEKEDFAEYTFRIDVQMGLFWWYGSKLELLKDIKTQNIDNNDKVLWAILLLGLCYLTNF

SEQ ID NO: 50751 - DNA, 783 bp, Unknown
  Obtained from environmental sample
  misc_feature (1)..(783): n is a, c, g, or t
atgaatcaatatcggacacacacttgcggggaattgcgggaaggaaatacaggccaggctgtcacgctctccggctgggtggacaccatccgcgaccacggcggcgttacatttttagacctccgggaccagtacggcgttacccagatagtcctgcacgacgaatataaattgaacaaagaaagcgtcataacagtaacaggtacggtaaaaaaacgggacaaagaaaccgtcaatccgaaaatcgaaaccggaaccgtcgaagttcacgcaaaatcgattgttatacaaagcagggcagtccgcgcattgccgtttgaaataagcgactccaaaaacaccagggaagaagtacgcctctgctatcgttttctggatttgagaaaccccgatgtgaaaaaaaacattctgctgcgttcaaaagtaatcagctttttgcgtacaaaaatggaagagcttaattttattgaaattcaaacgccgatacttacctcgtcctcgcctgaaggggcgcgggattaccttgttcccagccgcaagcaccacggcaagttttacgcgctaccgcaggccccgcagattttcaaacagctcctcatggtttcaggctttgaccgctattaccagatcgccccctgcttccgcgacgaggacgcccgcgccgatcgctctcccggagaattttaccaattggattttgaaatggccttcgcggatcaggaagacgttttccatgtggcggaacatgttaagcacagcgtttttacaagccttttcgaataa

SEQ ID NO: 50752 - protein, 260 aa, Unknown
  Obtained from environmental sample
  DOMAIN (115)...(260): tRNA synthetases class II (D, K and N)
  misc_feature (1)..(260): Xaa is any amino acid
MNQYRTHTCGELREGNTGQAVTLSGWVDTIRDHGGVTFLDLRDQYGVTQIVLHDEYKLNKESVITVTGTVKKRDKETVNPKIETGTVEVHAKSIVIQSRAVRALPFEISDSKNTREEVRLCYRFLDLRNPDVKKNILLRSKVISFLRTKMEELNFIEIQTPILTSSSPEGARDYLVPSRKHHGKFYALPQAPQIFKQLLMVSGFDRYYQIAPCFRDEDARADRSPGEFYQLDFEMAFADQEDVFHVAEHVKHSVFTSLFE

SEQ ID NO: 50753 - DNA, 501 bp, Unknown
  Obtained from environmental sample
  misc_feature (1)..(501): n is a, c, g, or t
atgcatcctgaacatccaaagccgcatgcaggctcggacgacgccgggcaagcgggggcctctccccgccgcaaggttctcgcggcggcatgtctcgcccacctgatcaacgacggcgtcacggacatgctctatgtgttctttcctgtctggcagcagctctttgccttgagtttcgcccaggtagggctgatgaagacgctgttctcgggcgccatggccgcattccagattcccgcgggctttctggcgggagggttggggctgcgtcccattctggcgggcggggctttgctcaccggcctgcccctcttgtgcggaacgctgacggattcggccttcgcgctcggcgtctgcctggttttgggaggcatagggggcagcgcgcagcatcccctggcttccgcggccatctctcatgtctacagcggcaaggcttcgcgggtggccctctcgaacacaactcccggagatctcgggaaaatgctctatccggcttaa

SEQ ID NO: 50754 - protein, 166 aa, Unknown
  Obtained from environmental sample
  misc_feature (1)..(166): Xaa is any amino acid
MHPEHPKPHAGSDDAGQAGASPRRKVLAAACLAHLINDGVTDMLYVFFPVWQQLFALSFAQVGLMKTLFSGAMAAFQIPAGFLAGGLGLRPILAGGALLTGLPLLCGTLTDSAFALGVCLVLGGIGGSAQHPLASAAISHVYSGKASRVALSNTTPGDLGKMLYPA

SEQ ID NO: 50755 - DNA, 453 bp, Unknown
  Obtained from environmental sample
  misc_feature (1)..(453): n is a, c, g, or t
atgagagatggccgcggaagccaggggatgctgcgcgctgccccctatgcctcccaaaaccaggcagacgccgagcgcgaaggccgaatccgtcagcgttccgcacaagaggggcaggccggtgagcaaagccccgcccgccagaatgggacgcagccccaaccctcccgccagaaagcccgcgggaatctggaatgcggccatggcgcccgagaacagcgtcttcatcagccctacctgggcgaaactcaaggcaaagagctgctgccagacaggaaagaacacatagagcatgtccgtgacgccgtcgttgatcaggtgggcgagacatgccgccgcgagaaccttgcggcggggagaggcccccgcttgcccggcgtcgtccgagcctgcatgcggctttggatgttcaggatgcatgacggtccgcggctgctcacagcggcatgttga

SEQ ID NO: 50756 - protein, 150 aa, Unknown
  Obtained from environmental sample
  misc_feature (1)..(150): Xaa is any amino acid
MRDGRGSQGMLRAAPYASQNQADAEREGRIRQRSAQEGQAGEQSPARQNGTQPQPSRQKARGNLECGHGAREQRLHQPYLGETQGKELLPDRKEHIEHVRDAVVDQVGETCRRENLAAGRGPRLPGVVRACMRLWMFRMHDGPRLLTAAC

SEQ ID NO: 50757 - DNA, 372 bp, Unknown
  Obtained from environmental sample
  misc_feature (1)..(372): n is a, c, g, or t
gtgacaggcgcggacaacccctgccccgcccctttaagcggtttccgcgaagttaagcccgtggttttttcttctatatatccggtagattcaaacgattatgaagagttgcgctcaagcatggaaaaactcaagctgaacgacgcctcgcttgtgtacgaaaaagattcgtccgccgccctcggtttcggtttccgctgcggctttctcgggcttctgcaccttgaggtgatacaggagcgactggaacgcgaattcgaccagtcggtgatattcaccgcgccctcggtaaaatacaaactgaaacttaaaaacgccaaaagacgaagtaatgattcgacaatcccatggaataccccgacgaggggctga

SEQ ID NO: 50758 - protein, 123 aa, Unknown
  Obtained from environmental sample
  misc_feature (1)..(123): Xaa is any amino acid
MTGADNPCPAPLSGFREVKPVVFSSIYPVDSNDYEELRSSMEKLKLNDASLVYEKDSSAALGFGFRCGFLGLLHLEVIQERLEREFDQSVIFTAPSVKYKLKLKNAKRRSNDSTIPWNTPTRG

SEQ ID NO: 50759 - DNA, 636 bp, Unknown
  Obtained from environmental sample
  misc_feature (1)..(636): n is a, c, g, or t
atggaataccccgacgaggggctgattgagggcgcccaagaaccttatatccgcgcctcgataatctccccggcgaatttcctcggcaatataatgaccctctgcctggaaaagcgcggggttcagaccaacatgacctaccttgacgaaaagcgcgtggagcttgtatacgacatgcccctttcggaagtgcttttcgatttttacgaccgcctgaaaagcaccagccggggttacgcgtcatttgattacgacattaccgactacaggcccacggagctcgccaaaatggacatactcctcaacggcaaagcggtggatgccctttcccagcttgtgttcaaaccaaacgcctatgaccgcgcgcgcaaggtatgtgaacgcttaagggacgaaatcccccgccagcagttcaagatacccatacagggggccatcggcagcagcatcatcgccagggaaacggtcaacgccctgcggaaggacgtgctggcgaaatgctacggcggcgacataacccgcaagcgcaagctgcttgaaaaacaaaaagaaggcaagaagcgcatgaagcaggtcggcgacgtggaactgccccagagcgccttcctcgccgtgcttaaggccaaagacgagtaa

SEQ ID NO: 50760 - protein, 211 aa, Unknown
  Obtained from environmental sample
  DOMAIN (11)...(100): Elongation factor G C-terminus
  misc_feature (1)..(211): Xaa is any amino acid
MEYPDEGLIEGAQEPYIRASIISPANFLGNIMTLCLEKRGVQTNMTYLDEKRVELVYDMPLSEVLFDFYDRLKSTSRGYASFDYDITDYRPTELAKMDILLNGKAVDALSQLVFKPNAYDRARKVCERLRDEIPRQQFKIPIQGAIGSSIIARETVNALRKDVLAKCYGGDITRKRKLLEKQKEGKKRMKQVGDVELPQSAFLAVLKAKDE

SEQ ID NO: 50761 - DNA, 675 bp, Unknown
  Obtained from environmental sample
  misc_feature (1)..(675): n is a, c, g, or t
ttgacaaaagcctccggctacagtttttacaatgttagtcccttttcttttaacgagcttcttaacgaccccgaaaacatagaagtaaacctccgttcatacataaactctttttcccaaaacgtgcaggacataatcgaatactttaaatttgacgaacaaatagcaaaacttgcaaagggtaacgcactttttatcgttatacaggaattttgcagtcaaaaagcatacctcggtgctgacgttatttcgtcaacggaaatgggattgatttttgaacacctgattaaaaagttttcagaaagttacaacgaagaagcgggagcgcacttcacagcaagggatattgtttacctgatgaccgacctcttgattgaaggagacgaagaagacctaaaaggcgaagtaataacaaagaccgtttacgatatggcaatgggcacttctcaaatgctcggatgcttgactgaacgtataaatgcaataaatcctaaagccgaagttacctgttttggacaggaattcaacgatgaaacttttgcgattgccaaaagcgatatgcttattcgcggtggggatgctaacaatatgaaatatggcgatacccttgatgatgataaattttccgggtatacattcgattacataatttcaaaccccccgtttcggtattga

SEQ ID NO: 50762 - protein, 224 aa, Unknown
  Obtained from environmental sample
  misc_feature (1)..(224): Xaa is any amino acid
MTKASGYSFYNVSPFSFNELLNDPENIEVNLRSYINSFSQNVQDIIEYFKFDEQIAKLAKGNALFIVIQEFCSQKAYLGADVISSTEMGLIFEHLIKKFSESYNEEAGAHFTARDIVYLMTDLLIEGDEEDLKGEVITKTVYDMAMGTSQMLGCLTERINAINPKAEVTCFGQEFNDETFAIAKSDMLIRGGDANNMKYGDTLDDDKFSGYTFDYIISNPPFRY

SEQ ID NO: 50763 - DNA, 816 bp, Unknown
  Obtained from environmental sample
  misc_feature (1)..(816): n is a, c, g, or t
ttgagaactataaaaaccattttgcaacaaattggcgataaaacaaaaactattcgcttaaatggtcgaggggaaagtacaatacacctagattttataaaaattgtgaactacacaaaacaaaattttctgaaactcaatattaatttattttctaatttttcattcaataatcaaaaagtaatagatgttttaattacaaacgatgttcaacttttcatttcaatagacagcccaaatgagaatgaattgtctgctatccgaaaaggagcggattttcactttattgaaaataatataaaacagctaaaaaaaatgtacaatcgcccttttattgtattcactatacaagaaacaaatatacaccgtatttttgaaattgcacagtttgcttttgaaaataattgccaaattttatataacacaatccgtcgagataatggcattgaaacttttgttgaagctgttaagttaaattatttatctatcactaatcaatttgaacaagttcgccaattatacggcaattcggaattgcaatacttgtgtccagatcaacttgcaggagttgaattacagaccgagaagctaacaaaaacgcacggaacaatggaacaatgtccagcattaggcaaagaattatgtattttatatgatggtacagtgacaccatgtaatatgtttaatccatacatatatggtaatattttcaatcagtcgttgaatgaaatatggggcagcgaagaacggaaaatgtttttgtcttctcataagtgttattattattgtcaaaattgtgcaaatttaggaatttag

SEQ ID NO: 50764 - protein, 271 aa, Unknown
  Obtained from environmental sample
  misc_feature (1)..(271): Xaa is any amino acid
MRTIKTILQQIGDKTKTIRLNGRGESTIHLDFIKIVNYTKQNFLKLNINLFSNFSFNNQKVIDVLITNDVQLFISIDSPNENELSAIRKGADFHFIENNIKQLKKMYNRPFIVFTIQETNIHRIFEIAQFAFENNCQILYNTIRRDNGIETFVEAVKLNYLSITNQFEQVRQLYGNSELQYLCPDQLAGVELQTEKLTKTHGTMEQCPALGKELCILYDGTVTPCNMFNPYIYGNIFNQSLNEIWGSEERKMFLSSHKCYYYCQNCANLGI

SEQ ID NO: 50765 - DNA, 465 bp, Unknown
  Obtained from environmental sample
  misc_feature (1)..(465): n is a, c, g, or t
ttgtttaattcgggtttccgtccggccatagacgtgggcctttcggtaagccgcgtcggaggttcggcgcagacaaaggcgatgcggaaaatttccggccgcatacggctggacctcgcgcagtaccgcgagatggcggccttcgcccagttcggcagcgatttggacaaggccacccaggacaaactggcgcagggcgcaaggcttatggaggtgctgaaacagccccagctttcgccttatccgctggaggaacagattgcgattctttttctcgcggtggaaggttatcttcttgatattaaaactgaaaatgtttccgcctttattaaagactttttatcgcaccttaaaacacagaaggcggatctgatgaggggcatcgcggaaacgggagtcgtttccaaagaacatgaagacgaattgcgcttaacgataacagccttcaagggaataaagaagtaa

SEQ ID NO: 50766 - protein, 154 aa, Unknown
  Obtained from environmental sample
  DOMAIN (29)...(133): ATP synthase alpha/beta chain, C terminal domain
  misc_feature (1)..(154): Xaa is any amino acid
MFNSGFRPAIDVGLSVSRVGGSAQTKAMRKISGRIRLDLAQYREMAAFAQFGSDLDKATQDKLAQGARLMEVLKQPQLSPYPLEEQIAILFLAVEGYLLDIKTENVSAFIKDFLSHLKTQKADLMRGIAETGVVSKEHEDELRLTITAFKGIKK

SEQ ID NO: 50767 - DNA, 894 bp, Unknown
  Obtained from environmental sample
  misc_feature (1)..(894): n is a, c, g, or t
atggcaagcctgcgcgatgtacgcctgcggatgcgggctattgaacagacattaaaagtgaccaaggcgatgaaccttatctctacggcaaaacttcgcaaagggcgtaaaatgctggcggataccgttccgtatttcagcagaattcaaaaatccatgttcgatattctttccagccaaaaagatatcggaagcgcgtttttcagaaagcccgatccggcgaagcccagtcacagcgcgataatcgtgataaccagctataaggggcttgccggcggttataacgcgaatctttttcgcaatgtaaacgagttatgcgcaagagtggaaaatccgctgctgatacttatcggcggcaatgtcggctatcgctattttgttcattctccgtatccaattattgaagatttttcttttcatccggaaatacccaccgtagaacacgccgcagaagtttgtgaatatgtggtttcgcagtacctttggggagcttttgactcgatacatatcgcgtatacccacatgttcagcatgataaaacttctgccgaccatacatcagattattccccttgtaaaagaaaaaattcagaatgacctttttgaaatcggcggcgaaaaaagggttgacctgaaatttgaatttctgccgtcaaccggggcggtttttgacctgctggttccccagtatataaagggcgtaatttacggggcgatggtggaagcgcacgccagcgaacagagttcccgtatgaaggcgatggacgaggcatccaagagcgcacaagacatgctcgcctctttgaaaataagttacaaccgcgcgcgccaggcgggcattacgcaggaaatggcggaaataaccggcggttccacggcattggctgaaaagtga

SEQ ID NO: 50768 - protein, 297 aa, Unknown
  Obtained from environmental sample
  DOMAIN (2)...(294): ATP synthase
  misc_feature (1)..(297): Xaa is any amino acid
MASLRDVRLRMRAIEQTLKVTKAMNLISTAKLRKGRKMLADTVPYFSRIQKSMFDILSSQKDIGSAFFRKPDPAKPSHSAIIVITSYKGLAGGYNANLFRNVNELCARVENPLLILIGGNVGYRYFVHSPYPIIEDFSFHPEIPTVEHAAEVCEYVVSQYLWGAFDSIHIAYTHMFSMIKLLPTIHQIIPLVKEKIQNDLFEIGGEKRVDLKFEFLPSTGAVFDLLVPQYIKGVIYGAMVEAHASEQSSRMKAMDEASKSAQDMLASLKISYNRARQAGITQEMAEITGGSTALAEK

SEQ ID NO: 50769 - DNA, 606 bp, Unknown
  Obtained from environmental sample
  misc_feature (1)..(606): n is a, c, g, or t
ttgggtggctacaaaaataaactgccgatcatcgccgatgaagtgtttgcctgctacccagcagaaccccaaaaggacgccgtcggcaccatattgcgcgaaccaattgacgcctgccctgtgtttctgctttccggcctaagcaaatctgcccttttgccacagcttaaactaggatggatagccatgctgggaactgcgattgatttttcagagcatctggcctttctggccgaccagtacctttcggtgtccgctccaatcgcgcttgcggcaccacaattgatagccatcgcgccaaatttgcagtgccaagcaatagatcggataaagaaaaatatagagattctcgacaaactcctattgggacacccgcacatgagtcgcctgcctgtctatggtgggtggagcgtcctaatccagcggccagatacagaagacgacgaaacctgcgttgaaaggcttttgtccgatcatcgcgttttgatacacccaggccatttctatgacatttccaaaaatggctttctagtggcgagcctgcttcccaaccaccctgtctttgcccaagctgtgcaagcgctgctcaatgggttaaagctatag

SEQ ID NO: 50770 - protein, 201 aa, Unknown
  Obtained from environmental sample
  misc_feature (1)..(201): Xaa is any amino acid
MGGYKNKLPIIADEVFACYPAEPQKDAVGTILREPIDACPVFLLSGLSKSALLPQLKLGWIAMLGTAIDFSEHLAFLADQYLSVSAPIALAAPQLIAIAPNLQCQAIDRIKKNIEILDKLLLGHPHMSRLPVYGGWSVLIQRPDTEDDETCVERLLSDHRVLIHPGHFYDISKNGFLVASLLPNHPVFAQAVQALLNGLKL

SEQ ID NO: 50771 - DNA, 756 bp, Unknown
  Obtained from environmental sample
  misc_feature (1)..(756): n is a, c, g, or t
atggccgagtggggctacaaccgggacggcgagggcctcccgcaggtcaacataggcatgttcctcgggtcggagtcgcggctgccggtctactacagcctgtgcggcgggagcataaccgacaagagccacctccccttcatgatggacagcgcatcgaagctgggcatcggcagggtgcgcttcgtgctggaccgcgggttcgtgacggagggcaacctgaagtacatggggcgggaggggcacatgttcgtcaccgccctcccccagggcctactggaggccaggaggctcatcgacgcgtgcaggggcggcatacggagggcggcgaaccggatcggcgagcacggcgtgtacggccaggccgcagaggtcgagctgtacggctccatgctgtgcgcccacgtctacttcgacgcggagaagcaggcgctggacgagagggagctgtgcgcccacgtcgagaggctggagggcgagctggagaggctgggcagggcgaagagggcgacgaggaggcacacggactatttcgtggtggaggaggggaaggcgggggcgctcaggttcaggcgggacgatgcaaagatagacgggcggctcggcagggcgggctttttcatcctcctgacaaacgacgcggggctcgccagcggcgaggcgctgggcatctaccgcggcagggacgccgatagagaagagcttccaccagcccaagaacggcgtccacttccggcggctgaggacccctcctga

SEQ ID NO: 50772 - protein, 251 aa, Unknown
  Obtained from environmental sample
  misc_feature (1)..(251): Xaa is any amino acid
MAEWGYNRDGEGLPQVNIGMFLGSESRLPVYYSLCGGSITDKSHLPFMMDSASKLGIGRVRFVLDRGFVTEGNLKYMGREGHMFVTALPQGLLEARRLIDACRGGIRRAANRIGEHGVYGQAAEVELYGSMLCAHVYFDAEKQALDERELCAHVERLEGELERLGRAKRATRRHTDYFVVEEGKAGALRFRRDDAKIDGRLGRAGFFILLTNDAGLASGEALGIYRGRDADREELPPAQERRPLPAAEDPS

SEQ ID NO: 50773 - DNA, 687 bp, Unknown
  Obtained from environmental sample
  misc_feature (1)..(687): n is a, c, g, or t
gtggggctacaaccgggacggcgagggcctcccgcaggtcaacataggcatgttcctcgggtcggagtcgcggctgccggtctactacagcctgtgcggcgggagcataaccgacaagagccacctccccttcatgatggacagcgcatcgaagctgggcatcggcagggtgcgcttcgtgctggaccgcgggttcgtgacggagggcaacctgaagtacatggggcgggaggggcacatgttcgtcaccgccctcccccagggcctactggaggccaggaggctcatcgacgcgtgcaggggcggcatacggagggcggcgaaccggatcggcgagcacggcgtgtacggccaggccgcagaggtcgagctgtacggctccatgctgtgcgcccacgtctacttcgacgcggagaagcaggcgctggacgagagggagctgtgcgcccacgtcgagaggctggagggcgagctggagaggctgggcagggcgaagagggcgacgaggaggcacacggactatttcgtggtggaggaggggaaggcgggggcgctcaggttcaggcgggacgatgcaaagatagacgggcggctcggcagggcgggctttttcatcctcctgacaaacgacgcggggctcgccagcggcgaggcgctgggcatctaccgcggcagggacgccgatag

SEQ ID NO: 50774 - protein, 228 aa, Unknown
  Obtained from environmental sample
  misc_feature (1)..(228): Xaa is any amino acid
MGLQPGRRGPPAGQHRHVPRVGVAAAGLLQPVRREHNRQEPPPLHDGQRIEAGHRQGALRAGPRVRDGGQPEVHGAGGAHVRHRPPPGPTGGQEAHRRVQGRHTEGGEPDRRARRVRPGRRGRAVRLHAVRPRLLRRGEAGAGREGAVRPRREAGGRAGEAGQGEEGDEEAHGLFRGGGGEGGGAQVQAGRCKDRRAARQGGLFHPPDKRRGARQRRGAGHLPRQGRR

SEQ ID NO: 50775 - DNA, 468 bp, Unknown
  Obtained from environmental sample
  misc_feature (1)..(468): n is a, c, g, or t
gtgaaggctgtcgtccaaagggcaaaaaacgcttccgtaaaagttgaaaacgccgtaaccggcagcataggctccggtcttttggtatatttgggagtggcgaaagaggacagcgaaaaagacgccgaatggatggcggaaaaagtagcaaacctgcgaatatttgaagacgctcagggaaagatgaatctttcgttgctggatatcattgcgcacaacacacctgaggataccaccatcggcgttctcgcggtttcgcagtttacgcttattgccgacgcaaccaagggccgaaggccttactacggggaagctgctgatccggaaaaagcaaatgagctctacgaatgttttatggaaaagatcaggaaacgcggtttaatttgcgaggccggggtctttcaggcccatatggacgtgagttatacgaatgatgggcctgtaactatcattcttgattcaccgtga

SEQ ID NO: 50776 - protein, 155 aa, Unknown
  Obtained from environmental sample
  DOMAIN (28)...(154): D-Tyr-tRNA(Tyr) deacylase
  misc_feature (1)..(155): Xaa is any amino acid
MKAVVQRAKNASVKVENAVTGSIGSGLLVYLGVAKEDSEKDAEWMAEKVANLRIFEDAQGKMNLSLLDIIAHNTPEDTTIGVLAVSQFTLIADATKGRRPYYGEAADPEKANELYECFMEKIRKRGLICEAGVFQAHMDVSYTNDGPVTIILDSP

SEQ ID NO: 50777 - DNA, 729 bp, Unknown
  Obtained from environmental sample
  misc_feature (1)..(729): n is a, c, g, or t
gtgatctttacccctttgattctttgcatgatttgggtggaaattaatatgaacggcgaaaagcccccatctgacgtttttgaggttgacgagcttctgaccattgatgaggtagccagatacttaaaggtatccgaaagaactgtttacgaatgggccaaaagaggagaaattccggcgggaaaaatggggactgtctggcgttttaagaaatccgatctggaaaaatgggttaatacgcgccttttgactaacgcgaccgtttcccggagcggcagcgtcaacccccaggctattgtttcccccgaacgcgttgtttttctgaattgttcttcaaagagggaggcccttctttccctggccgaaaatatttccaccgcgccggaaattaccaatccccaggaactctcccgcgaaattttaaaaagagaagagctcatgagtacggccattggctgcggcatcgccattccccacatcaggctttcgtcaatttccaacctggtaatttcagtcggaataagcgggacggacataatggattttcaaactcttgacggtgaacctgtgcggcttcttcttatgatagcctccgcgtataaccagcacgcctattacctgcagaccctctcgttttttagtgccagattaagaaacaggaatctaaggaacgcccttttgtcctcgaacgacaggcaggaggtttgtgggattcttaccggcggctga

SEQ ID NO: 50778 - protein, 242 aa, Unknown
  Obtained from environmental sample
  DOMAIN (99)...(242): Phosphoenolpyruvate-dependent sugar phosphotransferase system, EIIA 2
  misc_feature (1)..(242): Xaa is any amino acid
MIFTPLILCMIWVEINMNGEKPPSDVFEVDELLTIDEVARYLKVSERTVYEWAKRGEIPAGKMGTVWRFKKSDLEKWVNTRLLTNATVSRSGSVNPQAIVSPERVVFLNCSSKREALLSLAENISTAPEITNPQELSREILKREELMSTAIGCGIAIPHIRLSSISNLVISVGISGTDIMDFQTLDGEPVRLLLMIASAYNQHAYYLQTLSFFSARLRNRNLRNALLSSNDRQEVCGILTGG

SEQ ID NO: 50779 - DNA, 1137 bp, Unknown
  Obtained from environmental sample
  misc_feature (1)..(1137): n is a, c, g, or t
atgagccctcttagcatggagcacgttttgcaaatggagcctatggaagtcagaaaacaggctatagaggccgtggtttttgcgaagtcgcttgtaggcgaaaagggagatgttgaattcagccctgagcactttggcgattgccatgaaaattttgattttgtcttggaatccctgaagcaagtagcagaggctggagccaccaccattaacttgccaaacaccgtggaacgctaccgccctatgctgtttgtggatatggtccgcaaggttgtggaagctttacctaaaaacatcaccgtttccgttcactgccataatgacttgggcatggcaacagccaccactgtggagagctattttgcaggttccgcccaaatggaatgtgcgttaaacggtttgggcgaacgttctggaaataccaatatgtttgaggttgccgttgcgcttcataattgcggcgtggaaatggacatgaacctcggcgaaatatatgaaaccgctcttttaactagtaagtgggcaaaggtgccaatatactcaaaagccccgttgataggcatagaagccatcgcgcacaggagtggtattcaccaagacggagcctctaaaacaaagaacatgaaaaagggtgcttaccgccccatagactattcgctcataggtaggaatgaaaatgatattttaacatttacaagccagagcggaaaaaccgcagtgtacgaaattttaagccacaacggttatcctgttgatttggacgaggcggcggaattgcaacctgtgctcaaagagatcagcgaacatgaaggggaactttccgatacacgtattctggaaattttcagagaaaagtgctgcaatctaaatggcagggtgattttccgcaccatagatgttatacccgaggataatcgctttgtgttcaaattccagaaagacggagcttcccaagaggaatccatatccgcagaaggccctatagaggctgcgttgctactttcgcgcaaaattggtttgcctgtggaactcaacagctacaagcaaagcgttgtaagtgatgccgataaattgtgggctggaagagcgttatctgaaataactctttccgctaatgggaaaacccattataggtag

SEQ ID NO: 50780 - protein, 378 aa, Unknown
  Obtained from environmental sample
  DOMAIN (2)...(177): HMGL-like
  misc_feature (1)..(378): Xaa is any amino acid
MSPLSMEHVLQMEPMEVRKQAIEAVVFAKSLVGEKGDVEFSPEHFGDCHENFDFVLESLKQVAEAGATTINLPNTVERYRPMLFVDMVRKVVEALPKNITVSVHCHNDLGMATATTVESYFAGSAQMECALNGLGERSGNTNMFEVAVALHNCGVEMDMNLGEIYETALLTSKWAKVPIYSKAPLIGIEAIAHRSGIHQDGASKTKNMKKGAYRPIDYSLIGRNENDILTFTSQSGKTAVYEILSHNGYPVDLDEAAELQPVLKEISEHEGELSDTRILEIFREKCCNLNGRVIFRTIDVIPEDNRFVFKFQKDGASQEESISAEGPIEAALLLSRKIGLPVELNSYKQSVVSDADKLWAGRALSEITLSANGKTHYR

SEQ ID NO: 50781 - DNA, 387 bp, Unknown
  Obtained from environmental sample
  misc_feature (1)..(387): n is a, c, g, or t
atgacagccgatgaattgcgttccaaatacatcaatttcttcgtatccaaaggacacgctcagatacagggcaagtcgctcctgccggaaaacgatcctaccgtgctttttacaaccgccggaatgcacccgcttgttccctatcttttgggacaggaacacccggccggtaaaaggctcgtgaactttcaaaagtgcatacgcaccggggacattgacagcgtgggagacgcaagccaccttaccttttttcaaatgctgggcaactggtctttgggggattattttaaagaagaagctataaaaatgagttttgaatttcttacttcccctcagtggcttaatatccctatcgaaaaattgggggttaccgtttttgcctcatag

SEQ ID NO: 50782 - protein, 128 aa, Unknown
  Obtained from environmental sample
  misc_feature (1)..(128): Xaa is any amino acid
MTADELRSKYINFFVSKGHAQIQGKSLLPENDPTVLFTTAGMHPLVPYLLGQEHPAGKRLVNFQKCIRTGDIDSVGDASHLTFFQMLGNWSLGDYFKEEAIKMSFEFLTSPQWLNIPIEKLGVTVFAS

SEQ ID NO: 50783 - DNA, 465 bp, Unknown
  Obtained from environmental sample
  misc_feature (1)..(465): n is a, c, g, or t
atgattgaggctgggggcggcgaaacggtcgactatcccgaacgccgtcattgctgcgggtttggttttcgccagtaccttattaaagccaatcgaggttattcaatcgcaaacacgcacaaaaaattcgaatcaatgaaacctttcaaacccgacatgattatcacaaactgtccgggttgtccatttttcctcgaccgctggcaatatgccatagccgaaatggaaggcaggacgtatggcgaaaatggttacggaataccggtatttacatacgaagaagtggctgggatgattttaggatataatccatgggacttgggattacaggtacatcaggtatcggtggaaccgttgcttgataaaataggaataccctacgactctgaaagtaaatataaaggaatgaacaataaagatattggtgtgccggaacgaccggcacagttacgagttacgcattaa

SEQ ID NO: 50784 - protein, 154 aa, Unknown
  Obtained from environmental sample
  DOMAIN (2)...(66): Cysteine-rich domain
  misc_feature (1)..(154): Xaa is any amino acid
MIEAGGGETVDYPERRHCCGFGFRQYLIKANRGYSIANTHKKFESMKPFKPDMIITNCPGCPFFLDRWQYAIAEMEGRTYGENGYGIPVFTYEEVAGMILGYNPWDLGLQVHQVSVEPLLDKIGIPYDSESKYKGMNNKDIGVPERPAQLRVTH

SEQ ID NO: 50785 - DNA, 624 bp, Unknown
  Obtained from environmental sample
  misc_feature (1)..(624): n is a, c, g, or t
atgggcacagtgaagacctggacggccgtgtcggcaggtggcaatcactcgcttgccgtcaggtccgacggcaccctctgggcctgggggaataatcgtcgaggccagcttggtcttggcgacaacacaaaccgaaacacccccacccaagtgggcacagtgaaaacctggaaatccgtgtcggcaggaagtgaaaattcgcttgccgtcaggtccgacggcacactctgggcctggggggataattattatggccgacttggccttggtgacaccacagaccgaaacacccccgtccgagtgggcacagcgaatacctggacggccgtgtcggcaggaatcgaacactcgcttgccgtcaagtccgatggcacactctgggcatggggggataatggttttggtcagcttggtcttggcgactacacagaccgaaacacccctgtccaaatgggcacagtgaatacttggacggccgtgtcggcaggatggtcctactcacttgccgtcaggtccgatggcaccctctgggcctgggggagtaatggtagtggcgagcttggtcttggcaacaacacaaaccgaaacacccccgcccaagtgggcgcggggggatggttctaa

SEQ ID NO: 50786 - protein, 207 aa, Unknown
  Obtained from environmental sample
  misc_feature (1)..(207): Xaa is any amino acid
MGTVKTWTAVSAGGNHSLAVRSDGTLWAWGNNRRGQLGLGDNTNRNTPTQVGTVKTWKSVSAGSENSLAVRSDGTLWAWGDNYYGRLGLGDTTDRNTPVRVGTANTWTAVSAGIEHSLAVKSDGTLWAWGDNGFGQLGLGDYTDRNTPVQMGTVNTWTAVSAGWSYSLAVRSDGTLWAWGSNGSGELGLGNNTNRNTPAQVGAGGWF

SEQ ID NO: 50787 - DNA, 399 bp, Unknown
  Obtained from environmental sample
  misc_feature (1)..(399): n is a, c, g, or t
atgagtaataaatatgacaaacctgtattggcaattatagtcccatgttataacgagcaagaaatattgcctgaaacagcgaaaaaattgtctgataaattacaaaaattaatttctgaagaaattattgataaaaaatcaacattgctttttgttgatgacgggtcaagtgataacacctggaattttatagaaaaattatattctgaaaattcgcttgtctacaaaggtataaaattatcgaagaacagaggacatcaaaatgcccttctaagcggattgcttgctcttaaagatcatgttgacgctgctatttcaataaataaaggaacatgcgggcggcccactgatgtgttcgctaaaaggatcacaaatagtgctccccgctcgtacggttaa

SEQ ID NO: 50788 - protein, 132 aa, Unknown
  Obtained from environmental sample
  misc_feature (1)..(132): Xaa is any amino acid
MSNKYDKPVLAIIVPCYNEQEILPETAKKLSDKLQKLISEEIIDKKSTLLFVDDGSSDNTWNFIEKLYSENSLVYKGIKLSKNRGHQNALLSGLLALKDHVDAAISINKGTCGRPTDVFAKRITNSAPRSYG

SEQ ID NO: 50789 - DNA, 879 bp, Unknown
  Obtained from environmental sample
  misc_feature (1)..(879): n is a, c, g, or t
atgccggctagacgaggaggccacacgatctgcgagataccgaaaggcattttggcgatttcaaataaagaacaaccttatgacgtgttcgtctgttacaaggaaacaacagacagcggaagccggacaaaggacagtaccatagctcaagacatttactatgaactgacaaaagacggatacaaagtatttttcgccagaatcacccttgaagacaaactcggtcagcaatacgagccttatatattcagtgcgatgaatagcgcgaaagtcatgcttgttattggtacaaaaaaagaacacttcgaggcgatatgggtaaagaatgagtggagccgttttctcgccatcatgaaaaaagaccgttcgcggctattgataccctgctacaaggacatggacgcttatgatataccggatgagttatccaatctacagagtcaggacatgtcaaaagtcggctttatgcaggacattcttcgcggcgttaaaaagatattggatgccaataaattagtggagaaagcgacatctactgctgttggaacagcgcctgccgctcccggagttgaatcactgatgaagcgcgggaaactgtttttagaagattcggattggaagcaggcaaacgaatattttgacaaggtactggacatagatcctgaatacgcacctgcttatgtgggtaagttgtgcgcggagttaaaagtacggcaggaagaattactttcacaaaatgagaaaccgcttcccgaaagtcattatcaaaaagcgttacgctttgccgatgttgactatctcgtaaaattggaaggatataataaagctattcaagatcgtatcgaagaagaaagaagtaaagaaccaggaacgtattga

SEQ ID NO: 50790 - protein, 292 aa, Unknown
  Obtained from environmental sample
  DOMAIN (190)...(223): Tetratricopeptide repeat
  misc_feature (1)..(292): Xaa is any amino acid
MPARRGGHTICEIPKGILAISNKEQPYDVFVCYKETTDSGSRTKDSTIAQDIYYELTKDGYKVFFARITLEDKLGQQYEPYIFSAMNSAKVMLVIGTKKEHFEAIWVKNEWSRFLAIMKKDRSRLLIPCYKDMDAYDIPDELSNLQSQDMSKVGFMQDILRGVKKILDANKLVEKATSTAVGTAPAAPGVESLMKRGKLFLEDSDWKQANEYFDKVLDIDPEYAPAYVGKLCAELKVRQEELLSQNEKPLPESHYQKALRFADVDYLVKLEGYNKAIQDRIEEERSKEPGTY

SEQ ID NO: 50791 - DNA, 759 bp, Unknown
  Obtained from environmental sample
  misc_feature (1)..(759): n is a, c, g, or t
gtggaggcttatcttaaaaagtgccttgactctatattggcacagacttacaaaaacttgcaaatcattcttgtgaatgacggttctactgacggctgtgctgatatttgcgatgcgtatgccaagcaggatagcaggtttttggtggtgcataaggagaatggcggtgtggttagtgctaggaatgccgggcttgcggtggcacaggggagctatgtagggtgggttgaccctgatgattatattgagccgaatatgtttgagagcttggttggggttttggagagggagaatgctgatgttgtgttttgcgagtatttttggcatttgcctgacgacgggtctaagcaccttatgaggttgcctcaccatagagactgcggtgtttcggttttggataagggtagtttgatgtatttgttttgtgagagagaaacaactactagctttatgttttggaataagctttacaagcggagcatttttgagggtaaccctataccagagggttatttggcggaggattttgctttttacatccctatgctgaggaggagcgagcggtatgctttttgctatatgccgctttacaatcatgttgagagggcttctagtttgcgttattttgatgaggaggcttggatgaagcagaagcaggtgcatcttccggcgctggctaattatgctcgtgagaatggttttaagttttggacattgttgatgggaaaatccataccccatacccaaacattgaattaa

SEQ ID NO: 50792 - protein, 252 aa, Unknown
  Obtained from environmental sample
  DOMAIN (2)...(164): Glycosyl transferase family 2
  misc_feature (1)..(252): Xaa is any amino acid
MEAYLKKCLDSILAQTYKNLQIILVNDGSTDGCADICDAYAKQDSRFLVVHKENGGVVSARNAGLAVAQGSYVGWVDPDDYIEPNMFESLVGVLERENADVVFCEYFWHLPDDGSKHLMRLPHHRDCGVSVLDKGSLMYLFCERETTTSFMFWNKLYKRSIFEGNPIPEGYLAEDFAFYIPMLRRSERYAFCYMPLYNHVERASSLRYFDEEAWMKQKQVHLPALANYARENGFKFWTLLMGKSIPHTQTLN

SEQ ID NO: 50793 - DNA, 306 bp, Unknown
  Obtained from environmental sample
  misc_feature (1)..(306): n is a, c, g, or t
atggcgacaatgaaagcgtcagaggcgattattaaaatccttgaaataaaaggtatcacagcggctttcggtatccccggggccggcatcaacgggccgtataaatacctgggggcaagcaaagttataaagcatttctgccaccgcccgaaagaagctcccttatcatgccgcccgtggctacttccgggccagcgggaaaaatgcggcgggcaatttgcacatccggggccaggcgctaccaaattcgttaccggtatttatccccggcaacccaaaacggaattccgggaaaattgccattaa

SEQ ID NO: 50794 - protein, 101 aa, Unknown
  Obtained from environmental sample
  misc_feature (1)..(101): Xaa is any amino acid
MATMKASEAIIKILEIKGITAAFGIPGAGINGPYKYLGASKVIKHFCHRPKEAPLSCRPWLLPGQREKCGGQFAHPGPGATKFVTGIYPRQPKTEFRENCH

SEQ ID NO: 50795 - DNA, 591 bp, Unknown
  Obtained from environmental sample
  misc_feature (1)..(591): n is a, c, g, or t
gtgaaccgaaaaaagccgaccgtgagccccgaagagtttcttgcgtacaaagtgccggaaggcgaaatcgtgcctcccatgccgtctttcggcgaggggtacaggtacaacataacggggcttatccacgatgagacaggcttcccgaccaacaacaacgccatcgcggcgaaaatgatggcacggctaatgaaaaagatcgaggacaatgtcaatgacattatccgctatgaggtaagcaacgcttcaagcgggggttctggctgcgacattctgatcctttcttatggtggaaccattcgcaccgtgaaagcggcggtaaagcttgctgccgaagtcggcataaaagcgggcgtctttaggccgatttcaatctggcctttccctgaaaaagctctcaaggcctgtgtcagggacaacaagattaagaacgtacttgtcgccgagcttaactacggccagatatcgcttgaggcggaaagaatcctaaagagcgacgccgaagtttcgcacattggcaaaattgacggcgacattttatatcccaatgaagtttttaaaaagatctgcgaggtagtaaaacatggctga

SEQ ID NO: 50796 - protein, 196 aa, Unknown
  Obtained from environmental sample
  misc_feature (1)..(196): Xaa is any amino acid
MNRKKPTVSPEEFLAYKVPEGEIVPPMPSFGEGYRYNITGLIHDETGFPTNNNAIAAKMMARLMKKIEDNVNDIIRYEVSNASSGGSGCDILILSYGGTIRTVKAAVKLAAEVGIKAGVFRPISIWPFPEKALKACVRDNKIKNVLVAELNYGQISLEAERILKSDAEVSHIGKIDGDILYPNEVFKKICEVVKHG

SEQ ID NO: 50797 - DNA, 756 bp, Unknown
  Obtained from environmental sample
  misc_feature (1)..(756): n is a, c, g, or t
atgcgggttttgcgaactgcgctgtcccgattacgcaattcacttgcaagaggaagaaaaatgaagctgctcatgggaaacgaagcctgcgtagaaggcgctatcgcggcaggaatgagattttttgcgggctatccaataacgccttccacggaaattgccgaggagtcttcaagaagactccccatggtgggcggcaagtttatccagatggaagacgagatagcgggcatggcggcgtgcataggcgcttcaatagcggggctaaagtccatgaccgccacaagcggcccgggcttttccctgaagcaggagaacatcggctacgcagccctcgcggagataccctgcgtcatcgtcaatgtccagcgttccggcccaagtaccggaatgccgacctcgccctcgcaggccgatgtcatgcaggcgcgttggggcactcacggcgaccatccggtgatcgcgctgtcgccgtcttcggttagggaaactttcgatttaactgtcgaggcgtttaacctgtcggaaaagtaccgcacgccggtgatccttttaatggacgaaataatcggccatcttcgcgagggagtcgagtttcctgacgcgtcggaattgaaagatcgtgaaccgaaaaaagccgaccgtgagccccgaagagtttcttgcgtacaaagtgccggaaggcgaaatcgtgcctcccatgccgtctttcggcgaggggtacaggtacaacataacggggcttatccacgatga

SEQ ID NO: 50798 - protein, 251 aa, Unknown
  Obtained from environmental sample
  DOMAIN (32)...(250): Pyruvate flavodoxin/ferredoxin oxidoreductase, thiamine diP-binding domain
  misc_feature (1)..(251): Xaa is any amino acid
MRVLRTALSRLRNSLARGRKMKLLMGNEACVEGAIAAGMRFFAGYPITPSTEIAEESSRRLPMVGGKFIQMEDEIAGMAACIGASIAGLKSMTATSGPGFSLKQENIGYAALAEIPCVIVNVQRSGPSTGMPTSPSQADVMQARWGTHGDHPVIALSPSSVRETFDLTVEAFNLSEKYRTPVILLMDEIIGHLREGVEFPDASELKDREPKKADREPRRVSCVQSAGRRNRASHAVFRRGVQVQHNGAYPR

SEQ ID NO: 50799 - DNA, 300 bp, Unknown
  Obtained from environmental sample
  misc_feature (1)..(300): n is a, c, g, or t
ttgaaatgcttgcagggaagaagggaaacctgccgtccaaaaagcacggaaacatcccgttataaggcgcgggttaaggagaagacgttggcagtgacagtgaatagcagaaaattagttgtcatcaataaagactggtgtacaggctgcggcatttgcgcggcgttctgcccggtgaaggttcttgaggtaaaactggaaaaagtcgtaatcgccaatccggatgcctgcgtaaaatgcgggttttgcgaactgcgctgtcccgattacgcaattcacttgcaagaggaagaaaaatga

SEQ ID NO: 50800 - protein, 99 aa, Unknown
  Obtained from environmental sample
  DOMAIN (70)...(93): 4Fe-4S binding domain
  misc_feature (1)..(99): Xaa is any amino acid
MKCLQGRRETCRPKSTETSRYKARVKEKTLAVTVNSRKLVVINKDWCTGCGICAAFCPVKVLEVKLEKVVIANPDACVKCGFCELRCPDYAIHLQEEEK

SEQ ID NO: 50801 - DNA, 696 bp, Unknown
  Obtained from environmental sample
  misc_feature (1)..(696): n is a, c, g, or t
ttgttaagtagaataaataaacataaatttatgggagaaatcatgtggtatgataaattattttcggaattggaagaaaataagaattcggaacaggcggtaaaaatggccgcttatatgcaaaataaatttgtattgttaggcataccaaaaccaaaactaaaagaaataataaagccttacataaaagaaggtaaaaaaaatgaattaaattggaaatttatagatatatgttggaaaaagaattatcgtgaagctcaatatgtcgcgatagaatatttaggcagtttaatcaaattattaactgataatgatttacctagacttaaaaaacttattgttaccaaatcatggtgggagaccgctgattcaattgatgagatagtcggaagtataatttttaaaaacaagcagttggaaaaagagatgctggaatggtcaaaggatgaaaatatttggttaagaagagtatcaatagattttcaacaaaaatacaaagaaaaaactaatcaaaaaatattggaacaaattatagtaaacaactttggaacggatgagttttttattaataaagccgttggatggagtttaagggaatattcaaaaataaataaaaaatgggttaaagattttattaatagatataagaatcaacttcataaattgagtataaaagaagcgtcaaagtatttatag

SEQ ID NO: 50802 - protein, 231 aa, Unknown
  Obtained from environmental sample
  misc_feature (1)..(231): Xaa is any amino acid
MLSRINKHKFMGEIMWYDKLFSELEENKNSEQAVKMAAYMQNKFVLLGIPKPKLKEIIKPYIKEGKKNELNWKFIDICWKKNYREAQYVAIEYLGSLIKLLTDNDLPRLKKLIVTKSWWETADSIDEIVGSIIFKNKQLEKEMLEWSKDENIWLRRVSIDFQQKYKEKTNQKILEQIIVNNFGTDEFFINKAVGWSLREYSKINKKWVKDFINRYKNQLHKLSIKEASKYL

SEQ ID NO: 50803 - DNA, 801 bp, Unknown
  Obtained from environmental sample
  misc_feature (1)..(801): n is a, c, g, or t
ttgcgttttgcgcctactatggaagattttgccgctttaatgactgcggaagcaaggcgcatggggcttacagttacgcgctttacggaagcgtcaggcatttcggaattcaacatgacaaccgccgccgaattcgcgcatttttgccgtcaatatgtaaaactccatccgcaaagcttaaaggactttcattccgtgcatgctttttcatttcctgttgcagataacgtacctgaggcttaccgcgcaaatgttaaaacaattactcaatacaaccgcaataacctgttaagaacttttcccggcgtagacggccttaaaacaggctatattgatgagtcaggctataatatcgcccttaccgctcagagagacaacacccgcgttatcgccgtaatcttcggcgcgcctgccgagccggggggaagtcgtatccgtgacgaagatggtatgcgccttttaacatgggcgtatgaaaatttcaggacagtccgccccgcggtaaccgggatagaaaatattcgcttatggaagggcagggcaaacacggcggaaattaaacttgctcaaactacggattttaccgctcctttcaaccgaggcaacagtctccggtttgatatttttattaacagaaaattatccgcaccgctacccgcaggggctcttgccggatattatgttatctatgatgaatacggcgaagtaaaccgagtgccgcttgtgacacagagaccttacgaaaaaggtaatatatttaaaagattattacactcaattatgctgttatttgttaagtag

SEQ ID NO: 50804 - protein, 266 aa, Unknown
  Obtained from environmental sample
  misc_feature (1)..(266): Xaa is any amino acid
MRFAPTMEDFAALMTAEARRMGLTVTRFTEASGISEFNMTTAAEFAHFCRQYVKLHPQSLKDFHSVHAFSFPVADNVPEAYRANVKTITQYNRNNLLRTFPGVDGLKTGYIDESGYNIALTAQRDNTRVIAVIFGAPAEPGGSRIRDEDGMRLLTWAYENFRTVRPAVTGIENIRLWKGRANTAEIKLAQTTDFTAPFNRGNSLRFDIFINRKLSAPLPAGALAGYYVIYDEYGEVNRVPLVTQRPYEKGNIFKRLLHSIMLLFVK

SEQ ID NO: 50805 - DNA, 450 bp, Unknown
  Obtained from environmental sample
  misc_feature (1)..(450): n is a, c, g, or t
atgaaaataactatcaacactgacaatcgctacaccgagacggaaatttcagtcaattgtaaccgtctaagtgatgatgttgaaaaaatacttgctacaatacggatgttagacatgaagttgacaggtaagaaagatggacaacagtattttcttggaatacctgatattgtttatattgacagtattgataaacatacttttatttacactgtaaaaggagtatttgagagctcttttaaattgtatgaacttgaagcaagactcactgaatgtaattttatgcgggcaagcaagaacacaatttttaatataaatcatatacaatcaattgagcctgatattgaccgaaggcttatcatgacgatgacaggtggaaataaactgattgtatcacggcaatataccactgcgataaaggaaaattggaggcttatatgggtaaagtaa

SEQ ID NO: 50806 - protein, 149 aa, Unknown
  Obtained from environmental sample
  DOMAIN (47)...(144): LytTr DNA-binding domain
  misc_feature (1)..(149): Xaa is any amino acid
MKITINTDNRYTETEISVNCNRLSDDVEKILATIRMLDMKLTGKKDGQQYFLGIPDIVYIDSIDKHTFIYTVKGVFESSFKLYELEARLTECNFMRASKNTIFNINHIQSIEPDIDRRLIMTMTGGNKLIVSRQYTTAIKENWRLIWVK

SEQ ID NO: 50807 - DNA, 645 bp, Unknown
  Obtained from environmental sample
  misc_feature (1)..(645): n is a, c, g, or t
atgaataataaaaattttggcatttatatatttttattggtgggtgtattatttaattgtactactaatacaacacaaaataaaaattttaatgcatcaagccaaggttggtatggagaattcttttgtagggtagtattaaatcgggtttcaatagatgggtataacgggaatggcggtatggaggaaataccatctgaaatagatggtatgcctgtaacagctattggaaaaaaagcattcgccaaaaaaaacgtgacaagccttattattcctgatactgttactactatcggagatgaggcgttcatggataatcagctcattgatttgattataccaaatagcgttattatcattggaagcatggcattttcaaaaaatcaacttagtaacgtaattatctcagataaaataaccaatcttggtggtttttcagaaaataagctgacatctgttattattcctaatggagttacttcaatacaaggtggagcatttatggataatctacttaccgatttagttataccagatagcgttacttttattggggatatggcatttaaggataatcccatttctagtttatctttatctaagaaccttgtttcaattggattagatgcatttattcataactga

SEQ ID NO: 50808 - protein, 214 aa, Unknown
  Obtained from environmental sample
  SIGNAL (1)...(27)
  misc_feature (1)..(214): Xaa is any amino acid
MNNKNFGIYIFLLVGVLFNCTTNTTQNKNFNASSQGWYGEFFCRVVLNRVSIDGYNGNGGMEEIPSEIDGMPVTAIGKKAFAKKNVTSLIIPDTVTTIGDEAFMDNQLIDLIIPNSVIIIGSMAFSKNQLSNVIISDKITNLGGFSENKLTSVIIPNGVTSIQGGAFMDNLLTDLVIPDSVTFIGDMAFKDNPISSLSLSKNLVSIGLDAFIHN

SEQ ID NO: 50809 - DNA, 555 bp, Unknown
  Obtained from environmental sample
  misc_feature (1)..(555): n is a, c, g, or t
atgccattgcaaacattgccgcttgttttgccaagcagcaagcgagcaagctctggcttgcgggcttcttctatgaggtttgttctctctgcaaagtctgtggctactgcgcgaattttgctcgcttgttcttctctgtgccttagctcttcatcttttttgctcgcgtggttttctctgcgctggaatatgcgtgtgtccaccacaatgccttttacgccacttggaacgcgcagcgaagaatcgcttacatcgccggatttagaaccgaaaatagcacggagcaatttctcttcgggggttagttcggattcgccttttggcgtaacctttccaaccaaaatatcgccgggtctaacctccatgccaatgcggacaatgccttcttcgtctagcaagctgcggtctttttcgctcacatttggaacatctttggttatctcttctttgccgcgcttggtttctctaacctcaatttcgtattcttcaatatggattgaagtgaatgtatctttaattgcgagttcttcggaaattattattgcatcttcgtag

SEQ ID NO: 50810 - protein, 184 aa, Unknown
  Obtained from environmental sample
  misc_feature (1)..(184): Xaa is any amino acid
MPLQTLPLVLPSSKRASSGLRASSMRFVLSAKSVATARILLACSSLCLSSSSFLLAWFSLRWNMRVSTTMPFTPLGTRSEESLTSPDLEPKIARSNFSSGVSSDSPFGVTFPTKISPGLTSMPMRTMPSSSSKLRSFSLTFGTSLVISSLPRLVSLTSISYSSIWIEVNVSLIASSSEIIIASS

SEQ ID NO: 50811 - DNA, 342 bp, Unknown
  Obtained from environmental sample
  misc_feature (1)..(342): n is a, c, g, or t
atgccaaagcgatgggaaagcgtattggctcttaaaaaaacaacgacaaaaatgcacagctattatgaactgcttgaggtaagggaaagcgcatcaactcaggaaataaaaaaagcgttcagggataaagccaaggagcttcaccccgacatttccggaaaatcaagcggcgatgaaatgaggaagctccttgcggcctacaaaaccttaagcgacaggaaccgccgctttgaataccacagggcttacgcgaggttcgccgatagataccgctttgattatcgaaactttctgcgcgaaaaagacgatcctgaaagcccgctcaaaagctatcttttttga

SEQ ID NO: 50812 - protein, 113 aa, Unknown
  Obtained from environmental sample
  DOMAIN (20)...(80): DnaJ domain
  misc_feature (1)..(113): Xaa is any amino acid
MPKRWESVLALKKTTTKMHSYYELLEVRESASTQEIKKAFRDKAKELHPDISGKSSGDEMRKLLAAYKTLSDRNRRFEYHRAYARFADRYRFDYRNFLREKDDPESPLKSYLF

SEQ ID NO: 50813 - DNA, 474 bp, Unknown
  Obtained from environmental sample
  misc_feature (1)..(474): n is a, c, g, or t
atgggtcttgatgaattcaggcaattcatatccggaaaattttctgttctggtcgggcagtcggggacgggaaagtcaagtctgataaacgccctgattccggagctggatataaagaccggcgaaataaatgaaaaatacagccgcgggaagcataccacaacccagggtgttttgctggagagcgtggatggaggcggagaaacgggttccatccgcgtcgttgacactccgggaattcgccgcttcgcgattgcggacgtaaaggcttcagagctgattttttatatgcgggaatttgcgccactggcgggtaagtgcagctacggcctttcctgttcacatcaaaccgaaatcggctgcaaaatcatggaagcggtttacgccggagtaattcacgaagatcggtacgaaagttttataagaattcaggatgaaattgccgggaagaatagctatcctgatacggattaa

SEQ ID NO: 50814 - protein, 157 aa, Unknown
  Obtained from environmental sample
  DOMAIN (13)...(125): GTPase of unknown function
  misc_feature (1)..(157): Xaa is any amino acid
MGLDEFRQFISGKFSVLVGQSGTGKSSLINALIPELDIKTGEINEKYSRGKHTTTQGVLLESVDGGGETGSIRVVDTPGIRRFAIADVKASELIFYMREFAPLAGKCSYGLSCSHQTEIGCKIMEAVYAGVIHEDRYESFIRIQDEIAGKNSYPDTD

SEQ ID NO: 50815 - DNA, 708 bp, Unknown
  Obtained from environmental sample
  misc_feature (1)..(708): n is a, c, g, or t
ttgaataggttatccaatgagttaggaaaattagaatttagaaaatctttgatagttgaaaataagcaagagttagagaatgaatactctaacataaatgtttctagtataaaaatgctttacgagcgagctaaactattaatcccaaatattcaaaaaacttttgaagatactttgagttttcataataaattactctctgaaaaattagaatttataacaaaagaacttcctcaaattgaaaagaatataaaaacaaataaaaacgaaattgaaaccttgactatagaagagcaaaaactaggtgacatattaagaaaaaatggctttgctgaagatatggaaaaagtgattatagaattaaataaacagcatgaaaaaaaaggacacttcgaagagcagctaagaattttacaagagtcaaaaaataatttagatgctgtagataaaagattgaatgagattgacaacgatataggttcaaacgattttctttttaaagaaagaataacagaatttaataaatatttttcagaaataacaaatgacctttatggagaatcttacttattaagttcatcaaaagaagaatgttatgatttagctgtaactaatgttgaaggaaatttaggtacagggaagaaaaaagtacaaattgctgcttttgattttgcgtatgttatatttgcagacaaatctccatattaa

SEQ ID NO: 50816 - protein, 235 aa, Unknown
  Obtained from environmental sample
  misc_feature (1)..(235): Xaa is any amino acid
MNRLSNELGKLEFRKSLIVENKQELENEYSNINVSSIKMLYERAKLLIPNIQKTFEDTLSFHNKLLSEKLEFITKELPQIEKNIKTNKNEIETLTIEEQKLGDILRKNGFAEDMEKVIIELNKQHEKKGHFEEQLRILQESKNNLDAVDKRLNEIDNDIGSNDFLFKERITEFNKYFSEITNDLYGESYLLSSSKEECYDLAVTNVEGNLGTGKKKVQIAAFDFAYVIFADKSPY

SEQ ID NO: 50817 - DNA, 450 bp, Unknown
  Obtained from environmental sample
  misc_feature (1)..(450): n is a, c, g, or t
ttgaatacagcgcaacggatcagagagcaaagtctgtactctaaaataatcctttccccaatggaaggcgttacggatttgccgtttcgccgatttatacgagagctttccaaagtgatgcaacctttttttgtttcggaatttttatccacaggtagctctctttttttaacccctgtaaatacaagggctgttcgctttgacaaagaagaagaaccattctgtatgcagttgtttgggcatagttcagagagactctccgctgcggctttgcaggcacaggaattgggggcggcttttgttgagctaaatgcgggttgccctgcaccaaaaatcgcaaacaaaggctctggctctggcttgctgagggatttgccaaatttgcaaaaaattttggaatccatgaaaagcgttttgaaagtcccgctgtttttaaaactgcaaaattag

SEQ ID NO: 50818 - protein, 149 aa, Unknown
  Obtained from environmental sample
  misc_feature (1)..(149): Xaa is any amino acid
MNTAQRIREQSLYSKIILSPMEGVTDLPFRRFIRELSKVMQPFFVSEFLSTGSSLFLTPVNTRAVRFDKEEEPFCMQLFGHSSERLSAAALQAQELGAAFVELNAGCPAPKIANKGSGSGLLRDLPNLQKILESMKSVLKVPLFLKLQN

SEQ ID NO: 50819 - DNA, 453 bp, Unknown
  Obtained from environmental sample
  misc_feature (1)..(453): n is a, c, g, or t
atggaaaaaacattcgctatggtaaaacccaatgcagttaaatctgggcttattgggaaaataatcgctcgctatgagtctgcaaggctatctgttgtggcacttcgctttaaacaaatgacacaggcagatgctgaaggtttttatgcggaacacgttggcaaaggatttttcgcagaacttgccaaattcatgacctctggtccctctgttcagcttgtgctcgcaggtgaaaacgccattgcaaaagttcgcgccatcaacggagcaacaaatccagaaaaggcagaacctggcaccatacgctacgactgggcaacctcaatgacagaaaatgcagtgcattcctccgatggcccagaaagcgcagcaagagaaatagccttctggttcaagcccgaagaaatttttgaatacagcgcaacggatcagagagcaaagtctgtactctaa

SEQ ID NO: 50820 - protein, 150 aa, Unknown
  Obtained from environmental sample
  DOMAIN (2)...(136): Nucleoside diphosphate kinase
  misc_feature (1)..(150): Xaa is any amino acid
MEKTFAMVKPNAVKSGLIGKIIARYESARLSVVALRFKQMTQADAEGFYAEHVGKGFFAELAKFMTSGPSVQLVLAGENAIAKVRAINGATNPEKAEPGTIRYDWATSMTENAVHSSDGPESAAREIAFWFKPEEIFEYSATDQRAKSVL

SEQ ID NO: 50821 - DNA, 906 bp, Unknown
  Obtained from environmental sample
  misc_feature (1)..(906): n is a, c, g, or t
ttgcggcgcgcgaacgcccgcggcaaggaactcccgccgatgcgtgaaagcggcgctggaagcgcgtctgtaaacgcctacggcgaaaccgggcgcgggtattggcagacgggcgtgcagacgatacgggcgcagggcgagaaccacccaagccatccgagcaatgtgatagtcagcgcgttcatggcggggcaagcgaaaaacgcccgcagtatcgcgtacagcgaaaccctttcccccacgctgaaaggcgcggcgagcggcttgaaccaaacgccaagtgttctgtgcgtggcgacggggcagagcgacgcgaacgtagcggcgaataatgacctcgcgcctacgcttacgctcaaccatgaagctccttatatctgcgtcgagccgcaaatcgcccggacgcttacggcgcggcacgattcaagcccatgcgccgatagagggcagaatatcgtggcgttcgcgcagaaccagcgcgacgaagtacgcgacttaaacgacgtggcgggctgtcttgccgcctatcacggcgtaaagcagcaaacctacgttatgcaagctgataagaattgcctgacaccgtgggatttacagcaatcacggatttacacgccggagggcaattcgccgacactcgcgggcgcggacggcggcgggggcagaaatccggcagggcttgtaatgacggaagttaatcctgtcgtcggaacactttgcggctccggcgcgggaacataccgagcggcaagaaactcaacggatatgcttgtcgtccacccggatataacgggtacgctctgcggctccggcgcggggaacctcacccacggcgggcaactgcaccaaacagacttagcggttgcctactgcttgcaagggaaacagataggccctccccaataa

SEQ ID NO: 50822 - protein, 301 aa, Unknown
  Obtained from environmental sample
  misc_feature (1)..(301): Xaa is any amino acid
MRRANARGKELPPMRESGAGSASVNAYGETGRGYWQTGVQTIRAQGENHPSHPSNVIVSAFMAGQAKNARSIAYSETLSPTLKGAASGLNQTPSVLCVATGQSDANVAANNDLAPTLTLNHEAPYICVEPQIARTLTARHDSSPCADRGQNIVAFAQNQRDEVRDLNDVAGCLAAYHGVKQQTYVMQADKNCLTPWDLQQSRIYTPEGNSPTLAGADGGGGRNPAGLVMTEVNPVVGTLCGSGAGTYRAARNSTDMLVVHPDITGTLCGSGAGNLTHGGQLHQTDLAVAYCLQGKQIGPPQ

SEQ ID NO: 50823 - DNA, 450 bp, Unknown
  Obtained from environmental sample
  misc_feature (1)..(450): n is a, c, g, or t
gtgacgacccaatcgggcgagggtgcccatactggcgacaatattgtgcggattcccgtctatgagcaggatgtcagcgcgggttttggcgttatcgttgacaccgagcctggagtggtctccctcgtcaactatgacggagactggctccgttcgcgcatcggcgtttcaccagcgcacatcattatgattcgggtcgtgggcgacagcatgtccccgactatcaacaacaacgactacgtgatgattgacatcgaggcgaccaagcggaatttccgcgatggcatctgggtcttccgcctcggcaatgccatccacgtcaagcgcgtccagcaggtcagcgccacggcgtttcaggcactcagcatcaatacagactaccccccgttcacgtttgacgaggacttccagttcatagggcgcgtggtctggtcggacaaactctggtag

SEQ ID NO: 50824 - protein, 149 aa, Unknown
  Obtained from environmental sample
  DOMAIN (65)...(135): Peptidase S24-like
  misc_feature (1)..(149): Xaa is any amino acid
MTTQSGEGAHTGDNIVRIPVYEQDVSAGFGVIVDTEPGVVSLVNYDGDWLRSRIGVSPAHIIMIRVVGDSMSPTINNNDYVMIDIEATKRNFRDGIWVFRLGNAIHVKRVQQVSATAFQALSINTDYPPFTFDEDFQFIGRVVWSDKLW

SEQ ID NO: 50825 - DNA, 618 bp, Unknown
  Obtained from environmental sample
  misc_feature (1)..(618): n is a, c, g, or t
atggaaagactaaaatactcttgcaatggtcagtggctttattcaaaaacggacaaattgatggatgtgtacgatccaagtatcggagaagtaatagcacaagcgccctgttgtacacaacaggagttgcaggcggttctcgacgcggcccaaacagcgtacaaaacctggtcgaaaaccccggtaatacggcggacacagattctattcaatttccgggatcttgtcgtaaaacacatggatgagcttaccatgctggttgcgcgcgaacacggcaaggtttgggcggaagccgaaggggacatccttaaagtcaaggaaccggtagaactggcctgcggcgcagccaccctaatgcagggcgagtctttaacggatacctcaagcggctatgattcggtcctgattcgggaacctatcggtgtctttggcggcatagtgcctttcaatttccccggcatgataccatttggctggatgacacccctctgtatcgctaccggcaattgtatcgttttgaaatcgtcaagcgctacccccatgaccagtatcaggcttttggaactggctatggaaagccgggcttccgccgggaatggtcagcgtaaatacctttga

SEQ ID NO: 50826 - protein, 205 aa, Unknown
  Obtained from environmental sample
  DOMAIN (12)...(205): Aldehyde dehydrogenase family
  misc_feature (1)..(205): Xaa is any amino acid
MERLKYSCNGQWLYSKTDKLMDVYDPSIGEVIAQAPCCTQQELQAVLDAAQTAYKTWSKTPVIRRTQILFNFRDLVVKHMDELTMLVAREHGKVWAEAEGDILKVKEPVELACGAATLMQGESLTDTSSGYDSVLIREPIGVFGGIVPFNFPGMIPFGWMTPLCIATGNCIVLKSSSATPMTSIRLLELAMESRASAGNGQRKYL

SEQ ID NO: 50827 - DNA, 312 bp, Unknown
  Obtained from environmental sample
  misc_feature (1)..(312): n is a, c, g, or t
gtggctgcgccgcaggccagttctaccggttccttgactttaaggatgtccccttcggcttccgcccaaaccttgccgtgttcgcgcgcaaccagcatggtaagctcatccatgtgttttacgacaagatcccggaaattgaatagaatctgtgtccgccgtattaccggggttttcgaccaggttttgtacgctgtttgggccgcgtcgagaaccgcctgcaactcctgttgtgtacaacagggcgcttgtgctattacttctccgatacttggatcgtacacatccatcaatttgtccgtttttgaataa

SEQ ID NO: 50828 - protein, 103 aa, Unknown
  Obtained from environmental sample
  SIGNAL (1)...(22)
  misc_feature (1)..(103): Xaa is any amino acid
MAAPQASSTGSLTLRMSPSASAQTLPCSRATSMVSSSMCFTTRSRKLNRICVRRITGVFDQVLYAVWAASRTACNSCCVQQGACAITSPILGSYTSINLSVFE

SEQ ID NO: 50829 - DNA, 408 bp, Unknown
  Obtained from environmental sample
  misc_feature (1)..(408): n is a, c, g, or t
gtggcacttcgtggagtcaaaaaaaacaagctttgggtcatcaaggcgcttgatcgcggcacacggcgaaccttggcctgggtgctcggcaatcgtgatgctgctaccttcaggagactctacaaaaaggtgaggcgcctgaagcgctgcacgttctataccgatgcctggcgggtgttcgcggaggtgctgcccaaaaagcggcacgtcgtcggcaaggcccacaccgtcgccatagagcgcgacaactccaacacccgccaccacctggcgaggttcacgcggcggacgaaggtcgtctcacgctcaagccgcgtggttgacctgacactgcggatttggcacgccgtcactaccaccgacttgttttgcagactacaggagatcgcattatctatatataagtga

SEQ ID NO: 50830 - protein, 135 aa, Unknown
  Obtained from environmental sample
  DOMAIN (1)...(117): IS1 transposase
  misc_feature (1)..(135): Xaa is any amino acid
MALRGVKKNKLWVIKALDRGTRRTLAWVLGNRDAATFRRLYKKVRRLKRCTFYTDAWRVFAEVLPKKRHVVGKAHTVAIERDNSNTRHHLARFTRRTKVVSRSSRVVDLTLRIWHAVTTTDLFCRLQEIALSIYK

SEQ ID NO: 50831 - DNA, 585 bp, Unknown
  Obtained from environmental sample
  misc_feature (1)..(585): n is a, c, g, or t
gtggaaaaaaaactccgctcccgcatcaggcggatcgaaaaggggtggaggaggctgggcccgatgaggctgatgttccaggacgaggcgcggttcgggcgcatctcggacccgaaggaaaaaaagtgcccgaagccccacaggccggtgtgccccacgacgctcggacgcgagcacacgtacgcctacggcgcggtgagcatgggggacggcgcgtgggacagcctggtgctgccgaggggcgacacggagtgcatgcagacgttcctggacagggtgtcaaagtggcacccgcgcgaccgcatagtcatggtcctggacggcgcgggctggcacaggggcaaggggctgagggtgccggcgaacatgaggctgctgttcctgccgccgcactcgccggagctgaacccggtggagaacatatgggacgagctgcgggagaagttcttcggcaacgtggtcttcgacagcatgaaggcgctggagaggcggctcgtcaggggcctgcggcacctctggaagcacccggagatcacaaggtccatctcaagctggccttggataattaacacacttcctaattag

SEQ ID NO: 50832 - protein, 194 aa, Unknown
  Obtained from environmental sample
  misc_feature (1)..(194): Xaa is any amino acid
MEKKLRSRIRRIEKGWRRLGPMRLMFQDEARFGRISDPKEKKCPKPHRPVCPTTLGREHTYAYGAVSMGDGAWDSLVLPRGDTECMQTFLDRVSKWHPRDRIVMVLDGAGWHRGKGLRVPANMRLLFLPPHSPELNPVENIWDELREKFFGNVVFDSMKALERRLVRGLRHLWKHPEITRSISSWPWIINTLPN

SEQ ID NO: 50833 - DNA, 672 bp, Unknown
  Obtained from environmental sample
  misc_feature (1)..(672): n is a, c, g, or t
gtgccgccagggcgaccacgtacagcctcctacacaggcacgggggagcaacgttcgccaccgacaggcgccacatctccgccgacccggcggcgcagacggagtggaaaaaaaactccgctcccgcatcaggcggatcgaaaaggggtggaggaggctgggcccgatgaggctgatgttccaggacgaggcgcggttcgggcgcatctcggacccgaaggaaaaaaagtgcccgaagccccacaggccggtgtgccccacgacgctcggacgcgagcacacgtacgcctacggcgcggtgagcatgggggacggcgcgtgggacagcctggtgctgccgaggggcgacacggagtgcatgcagacgttcctggacagggtgtcaaagtggcacccgcgcgaccgcatagtcatggtcctggacggcgcgggctggcacaggggcaaggggctgagggtgccggcgaacatgaggctgctgttcctgccgccgcactcgccggagctgaacccggtggagaacatatgggacgagctgcgggagaagttcttcggcaacgtggtcttcgacagcatgaaggcgctggagaggcggctcgtcaggggcctgcggcacctctggaagcacccggagatcacaaggtccatctcaagctggccttggataattaa

SEQ ID NO: 50834 - protein, 223 aa, Unknown
  Obtained from environmental sample
  misc_feature (1)..(223): Xaa is any amino acid
MPPGRPRTASYTGTGEQRSPPTGATSPPTRRRRRSGKKTPLPHQADRKGVEEAGPDEADVPGRGAVRAHLGPEGKKVPEAPQAGVPHDARTRAHVRLRRGEHGGRRVGQPGAAEGRHGVHADVPGQGVKVAPARPHSHGPGRRGLAQGQGAEGAGEHEAAVPAAALAGAEPGGEHMGRAAGEVLRQRGLRQHEGAGEAARQGPAAPLEAPGDHKVHLKLALDN

SEQ ID NO: 50835 - DNA, 414 bp, Unknown
  Obtained from environmental sample
  misc_feature (1)..(414): n is a, c, g, or t
ttgcgtatgaatttacgcaaaaaaggcattatttacaaagcggtaaaaaacagattgataagggaagcctttaaaaaggcaaacatcaaaggcttggactcttaccttaaaggtgctacctctattatgcttggtagcgaagaagacccaatgctccctgcccgtgaagttgttgaatttcacaaggcaaaccccgaaactttaattgctaaaggcatttcgctagatggttcctccttaaaagggagcgagctggaaaatctggcaaagatgcctggtaaaaatgagattcttggtcaagttatatccttaatgctttcaccgggtgcaaatttgatagctcttatcaaaggacctggctcaaagctggcgggacaaataaaggctttagaacagaaactggaaacaaagtaa

SEQ ID NO: 50836 - protein, 137 aa, Unknown
  Obtained from environmental sample
  misc_feature (1)..(137): Xaa is any amino acid
MRMNLRKKGIIYKAVKNRLIREAFKKANIKGLDSYLKGATSIMLGSEEDPMLPAREVVEFHKANPETLIAKGISLDGSSLKGSELENLAKMPGKNEILGQVISLMLSPGANLIALIKGPGSKLAGQIKALEQKLETK

SEQ ID NO: 50837 - DNA, 387 bp, Unknown
  Obtained from environmental sample
  misc_feature (1)..(387): n is a, c, g, or t
atggctacagatgtcaaaacactaggcgaccaaattgttgccctcacgcttttagaagcaaaagcattggctgattaccttaaagagactcatggtcttgaagctgccagcggtggcgcagttgttatggctgctcctgcagcaggtggtggcgcggctgcggcagaagaaaaaacggagtttgatgttgtattggtggatggcggagcacagaaactaaatgtgattaaagttctgcgcgctgctgttcccggactcggactcaaagaagcaaaagatttggtagacaaaggtaatgctcctgtgaaagaggcagttgccaaagctgaagccgaaaagcttaaaaaagacttggaagatgccggagcaaaggtcacgctgaaataa

SEQ ID NO: 50838 - protein, 128 aa, Unknown
  Obtained from environmental sample
  DOMAIN (60)...(128): Ribosomal protein L7/L12 C-terminal domain
  misc_feature (1)..(128): Xaa is any amino acid
MATDVKTLGDQIVALTLLEAKALADYLKETHGLEAASGGAVVMAAPAAGGGAAAAEEKTEFDVVLVDGGAQKLNVIKVLRAAVPGLGLKEAKDLVDKGNAPVKEAVAKAEAEKLKKDLEDAGAKVTLK

SEQ ID NO: 50839 - DNA, 363 bp, Unknown
  Obtained from environmental sample
  misc_feature (1)..(363): n is a, c, g, or t
ttgtggtgcgcctgcgcgctcacgcaggctgctagcataaaagtacattgtaaaaaaggcacgcattatttcagcgtgacctttgctccggcatcttccaagtcttttttaagcttttcggcttcagctttggcaactgcctctttcacaggagcattacctttgtctaccaaatcttttgcttctttgagtccgagtccgggaacagcagcgcgcagaactttaatcacatttagtttctgtgctccgccatccaccaatacaacatcaaactccgttttttcttctgccgcagccgcgccaccacctgctgcaggagcagccataacaactgcgccaccgctggcagcttcaagaccatga

SEQ ID NO: 50840 - protein, 120 aa, Unknown
  Obtained from environmental sample
  misc_feature (1)..(120): Xaa is any amino acid
MWCACALTQAASIKVHCKKGTHYFSVTFAPASSKSFLSFSASALATASFTGALPLSTKSFASLSPSPGTAARRTLITFSFCAPPSTNTTSNSVFSSAAAAPPPAAGAAITTAPPLAASRP

SEQ ID NO: 50841 - DNA, 336 bp, Unknown
  Obtained from environmental sample
  misc_feature (1)..(336): n is a, c, g, or t
atggcgaggttatccatgatagagcggaaatcctattcatttaatgagtttcgtttgaaactgccggaattgcttgaaatgcaaaaagcttcttatgaacgttttttgcaggcgggagttcccgccaataatagacgggccgaatggcttgaaggcctatttcgcgatgcttttcctgtgtctgacagcaggggacttttggttttgcgctatagccactacgctttggctatgccgaggtattccataaaggaatgcatggaacacggaatcacttattctcgccggctcataattcatttggagcttccaaccttcaaggaaaatggcaaataa

SEQ ID NO: 50842 - protein, 111 aa, Unknown
  Obtained from environmental sample
  misc_feature (1)..(111): Xaa is any amino acid
MARLSMIERKSYSFNEFRLKLPELLEMQKASYERFLQAGVPANNRRAEWLEGLFRDAFPVSDSRGLLVLRYSHYALAMPRYSIKECMEHGITYSRRLIIHLELPTFKENGK

SEQ ID NO: 50843 - DNA, 480 bp, Unknown
  Obtained from environmental sample
  misc_feature (1)..(480): n is a, c, g, or t
ttgagacttaaacagtattgttgtttactgctgctgtttaccgtgaaaaccgtttgctttgcccagtctgaggcggagttctccggtttttctgaaacacttgcattttccccggcctttgacatattccgtccgcttcccacggcggcggaacaggaagttaaacaaaaccagtcgatctttgcaaacgcctcacagggtgttaaagatctgcggagggcggaaatcgtctttttcggttcctttccgtttacggtgttttttaccaaaaccattatggatctatcccggttcgcggctcataattgggaccagcgctatgctccctggccttttaaatcccccggagcggtgtcaatgagcgacaatgagcttaaattgatgtttagtatcacgatttccgcttctctggtgatttccgtagtggattatttcctgacaaggaacaaacggaaagcctctttgcccgactacaattag

SEQ ID NO: 50844 - protein, 159 aa, Unknown
  Obtained from environmental sample
  SIGNAL (1)...(21)
  misc_feature (1)..(159): Xaa is any amino acid
MRLKQYCCLLLLFTVKTVCFAQSEAEFSGFSETLAFSPAFDIFRPLPTAAEQEVKQNQSIFANASQGVKDLRRAEIVFFGSFPFTVFFTKTIMDLSRFAAHNWDQRYAPWPFKSPGAVSMSDNELKLMFSITISASLVISVVDYFLTRNKRKASLPDYN

SEQ ID NO: 50845 - DNA, 627 bp, Unknown
  Obtained from environmental sample
  misc_feature (1)..(627): n is a, c, g, or t
atgccgtttccgaaagattttatttggggtacagccaccgccgcctatcaggttgaaggcgcggcgtttgaggacggcaagggtttggggatttgggacgtcttttgccgccgtcccaacactatttggcaggggcataccggcgaaaccgcctgtgaccactaccatcgctatcttgatgacgtaggcataatgaaggaactttgtgtcaacgcctataggatggaggtcgcgtggccgcgtatcatccccgacggaaccggtgccgtaaatcccaagggtctcgatttctacgataaacttatcgacgcgctgctgactgccggcatagacccgtgggttactttgtaccattggaatctcccgcaaacgctgcaacagcgcggcgggtggatgaatcccgaatcctccaagtggtttgctgattacgcgtccgtcgtcgtcgataaattttcagatcgtgtagttcattggatgacgattaacgagccgcaggtgattatcaaccacggcatgtttaccggagtccacgcccccggttacaagctcacgatgggcgaggcgcttgccgccggccacaaccctgcttttggcgcaccgtcgcgccgtttccgttataagggataa

SEQ ID NO: 50846 - protein, 208 aa, Unknown
  Obtained from environmental sample
  DOMAIN (2)...(208): Glycosyl hydrolase family 1
  misc_feature (1)..(208): Xaa is any amino acid
MPFPKDFIWGTATAAYQVEGAAFEDGKGLGIWDVFCRRPNTIWQGHTGETACDHYHRYLDDVGIMKELCVNAYRMEVAWPRIIPDGTGAVNPKGLDFYDKLIDALLTAGIDPWVTLYHWNLPQTLQQRGGWMNPESSKWFADYASVVVDKFSDRVVHWMTINEPQVIINHGMFTGVHAPGYKLTMGEALAAGHNPAFGAPSRRFRYKG

SEQ ID NO: 50847 - DNA, 585 bp, Unknown
  Obtained from environmental sample
  misc_feature (1)..(585): n is a, c, g, or t
atggtatgtcaaggtatcttcttgttgaaagcgttttttgacgaactcgccgatctgctggtggaaggggatatcggcgcacaggaggccttcggtactgtagaattactgcaacaggcatgtagaaaagaaaaaatatcccagcctgaggaagcgcgggaaaggcttgcccttttgctggaaaaaatactggttgaaggcgtgtcttccgtggttaattcttcattaatagactgctccaggcagacggtaattctcctgctgggagttaacggcgtgggtaagactaccacggcggcaaagatagcttcaatgtataaggagcatggccggaatccggatctggccgcggctgacactttccgcgccgccgcaatcaatcagcttaaaaaacaccgccaagcgattgggtctcagggttgtcctcccccggcatgggggccaaccccgcctccgtcgtttatgacccgaaaaaagccttcttttcccatgaaaaaccaaaggcgggggcgccataaatggcgttcgtcatccccgaaacccccggggaaggatttcaccccaaaattcttccccttgttttaa

SEQ ID NO: 50848 - protein, 194 aa, Unknown
  Obtained from environmental sample
  DOMAIN (81)...(192): SRP54-type protein, GTPase domain
  misc_feature (1)..(194): Xaa is any amino acid
MVCQGIFLLKAFFDELADLLVEGDIGAQEAFGTVELLQQACRKEKISQPEEARERLALLLEKILVEGVSSVVNSSLIDCSRQTVILLLGVNGVGKTTTAAKIASMYKEHGRNPDLAAADTFRAAAINQLKKHRQAIGSQGCPPPAWGPTPPPSFMTRKKPSFPMKNQRRGRHKWRSSSPKPPGKDFTPKFFPLF

SEQ ID NO: 50849 - DNA, 597 bp, Unknown
  Obtained from environmental sample
  misc_feature (1)..(597): n is a, c, g, or t
atggggaaagttttttgtttgccggttggccctacaatggggggccggctcaatggcaacctttacgagcttgccccggagcccagggtttggggtgaaagggtctggggaggctttcagggggatctaagcatggttggggtcttgatggacgggcttcaaagagggtcatggacaagattggaactcatacttacctacacccttgcggtcaatgtttcgggccagggtatggttacgcccaatggcggcacctacaatgaaggtacatcggttactctgacagctattcgttcaacggggtatcgggtacggtggtcaggcgacgcatcgggtacggctaatacagtcacggttatcatggacagaaataaaacggtcacggcaacgtttgaacaaatacctacctacacccttacggtcaacgttaccggccagggcacggtttcccccaatggcggcacctacaatgaaggtacaacggtttcgctgaaacctaccccgtcaacggggtggcagttcgtgcgctgggaaggcgatttgtcaggcaatgctaaccctgcccagatcattatggacagtaacaagacggtatag

SEQ ID NO: 50850 - protein, 198 aa, Unknown
  Obtained from environmental sample
  misc_feature (1)..(198): Xaa is any amino acid
MGKVFCLPVGPTMGGRLNGNLYELAPEPRVWGERVWGGFQGDLSMVGVLMDGLQRGSWTRLELILTYTLAVNVSGQGMVTPNGGTYNEGTSVTLTAIRSTGYRVRWSGDASGTANTVTVIMDRNKTVTATFEQIPTYTLTVNVTGQGTVSPNGGTYNEGTTVSLKPTPSTGWQFVRWEGDLSGNANPAQIIMDSNKTV

SEQ ID NO: 50851 - DNA, 819 bp, Unknown
  Obtained from environmental sample
  misc_feature (1)..(819): n is a, c, g, or t
atgtcacgaaaaacagcacagctatttgatttaatgttcaaaagcataataaaggatgcaagctcatccgcagttgtgcatttgataaatggcatttacaaaaagaactatccattagatacacgtgtgactattgaacccaacgagcttataaaagaacaccctaaatccgggaaaatggagaaaatagtctccgacataataataaccctgcatagcgaaaacaaaaaagacacttttttattggaagcacagatagatgacgatttggagatgatacttaggattttcaattacggcactttaattgccctagataaaaagaccgtttctgctgacggttcttgtatgaaaatagagatgccctctcctgtggttatttactgggaaacaagcaatacgaaagatattgtttctgttgagataaagtttccaaataaaaagagcataacgtatgagataccaacgttcaaggtgttgcagcattccgtttccgagttggagaatatggcgttgctgctgcctttttatattttgaaaatccgcaaggagttgggtaaaaaaggcattgataccgcaaagagaaaggcattatccaagaggttggagggttacgtgatagatataggcaaagttttcaaaaggcttgttaaaaataactatattacggctaaggatgcagctatgcttttgcgtaggctgctgactatgaatgtggaactctacggtaagtataaggagtttgtggaggtagatatgacgttgaagcagttggtagatacaggtatagacgaggctatgacaactcggccaatctga

SEQ ID NO: 50852 - protein, 272 aa, Unknown
  Obtained from environmental sample
  misc_feature (1)..(272): Xaa is any amino acid
MSRKTAQLFDLMFKSIIKDASSSAVVHLINGIYKKNYPLDTRVTIEPNELIKEHPKSGKMEKIVSDIIITLHSENKKDTFLLEAQIDDDLEMILRIFNYGTLIALDKKTVSADGSCMKIEMPSPVVIYWETSNTKDIVSVEIKFPNKKSITYEIPTFKVLQHSVSELENMALLLPFYILKIRKELGKKGIDTAKRKALSKRLEGYVIDIGKVFKRLVKNNYITAKDAAMLLRRLLTMNVELYGKYKEFVEVDMTLKQLVDTGIDEAMTTRPI

SEQ ID NO: 50853 - DNA, 669 bp, Unknown
  Obtained from environmental sample
  misc_feature (1)..(669): n is a, c, g, or t
atgttaatctttcctgcacaagatgctaaaatcctaattcgccttgcgctgaacgaggatgttcgcactggtgattatacgagtttatggactttgccagcagggcaagttcaaacagcaaaactcattgcaaaagaagatggaattgtggcggggcttcctataattgaacttgtttttgccgagcttggaggcaaagttaaaattgagacatacattcaagacggcgacctagttaaggttggtactcaaattgcaagcataacaggagaaacaaaaattcttttatgcggcgaacgaggtatgctcaattttttgcaacagctctcaggggttgcaacaatcacaaataaattcgcaaccgttctcaaaggcaaaaaaaccaaagttttagatactcgcaaaacaatacctggttttagaaccttgcaaaaatacgcagtgcttgctggtggtggttcaaatcatcgcatgggcttgtgggatatggttttggtgaaagacaatcacattgccgccgcaggcggagttttggaagcgtgggaggctgtgaaaaaacaaaacatccaaaacttgaaagttgaaattgaagtagagaatttgaaacaattgaaattcctcttggggcttggggttaatcagcattatgctagacaacatgaacattga

SEQ ID NO: 50854 - protein, 222 aa, Unknown
  Obtained from environmental sample
  DOMAIN (112)...(221): Quinolinate phosphoribosyl transferase, C-terminal domain
  misc_feature (1)..(222): Xaa is any amino acid
MLIFPAQDAKILIRLALNEDVRTGDYTSLWTLPAGQVQTAKLIAKEDGIVAGLPIIELVFAELGGKVKIETYIQDGDLVKVGTQIASITGETKILLCGERGMLNFLQQLSGVATITNKFATVLKGKKTKVLDTRKTIPGFRTLQKYAVLAGGGSNHRMGLWDMVLVKDNHIAAAGGVLEAWEAVKKQNIQNLKVEIEVENLKQLKFLLGLGVNQHYARQHEH

SEQ ID NO: 50855 - DNA, 723 bp, Unknown
  Obtained from environmental sample
  misc_feature (1)..(723): n is a, c, g, or t
atgcttatgggttcaggtcactcagattatacagatgaacacaaagatgcaatttgcgaaataataaatcaaatcaccggctcctgcataacggttatggattcccagcttcatttgtcaatagatttcgggcaggcttcagttagcgaatttagtggaaaaaatgattttaaaggcggtgcggttgcaactgttttagttaagatagaagaatttccagacagaaaaatattgattgttttggaagatgctttgtttttaggaataaagtcaaaaatttcttctaaagtgtcttttgccagctcagatacaagccttgcaagtcttgggctttcttcatcttcagcatcttctgtacctgccgctggtggaggcattcctagtggtggcggcggtgctccggttacggctcctcctgctcttacgccgatgcattctggcggtccctttggttccacaggtaataaagctcttgatttgctaatggatattgaactgccaatagtcatagaacttggcagaacgcaaatgagcttaaagcgaattttagaacttggtcccggtgccattgttgaaatggacaggcttgctggcgaaccagttgatattttaatcaacggaaaggttgttgcacgtggtgaagttgttgttgttgacgaaaactttggcgtacgcattcttgcccttgtttctccggaagagagattaaaacttttgagataa

SEQ ID NO: 50856 - protein, 240 aa, Unknown
  Obtained from environmental sample
  DOMAIN (157)...(233): Surface presentation of antigens (SPOA) protein
  misc_feature (1)..(240): Xaa is any amino acid
MLMGSGHSDYTDEHKDAICEIINQITGSCITVMDSQLHLSIDFGQASVSEFSGKNDFKGGAVATVLVKIEEFPDRKILIVLEDALFLGIKSKISSKVSFASSDTSLASLGLSSSSASSVPAAGGGIPSGGGGAPVTAPPALTPMHSGGPFGSTGNKALDLLMDIELPIVIELGRTQMSLKRILELGPGAIVEMDRLAGEPVDILINGKVVARGEVVVVDENFGVRILALVSPEERLKLLR

SEQ ID NO: 50857 - DNA, 318 bp, Unknown
  Obtained from environmental sample
  misc_feature (1)..(318): n is a, c, g, or t
gtggaaggagtgactttcacaggaagcgtcaaagaggatttggcaatatcacttgaaaaggcattccaggatatttccgtgctaatacccaaagacgatgagcagagggaatctttgcactcggttcgcaagatagtgacaacggcagggaacacgcgctacgatgcagcagaaacaaaagcggggcacggcgaccatttctgggctttggcgcttgcgcttcacgcaggcgggaagcaaaaaggtatgccctgggcgataagctcaaacccgtgggacggacccggaagcgcgaaagcgattttaaaggggttttaa

SEQ ID NO: 50858 - protein, 105 aa, Unknown
  Obtained from environmental sample
  misc_feature (1)..(105): Xaa is any amino acid
MEGVTFTGSVKEDLAISLEKAFQDISVLIPKDDEQRESLHSVRKIVTTAGNTRYDAAETKAGHGDHFWALALALHAGGKQKGMPWAISSNPWDGPGSAKAILKGF

SEQ ID NO: 50859 - DNA, 789 bp, Unknown
  Obtained from environmental sample
  misc_feature (1)..(789): n is a, c, g, or t
gtgcgctgttttgacgacggcaacattgtccatgtgaacggttccgtcgatcccctgcgcgatatcgaaaccatcgagaccgagttcatcctggccgacatccagagcgtggaacgccgcctggagcgtctgcaaaaacaggccaagggcgacaaggacgcccgcgcggcggccgagtgcatgaccaggctgctgcaacacctcaacagcggccgggcggcctccgccttcgcggttcagggcaatgatctgtttcaggccgcctggaacgaactgggtctgctctcggctaagaccgtcatttactgcgccaacgcggatgaaggccatctggcgaaggacaacgaacacatgctggctctgcgcgccttcgccgccgggcgcggggccggggtcgtgactgtctgcgcccgcctggaagaagaactgcacggcatgccggaagcggagcaggcggacatgttcgccgcgtacggcatcaaggagagcggattggcccggatcatccgcgcgagctacgaggcgctcgggctgatcagctattttacggccggggaaaaggaggtgcgggcctggaccatctgccggggctggaaagcccctcaggcggccggggtgatccataccgactttgaacgcggcttcatccgggcggaaatcgcttcctatgaagactatatgcggctcggctccgaagcggcctgccgcgccgttggtctgttgcgcgtggaaggcagggactatatcatgcgcgatggggatgtggcgcattttctgttcaacgtttga

SEQ ID NO: 50860 - protein, 262 aa, Unknown
  Obtained from environmental sample
  DOMAIN (178)...(261): Protein of unknown function (DUF933)
  misc_feature (1)..(262): Xaa is any amino acid
MRCFDDGNIVHVNGSVDPLRDIETIETEFILADIQSVERRLERLQKQAKGDKDARAAAECMTRLLQHLNSGRAASAFAVQGNDLFQAAWNELGLLSAKTVIYCANADEGHLAKDNEHMLALRAFAAGRGAGVVTVCARLEEELHGMPEAEQADMFAAYGIKESGLARIIRASYEALGLISYFTAGEKEVRAWTICRGWKAPQAAGVIHTDFERGFIRAEIASYEDYMRLGSEAACRAVGLLRVEGRDYIMRDGDVAHFLFNV

SEQ ID NO: 50861 - DNA, 522 bp, Unknown
  Obtained from environmental sample
  misc_feature (1)..(522): n is a, c, g, or t
atggaggcggacttggccgatcccgacattctcgcgctgcggcggacggcggacagggtcgcttgcgaggcgcgcctgctgcgcggcatggtacgcttccaaaaaacggcgcaaggcgtgtattttgccgccataggccccaggcacgactgcctgacgctgcttgtgccgcatttccgggacaggttttccggcaggcagtggatgctgtacgatgtgaagcgcggatatggaatcttttttgacggcatccgttgccatgaggcgtttctgccggaggaggcgcatgacaacggcaagctgcgtgacgcgttgcgggccgaggaggaaaaagcgtttcagaccttgtggaaggggtatttcaaggccctgagcatcaaggaacgggagaacccgaaactgcaacgccgttgcatgccccggcgtttttggccctatctgacggagatgcaagaggaagaggaacccggcgtcggccggcatgggtcggcagaagcggcacatgtgcgtccgcgccggtga

SEQ ID NO: 50862 - protein, 173 aa, Unknown
  Obtained from environmental sample
  misc_feature (1)..(173): Xaa is any amino acid
MEADLADPDILALRRTADRVACEARLLRGMVRFQKTAQGVYFAAIGPRHDCLTLLVPHFRDRFSGRQWMLYDVKRGYGIFFDGIRCHEAFLPEEAHDNGKLRDALRAEEEKAFQTLWKGYFKALSIKERENPKLQRRCMPRRFWPYLTEMQEEEEPGVGRHGSAEAAHVRPRR

SEQ ID NO: 50863 - DNA, 1341 bp, Unknown
  Obtained from environmental sample
  misc_feature (1)..(1341): n is a, c, g, or t
atggcggagattttggttgtacgcggagccagcagggggaatgcgtccataaaatcgttaaccaatacggaatctattttaacatctcaggggaaggaactatctccccttcgggcctgcacaaacttttttccaaaaaggaagaaagttgagcttgaattcagcctgtacccccaactgggagggctgggtattcccgccaggcggccgcagttaaagaagcatccggccgcggagaatgacgaaaatgaggataatgactctgatcccaatctcgtggattttacggaaagaaaaaaacaaatactgaccgccgccggcaaggatcccggcaagattatgcggcagatgaaggaacacgaggacagggaagcgggccagcagctgataatcaacaagctcaacgaaataatggaaaagcaggagcagcttaacgcgaaaagcgcgcccaggcaggaccaccccagcctgttgcgcataacgcagatcctccggcaaaacgaattttcggaacgctatattaacggccttttggacagggcgcgcaaggagctgcccctggaaacgctggatgattatgccgcggttcagaatcagttccttgtctggattggggaaagcattaaaattttcagcatgccgcagaaggaggagggctcttcgggctccgccgatatcgccgcgggccgggtcttgattttggtcggccccacaggggtaggcaagaccaccaccatcgccaaactggccgtggtttacggcgtcggcagcgtggacagggcggcgctttccgtccgggtatacaccattgacacattcaaaatcggcggaaccgaacagcttgaaaaatactgcgaaataatggaagtgcccttcggcattattaacaatcagaccgagttgagaaaagaaattgacatgtaccgcgaagaaaccgatctgattctgattgataccataggaagcagcccgaacgatttcgtaaaactgggtgagatgaaagcgcttctgaacgcctgcggctcaaaagccgaagtttaccttgtgctttccgccggtaccaagaccaacgatatagaaaatattctaaggcagtttgaaccgtttaactatcaggcggttttacttaccaaaatggatgaaaccaagaccgtgggcaatataatttccgcgcttgcggaaaagggaaaaccgctgtcattcatcacgagcgggcagcaaattcacaaggatattaaaaaagcgaacgtaatcggcttccttatcaacctgccaggtttcaacatcgacagggttgaaatggagaagcgtttccccaccgcgcaggcggatataatttaa

SEQ ID NO: 50864 - protein, 446 aa, Unknown
  Obtained from environmental sample
  DOMAIN (228)...(426): SRP54-type protein, GTPase domain
  misc_feature (1)..(446): Xaa is any amino acid
MAEILVVRGASRGNASIKSLTNTESILTSQGKELSPLRACTNFFPKRKKVELEFSLYPQLGGLGIPARRPQLKKHPAAENDENEDNDSDPNLVDFTERKKQILTAAGKDPGKIMRQMKEHEDREAGQQLIINKLNEIMEKQEQLNAKSAPRQDHPSLLRITQILRQNEFSERYINGLLDRARKELPLETLDDYAAVQNQFLVWIGESIKIFSMPQKEEGSSGSADIAAGRVLILVGPTGVGKTTTIAKLAVVYGVGSVDRAALSVRVYTIDTFKIGGTEQLEKYCEIMEVPFGIINNQTELRKEIDMYREETDLILIDTIGSSPNDFVKLGEMKALLNACGSKAEVYLVLSAGTKTNDIENILRQFEPFNYQAVLLTKMDETKTVGNIISALAEKGKPLSFITSGQQIHKDIKKANVIGFLINLPGFNIDRVEMEKRFPTAQADII

SEQ ID NO: 50865 - DNA, 1122 bp, Unknown
  Obtained from environmental sample
  misc_feature (1)..(1122): n is a, c, g, or t
gtgcggctttgtacaacgcgcactgtaaggccgaatatccgggaatatgcgcgctctgtgatgaatactatacctacaacttttaacgaaaatctccccacttataccgcggtgggaggcaacgacagaagggcctccacgggcctttcggcggtgatattgaacaggggagggaggtatccccgttacaacttctttgaggaactggaaaagctcggatttgactatgttatttcagttgaaagctccgccgcccattacgatttggaatccctgacatcgagttttccttttgtccgcttcattattcctaaagagggcttaagccggggagaagagatcaacctggccgcgtccgaattgtccagccccctgttttttgttctctggaacgatctcaggtttcttcgaagcggcggggcggatcgaatggcggagcgcctccttgccggagacagagaagaaaaaaatatttacaaaaggctttgcacaacgcctttgatccaggacgcgcgttctgataccatgcccactctgattgttccagtgcttatttccgaaaaaaaaaccggaaaggtgataagaaccattccgttcatcccacggaaggaagggcaattaaccttgtacccctttgacggaatcggcatctacgacagggaacgctttatccgcctgaacggatttgatccttacattaaaaatttttactggcagctcatggattttggttttcgttccagcctttggggagaagaaatcgcctctacgaaactgattaaactttcgtacgaggggcttgtccccgaagaagacagtacggcgggcgaagactttttaagattctttctgaaaaatcttgctccggttttcaagggcgattacgcgcacatcccgttgcggcgttttccgggatacttaaaaagaaggggcggccttttaaccgcctgggatgaattttcttccgcgcgcgcctgggtcaaaaccaaccgctttcgtttcagcaccgacgccagaataatgacggagcttttctcttcggttgaaactgaggctgagactgagagcgaggacgatagggatgattcagcgcgggatgacttaccaatggaggagaagtga

SEQ ID NO: 50866 - protein, 373 aa, Unknown
  Obtained from environmental sample
  misc_feature (1)..(373): Xaa is any amino acid
MRLCTTRTVRPNIREYARSVMNTIPTTFNENLPTYTAVGGNDRRASTGLSAVILNRGGRYPRYNFFEELEKLGFDYVISVESSAAHYDLESLTSSFPFVRFIIPKEGLSRGEEINLAASELSSPLFFVLWNDLRFLRSGGADRMAERLLAGDREEKNIYKRLCTTPLIQDARSDTMPTLIVPVLISEKKTGKVIRTIPFIPRKEGQLTLYPFDGIGIYDRERFIRLNGFDPYIKNFYWQLMDFGFRSSLWGEEIASTKLIKLSYEGLVPEEDSTAGEDFLRFFLKNLAPVFKGDYAHIPLRRFPGYLKRRGGLLTAWDEFSSARAWVKTNRFRFSTDARIMTELFSSVETEAETESEDDRDDSARDDLPMEEK

SEQ ID NO: 50867 - DNA, 312 bp, Unknown
  Obtained from environmental sample
  misc_feature (1)..(312): n is a, c, g, or t
gtgaccgctttagttttgcaggcgcgccttgattcaagccgtcttaacggcaaggcattgctgtcccttggggacaagcctatggtcttcagggtgatggaagcgcttgcttttttagcctgcgaaaaaaagatactggcctgccccgaagacagcgtttccgcttttactcccctcgcggaagaagccggctttattttggttcacggccccgaaagaagacgtgcttgcgcgttactgccttgcgattcgcaagtcaggcgccgacagggtgatccgcgcgaccgccgacaatccctttgtttttattga

SEQ ID NO: 50868 - protein, 103 aa, Unknown
  Obtained from environmental sample
  misc_feature (1)..(103): Xaa is any amino acid
MTALVLQARLDSSRLNGKALLSLGDKPMVFRVMEALAFLACEKKILACPEDSVSAFTPLAEEAGFILVHGPERRRACALLPCDSQVRRRQGDPRDRRQSLCFY

SEQ ID NO: 50869 - DNA, 492 bp, Unknown
  Obtained from environmental sample
  misc_feature (1)..(492): n is a, c, g, or t
gtgcatcgagatacaggcattgctatattgcaagcaacccttgactctacaggcaaattgggctttttccctcgctatccgtatcaattaatcaactataccttcggttctgccttcgtttacggatggaaagaagctgtagatttgctcaaagcgaatacaaaaggacttggcaaggtattttcaggtcaagagaaagctacggaatctgttcaaggacctattggtatagcgcaaatttacggcaaacaatggatttggtcgcggttttggtacgtaacagccatcatttcgctgattttagcgtttatgaatttcttgcccattcctgcattagacggtggacatattatgtttacgctttgggaaatagtgacacgccgcaaaccgagcgataaattcctcatggccactcaacaaatcggcatgcttattctctttgcattgatggtgtttgcaattagcaacgatttgttcaagatatttcgataa

SEQ ID NO: 50870 - protein, 163 aa, Unknown
  Obtained from environmental sample
  DOMAIN (5)...(157): Peptidase family M50
  misc_feature (1)..(163): Xaa is any amino acid
MHRDTGIAILQATLDSTGKLGFFPRYPYQLINYTFGSAFVYGWKEAVDLLKANTKGLGKVFSGQEKATESVQGPIGIAQIYGKQWIWSRFWYVTAIISLILAFMNFLPIPALDGGHIMFTLWEIVTRRKPSDKFLMATQQIGMLILFALMVFAISNDLFKIFR

SEQ ID NO: 50871 - DNA, 813 bp, Unknown
  Obtained from environmental sample
  misc_feature (1)..(813): n is a, c, g, or t
atgagtagaaggaaaaatgtaagaacgcccacccatgataaagatattgcggcaatgaaaaaaatggcggctgatattgaaaaagctcgtgagctttatggggacggagaaccatttgatgaagaaagagttttggactgtattgttttcaaagccgatcaatcatcaaaggctttaaatgacttaggcagatactgtctctggctcaaggcagaagtcggtcatggacggtttatggatggcttgaaacgaaggaatattaattcaacagccgcaaattgggctatgttgatgttcgagaaattcggttcaaattctgcacatgtgcagaatttgggagttagaagggcaagggtattggctgtttttacaaaagaagaaattgctacctacgaaaaaggcggccctcttggggatattccccatgacgatgtttctgatatgcctatccaagaacttgaaaacactgtccgtaaccttcgagcgcaactgaagaacacggaagccgttgcaaaagaaaaaatgcggcaaaaagacgaacaaattgccaatatggaatttgaaatcgaacattgccgccctcttaccgaaaaagagaaagcagaaaaagcaatcgaggccaaactggaggaactccgaaagaaactgtttaccgcaatccatctggcgcgtttttatttcggcgacgcgcttaccgttatcgcaaccgccagacagcttgagggcgtaaccttccccatgctggaaaaatgggcgaaagaagaatacgaagagnattgccggttttcaacgaactngtttgaaatgctttga

SEQ ID NO: 50872 - protein, 270 aa, Unknown
  Obtained from environmental sample
  misc_feature (1)..(270): Xaa is any amino acid
MSRRKNVRTPTHDKDIAAMKKMAADIEKARELYGDGEPFDEERVLDCIVFKADQSSKALNDLGRYCLWLKAEVGHGRFMDGLKRRNINSTAANWAMLMFEKFGSNSAHVQNLGVRRARVLAVFTKEEIATYEKGGPLGDIPHDDVSDMPIQELENTVRNLRAQLKNTEAVAKEKMRQKDEQIANMEFEIEHCRPLTEKEKAEKAIEAKLEELRKKLFTAIHLARFYFGDALTVIATARQLEGVTFPMLEKWAKEEYEEXCRFSTNXFEML

SEQ ID NO: 50873 - DNA, 594 bp, Unknown
  Obtained from environmental sample
  misc_feature (1)..(594): n is a, c, g, or t
atgataaaattatgccctatgtatttgccagatatatgcctgcaattatgcccgttgacagaaaaagcgaaagcccagtgttcagtaaagattacaagacagttacaaccaaagcaggcttccggtttacgccggttaaatacttcgtctttgatctgtggtatgaacgaaccgatttctccgcttctaaaaaagataagtggcaaaccgacaatggtttattgtcagctatgtttgggatcagtcttaattattaagacttggcgttttggaggatttatgcggccttataaattgatagttataacggcgcttgcctttttttattttgccgcatgttttgatgttcaggataaaaatacttcaggtgaaccggaccggataattaccgcaaaagattttgttaaggatatggggcttggttttaatataggcaacagtctggacagttggggcggggagacagcatgggggaatgtcgctgttaatcaggcgtttatcaaggctttaaaaaattacggctataaaacagtacggcttcccgttacatgggcggataaaatgggtccttcgccgcattatttaattgcatga

SEQ ID NO: 50874 - protein, 197 aa, Unknown
  Obtained from environmental sample
  misc_feature (1)..(197): Xaa is any amino acid
MIKLCPMYLPDICLQLCPLTEKAKAQCSVKITRQLQPKQASGLRRLNTSSLICGMNEPISPLLKKISGKPTMVYCQLCLGSVLIIKTWRFGGFMRPYKLIVITALAFFYFAACFDVQDKNTSGEPDRIITAKDFVKDMGLGFNIGNSLDSWGGETAWGNVAVNQAFIKALKNYGYKTVRLPVTWADKMGPSPHYLIA

SEQ ID NO: 50875 - DNA, 645 bp, Unknown
  Obtained from environmental sample
  misc_feature (1)..(645): n is a, c, g, or t
gtgatggccggtctcagcgtgccgtgcgcgcgtatgtcctttatcgccaacggggtggatacgcggcgttttcaacccggagatcttcctttttcgcaacgcgaacctatagtattatgcgtggcccggatggtggaagacaaggatcacctctgcctgcttgacgcctttgccgaagtcgtcgcgcagatgcctgaagcgcgtctgcgcttggtgggcgaaggcccgctggaagcgaagctgcgcgtccgcatagtggaagcgccgctggcgggcagagtggaaatcctgcccgcaacgacggatgtggcggcctgttgccgttcagccagagtgtttgcattaagctcccgccgggaaggcatgcccaacgtgctgctggaagccatggccggcggactgcccgccgtggccacgcgggtggggggcatccccttcctgctccgggaggaaaacggcctgatggttccagccggagattccggcagtctggcggcgggcatcctgcgccttttgcgcgatcccgaactggcgcaacgcatgggcaaggccggacgggagcgcgtggagcgggatttccccttcagcgccatgattgcggcgcatgaagaactttttctgcgtttgttgcgagaaaaccggtaa

SEQ ID NO: 50876 - protein, 214 aa, Unknown
  Obtained from environmental sample
  DOMAIN (22)...(188): Glycosyl transferases group 1
  misc_feature (1)..(214): Xaa is any amino acid
MMAGLSVPCARMSFIANGVDTRRFQPGDLPFSQREPIVLCVARMVEDKDHLCLLDAFAEVVAQMPEARLRLVGEGPLEAKLRVRIVEAPLAGRVEILPATTDVAACCRSARVFALSSRREGMPNVLLEAMAGGLPAVATRVGGIPFLLREENGLMVPAGDSGSLAAGILRLLRDPELAQRMGKAGRERVERDFPFSAMIAAHEELFLRLLRENR

SEQ ID NO: 50877 - DNA, 705 bp, Unknown
  Obtained from environmental sample
  misc_feature (1)..(705): n is a, c, g, or t
ttggaggacatttctatgaaaaatgctaacagaaatcacaagaacagcgtattctcctcgctgttcagcaacccggacgttctgcgagaactctactcggctattgaaggcatccccatccccccggatattcccatcaatatcaacacgttgacagacattctctacaaagggcagattaacgacatatcttttctaatcgacaaccgccttgtcgtacttatcgaacaccaatctacaattaacgacaatatccctctgcgcctgctaatgtacattgcccgcatatacgagaaaatcatcaaaaggagaaaatgctatcagaacaaactggagaaaatcccaagacctgagtttatcgttctctacaacggcaagtacaattaccccgattacaaagtattaagactgtccgacgccttcaaagacattgaggaattaaaattatcggggagtgacgcagcgccgttggaattaattgtgcaggtgtacaacataaaccacgggcataatttggaaatactgaaaaagagcgaaacattgggcagttacagtattttcatagagaagataagggagtatcaaaagcgggaaaagtcacttgaagaaacgtttagatctgcgataaactattgtataaagaacaatatactgaaagactatttagaagctcacgctcggctcggccgatctgtcttgaattga

SEQ ID NO: 50878 - protein, 234 aa, Unknown
  Obtained from environmental sample
  misc_feature (1)..(234): Xaa is any amino acid
MEDISMKNANRNHKNSVFSSLFSNPDVLRELYSAIEGIPIPPDIPININTLTDILYKGQINDISFLIDNRLVVLIEHQSTINDNIPLRLLMYIARIYEKIIKRRKCYQNKLEKIPRPEFIVLYNGKYNYPDYKVLRLSDAFKDIEELKLSGSDAAPLELIVQVYNINHGHNLEILKKSETLGSYSIFIEKIREYQKREKSLEETFRSAINYCIKNNILKDYLEAHARLGRSVLN

SEQ ID NO: 50879 - DNA, 399 bp, Unknown
  Obtained from environmental sample
  misc_feature (1)..(399): n is a, c, g, or t
ttgccggcaatgatttacaaaatacataaggcaaaatgcgaaggagcagatgttttggaactgtggggaactggcgaacctttgcgcgaatttttgtggagcgaagatatggcagatgcttgtgtttattgcttagaaaacataaattacgcagatgtcaaaagtcatataaatataggaacaggaaaagaaataagcatagcaaatttggcaacgctcgtggcaaagacaataggctacaatggcaagattatttttgacagctcaaaacctaatggcacaatgcgaaaactctgcgatgttagcaaaattcaatctatgggttggcggcacaaaattgagattgaagaaggcgttgagaaattgtacgaatggtatttaaagaatgaacgaagatag

SEQ ID NO: 50880 - protein, 132 aa, Unknown
  Obtained from environmental sample
  misc_feature (1)..(132): Xaa is any amino acid
MPAMIYKIHKAKCEGADVLELWGTGEPLREFLWSEDMADACVYCLENINYADVKSHINIGTGKEISIANLATLVAKTIGYNGKIIFDSSKPNGTMRKLCDVSKIQSMGWRHKIEIEEGVEKLYEWYLKNERR

SEQ ID NO: 50881 - DNA, 1227 bp, Unknown
  Obtained from environmental sample
  misc_feature (1)..(1227): n is a, c, g, or t
atgaacgaagatagccttcctttggaggcactcaagtttttgcgaaaagcagaaatgcaatctattgcagaagaatacatacccttgttaaaagaccccctaaaactctccgctaaactttccaaaaaatataaccaacaagagcggcgcgccctaattcattatcttgaaattttgccaaagataaggaaaaaattttgtttgcaaaatgtggatttaatttgcgataggttggcttttgaacaggcaaccgcaagggatatttctgaatataaggcaaaaatgtggcagagcggggctaaaattgccgatttgtgttgcggcatgggcggggatagtttttggctgccgagcggcattgttgcaagcggagcagacattgcaccggaaagggtttttatgttcaacgaaaatatggagcgtttgaaacaatctcacaaagcaattttgcaaaatgccttggaagtgaaaaatggagattttttttgcatagaccccgcaaggcgagagaacttaaatccgagttttgaaagtgtccttgaactctcaaaaaaatttagcggtggaatggtgaaactcccccctgcatatccagaagatgaacttccaaaagagagtgatattctatacttgggggatgcaaaagattgcagggaatgccttatgttaactggtgtatttggaaaaggaattattcgggcggttgctatttgcgagggagaatggcaatgcgaaaaaaatgaattgcaaaatacaagtttggatattagaaaattgggcaattttattttggaacccgttcctgttctggttcgcagccatctgtttttaagcgaagcaaaaaaatgtggtttttggcagatagattccacccttgcttatctctcttgcgaagaattaccgcctgagcataaaggatttgcagcgtacaaagttatagaccaaagcagtctttctacaaataatgtaaaagctatgttaagaaaacatggcattgggaaaatcgtattgaaaaaacgcggcgttgaggttgttccagaggcggaaattcaccgcctttcgccgaaaggcgaaaaggaagctgttttgttttatacaagggttttgggggagaaacgggctattttacggaagctcaataactcccaagttaatataattccgcttttttactatattcaacccatatatggcccgggaccctattcgtttttcagcgccggctag

SEQ ID NO: 50882 - protein, 408 aa, Unknown
  Obtained from environmental sample
  misc_feature (1)..(408): Xaa is any amino acid
MNEDSLPLEALKFLRKAEMQSIAEEYIPLLKDPLKLSAKLSKKYNQQERRALIHYLEILPKIRKKFCLQNVDLICDRLAFEQATARDISEYKAKMWQSGAKIADLCCGMGGDSFWLPSGIVASGADIAPERVFMFNENMERLKQSHKAILQNALEVKNGDFFCIDPARRENLNPSFESVLELSKKFSGGMVKLPPAYPEDELPKESDILYLGDAKDCRECLMLTGVFGKGIIRAVAICEGEWQCEKNELQNTSLDIRKLGNFILEPVPVLVRSHLFLSEAKKCGFWQIDSTLAYLSCEELPPEHKGFAAYKVIDQSSLSTNNVKAMLRKHGIGKIVLKKRGVEVVPEAEIHRLSPKGEKEAVLFYTRVLGEKRAILRKLNNSQVNIIPLFYYIQPIYGPGPYSFFSAG

SEQ ID NO: 50883 - DNA, 321 bp, Unknown
  Obtained from environmental sample
  misc_feature (1)..(321): n is a, c, g, or t
atgggaaccgtcggctttaatcttaaaggaactttcgttcaatataatagaactgccttcttcctgtacttttacgttgaggaagttcatgggcggcgaaccgataaatccggctacgaatttgttaatcgggtggttataaaggaacagaggagaaccaatctgaaggacttttccgtctttcataacaacgattttattcgccatggtcatggcttccacctggtcgtgggtaacgtagatcattgtcgcgttcaggcggaggtgcaggtcggaaagttccgccctcatctgtacgcgcaattttgcgtccaggtttga

SEQ ID NO: 50884 - protein, 106 aa, Unknown
  Obtained from environmental sample
  misc_feature (1)..(106): Xaa is any amino acid
MGTVGFNLKGTFVQYNRTAFFLYFYVEEVHGRRTDKSGYEFVNRVVIKEQRRTNLKDFSVFHNNDFIRHGHGFHLVVGNVDHCRVQAEVQVGKFRPHLYAQFCVQV

SEQ ID NO: 50885 - DNA, 603 bp, Unknown
  Obtained from environmental sample
  misc_feature (1)..(603): n is a, c, g, or t
ttgcgcgtacagatgagggcggaactttccgacctgcacctccgcctgaacgcgacaatgatctacgttacccacgaccaggtggaagccatgaccatggcgaataaaatcgttgttatgaaagacggaaaagtccttcagattggttctcctctgttcctttataaccacccgattaacaaattcgtagccggatttatcggttcgccgcccatgaacttcctcaacgtaaaagtacaggaagaaggcagttctattatattgaacgaaagttcctttaagattaaagccgacggttcccatgttgaatttttaagaaaatatgtcggaaaagaagttttcttcggtatccgcccggaagatttgacctatgccgaatcccccggcaacaacagcatgaccgtaaaggtaaccgttgttgagccattgggcgccgacatccacctgtggcttacaaccgatactcagccgctggtagcccgcacagaaccccagcacatcttcaaagtcggcgacaccgcgaacttcattcccagaatggaaaaagcgcgctatttcgacaaagacaccgagttggccattatcccggcccccgacgcttga

SEQ ID NO: 50886 - protein, 200 aa, Unknown
  Obtained from environmental sample
  DOMAIN (127)...(185): TOBE domain
  misc_feature (1)..(200): Xaa is any amino acid
MRVQMRAELSDLHLRLNATMIYVTHDQVEAMTMANKIVVMKDGKVLQIGSPLFLYNHPINKFVAGFIGSPPMNFLNVKVQEEGSSIILNESSFKIKADGSHVEFLRKYVGKEVFFGIRPEDLTYAESPGNNSMTVKVTVVEPLGADIHLWLTTDTQPLVARTEPQHIFKVGDTANFIPRMEKARYFDKDTELAIIPAPDA

SEQ ID NO: 50887 - DNA, 684 bp, Unknown
  Obtained from environmental sample
  misc_feature (1)..(684): n is a, c, g, or t
atggcagttcttgatatgattcacaaccagtcgcccgatatatcacagggcgtttcaggcactggactgaaaaaattcaagggacagcagggagccggagatcagggaatgatgttcggttttgcgtgtaatgagacaaaagaacttatgcccatgccgataatgcttgcccacaaaatactcattcacgccgccaaactgcgaaaaaacaaaacgattaaatggctgcgccccgacgctaaaagccaggtgacaatagaatatgaaggtcataaacctatacgcattgacgcggttgtcgtatctcatcagcatgatcccgacattacgcataaggatatcgaagaaactgtaatagaaaaaatcatcaatcccgtgcttgaacctacgggactgctggataaaaaaacaaaatactttataaaccccacaggacgatttgtagtcggcggtccgttcggagacaccgggcttacagggcggaaaattattgtagacacctacggcggcatgggtcgtcacggtggcggcgctttttcgggcaaagaccctaccaaagttgaccgttccgcagcttacgccgcgcgttatatagccaaaaacattgtcgccgccaaacttgccgaccgatgcgaaatccaacttgcctacactatcagcgttcccttccctgtttcagaatga

SEQ ID NO: 50888 - protein, 227 aa, Unknown
  Obtained from environmental sample
  DOMAIN (149)...(227): S-adenosylmethionine synthetase, C-terminal domain
  misc_feature (1)..(227): Xaa is any amino acid
MAVLDMIHNQSPDISQGVSGTGLKKFKGQQGAGDQGMMFGFACNETKELMPMPIMLAHKILIHAAKLRKNKTIKWLRPDAKSQVTIEYEGHKPIRIDAVVVSHQHDPDITHKDIEETVIEKIINPVLEPTGLLDKKTKYFINPTGRFVVGGPFGDTGLTGRKIIVDTYGGMGRHGGGAFSGKDPTKVDRSAAYAARYIAKNIVAAKLADRCEIQLAYTISVPFPVSE

SEQ ID NO: 50889 - DNA, 588 bp, Unknown
  Obtained from environmental sample
  misc_feature (1)..(588): n is a, c, g, or t
ttggatttcgcatcggtcggcaagtttggcggcgacaatgtttttggctatataacgcgcggcgtaagctgcggaacggtcaactttggtagggtctttgcccgaaaaagcgccgccaccgtgacgacccatgccgccgtaggtgtctacaataattttccgccctgtaagcccggtgtctccgaacggaccgccgactacaaatcgtcctgtggggtttataaagtattttgtttttttatccagcagtcccgtaggttcaagcacgggattgatgattttttctattacagtttcttcgatatccttatgcgtaatgtcgggatcatgctgatgagatacgacaaccgcgtcaatgcgtataggtttatgaccttcatattctattgtcacctggcttttagcgtcggggcgcagccatttaatcgttttgttttttcgcagtttggcggcgtgaatgagtattttgtgggcaagcattatcggcatgggcataagttcttttgtctcattacacgcaaaaccgaacatcattccctgatctccggctccctgctgtcccttgaattttttcagtccagtgcctga

SEQ ID NO: 50890 - protein, 195 aa, Unknown
  Obtained from environmental sample
  misc_feature (1)..(195): Xaa is any amino acid
MDFASVGKFGGDNVFGYITRGVSCGTVNFGRVFARKSAATVTTHAAVGVYNNFPPCKPGVSERTADYKSSCGVYKVFCFFIQQSRRFKHGIDDFFYYSFFDILMRNVGIMLMRYDNRVNAYRFMTFIFYCHLAFSVGAQPFNRFVFSQFGGVNEYFVGKHYRHGHKFFCLITRKTEHHSLISGSLLSLEFFQSSA

SEQ ID NO: 50891 - DNA, 741 bp, Unknown
  Obtained from environmental sample
  misc_feature (1)..(741): n is a, c, g, or t
ttgttattttttatttgttatttctctaagggagggggaatgcagattgacactgacaaggctcggcgtttttgtttaaatttgtttcaagcttacgggttttccaaagatgaaagcgagattataagcgacgttatcctccgcgccgacctttacggaattgattcccacggcattcacaggcttatgcgctaccatgatgaaataacctcaggacaggtggacgtaaaagcgaaaatagacattgttcacgaaacgggtatttccgcctgtctggaagcgaacaaggcgatgggacagcttgtgggagtgcaggccatgaatatggctcttcaaaaagcgcgtaataacgggtgcggaatggtgactgtccgcaattccaatcattacggcatcgcgagttactacaccgacatggcggccgcgcaagatttaatcggagtctgcatgacaaataccgaggcaatctgcgttcccactttcggctgtgaagccatgaccggaacaaacgccatcgcccttgcgatgcccgccgagccatttaatttttcttatgacgcgtcaactacggttgttccacgaggaaaactcgaagtgtacaggaaaaacggggaaccgcttcctgagcattgggcgcttgatgcgaacggtaagccatgcacggatgcggccgtcgtagttgataatataatcgctaaagccggaggcggcatcactccgctggagggatgggaaccctaa

SEQ ID NO: 50892 - protein, 246 aa, Unknown
  Obtained from environmental sample
  DOMAIN (14)...(244): Malate/L-lactate dehydrogenase
  misc_feature (1)..(246): Xaa is any amino acid
MLFFICYFSKGGGMQIDTDKARRFCLNLFQAYGFSKDESEIISDVILRADLYGIDSHGIHRLMRYHDEITSGQVDVKAKIDIVHETGISACLEANKAMGQLVGVQAMNMALQKARNNGCGMVTVRNSNHYGIASYYTDMAAAQDLIGVCMTNTEAICVPTFGCEAMTGTNAIALAMPAEPFNFSYDASTTVVPRGKLEVYRKNGEPLPEHWALDANGKPCTDAAVVVDNIIAKAGGGITPLEGWEP

SEQ ID NO: 50893 - DNA, 315 bp, Unknown
  Obtained from environmental sample
  misc_feature (1)..(315): n is a, c, g, or t
atgctttatgagcgtagtatcggcagagcagtttcagataatatccggatatgcgctgacagtggttatcaagggattttgaaacttcataaaaacagtgaaacgccaaagaagaaacccaaaggaagagatttgagtgatgatgaaaaggcaggaaatcggtttatttcaaggagacgtattttggttgaaaacatcaatgcgaaaatcaaagtgttcaaaattactgcgaatcggtatagaaatcgtcgaaaccgttttggtttacgtatggctataatttgtggtataattaactttgaaaacaaaatataa

SEQ ID NO: 50894 - protein, 104 aa, Unknown
  Obtained from environmental sample
  misc_feature (1)..(104): Xaa is any amino acid
MLYERSIGRAVSDNIRICADSGYQGILKLHKNSETPKKKPKGRDLSDDEKAGNRFISRRRILVENINAKIKVFKITANRYRNRRNRFGLRMAIICGIINFENKI

SEQ ID NO: 50895 - DNA, 798 bp, Unknown
  Obtained from environmental sample
  misc_feature (1)..(798): n is a, c, g, or t
atggattatattcaacagcagttaaaatcaataataaaaactggaattggcaaaatggcagtagaagataataggccaatagggtttttaacttttgaaaaacctttttcgataggaaacgatataaacggtacaatatcgccattatttggctatggtgttaggcatgaaaagagagatattattattaataaactattccaagttattgccgcagaattatgtgagaattatgttcaaagctataatattaatgtatatgcacatgacgcaaaaatattatggatgtatatcatgacttcattcgcaatggatgttacagaagtaataaaagacacaaattcacctatagaaactaaaaaatataataaatttatctaccgtgaagtttcaaaaaatgaactcttgaattataaatctgatattattgtattataccgtgatctaataaatcatttgcgtattagcccagtattttaccattgtaagggctttcttccattagagaatcgagttaatgattttttttcagataatttacgtctttttgctgcctttgatgaagatatccttattggtatgattaattccgaagcagtagatattgaaatgtttacacatgattcaaaggctttatgtttaggagatatttttgttaatcataattatagaaaaaggggtatagcctctgaactattgagttttaccaacgataaattgaaaaatgatggcatcaatcgtaaatttgtcaggcatggaacaataaatcccaatgcacgtggattttcggataaatag

SEQ ID NO: 50896 - protein, 265 aa, Unknown
  Obtained from environmental sample
  misc_feature (1)..(265): Xaa is any amino acid
MDYIQQQLKSIIKTGIGKMAVEDNRPIGFLTFEKPFSIGNDINGTISPLFGYGVRHEKRDIIINKLFQVIAAELCENYVQSYNINVYAHDAKILWMYIMTSFAMDVTEVIKDTNSPIETKKYNKFIYREVSKNELLNYKSDIIVLYRDLINHLRISPVFYHCKGFLPLENRVNDFFSDNLRLFAAFDEDILIGMINSEAVDIEMFTHDSKALCLGDIFVNHNYRKRGIASELLSFTNDKLKNDGINRKFVRHGTINPNARGFSDK

SEQ ID NO: 50897 - DNA, 843 bp, Unknown
  Obtained from environmental sample
  misc_feature (1)..(843): n is a, c, g, or t
atggagaattctatgaccgagccaaaaaccaaccgcaattacaaggatagcgttttcacgctgctattcagcgagaaaaacaatctcttggagttgtacaacgctattaggaacaccaactatggcagcgacacagatattcgcataaccacgcttgaagatgtgctgtttatggaacgcataaacgacatctctttcgtgattgaaggcaagctggttgtgctcatcgagcaccaatctacggtgaacccgaatatgccgctgaaaatgcttatttatatgggtagaaactatgaaaagataattgacaaagatgctctttacagcactaagaagatgtctataccaaaacctgaatttatagtgctatacaacggagttgacgaatgtcccgacaagcaggttctgaaactttctgatatgtttattgagcctttggaagaaggtattgagagtcttgaacttgttgtgaatgtttttaacataaacaaaggcaggaacgaggaaatggcaactcgtagtgaaaatttgagaggctacgaattttttatatatttaataagagagtaccttaaagcaggcatggacagggactcggctataagccgtgctgttggtgactgcataaggcagaatgtgttgaaggattttttggagaaacacggttcggaggtgcataatatgttgttcggcgaatggaattgggatgatgccaagagggtttggcagagagaggctagggaagatgcttgcgaagagttatttgctctttgggaaaaaggtgtttctttagccgaagcgaagaanatactccgcanacaaacccgcccagtaactgcataa

SEQ ID NO: 50898 - protein, 280 aa, Unknown
  Obtained from environmental sample
  misc_feature (1)..(280): Xaa is any amino acid
MENSMTEPKTNRNYKDSVFTLLFSEKNNLLELYNAIRNTNYGSDTDIRITTLEDVLFMERINDISFVIEGKLVVLIEHQSTVNPNMPLKMLIYMGRNYEKIIDKDALYSTKKMSIPKPEFIVLYNGVDECPDKQVLKLSDMFIEPLEEGIESLELVVNVFNINKGRNEEMATRSENLRGYEFFIYLIREYLKAGMDRDSAISRAVGDCIRQNVLKDFLEKHGSEVHNMLFGEWNWDDAKRVWQREAREDACEELFALWEKGVSLAEAKXILRXQTRPVTA

SEQ ID NO: 50899 - DNA, 669 bp, Unknown
  Obtained from environmental sample
  misc_feature (1)..(669): n is a, c, g, or t
atgataaagagaattaaggggtatgtttcgccattagagcgaataataatttgttcagttgcggctgtgctgttatacaaagtaatgggtcgatgggtttttatacccgtatttattttgtattggggcatatcatttttaataacgattaagtttgccggaatatcaggtataaaaaattggctgcaaaagccaaacggtaaaatgggttggctgatattatccgtttttgtcggatttattccattccaaatattcttaattaatttacaaatcatcaccgttccattaatactgttaagcatacccttcgtactgcttaatcctttttttgaagaattgtactggaggggttttgtgcttgattttacttttaagtcaaaagtcctaagttcgttctattcaagtatattatttataataagccatttatttatttggggtgtattttcttatggaaacagaaattactttttaattggttcacttgcaataatgagtacagtgtggtgcatagtgcgaatgaaaactaaaagtttatggtggtgtattatttcgcattttcttgttgatgtattcaatcttatggtatttgtaatgctaaacaaggtaattcccgcacaggggtatattccggcattggaacttttatttggcagaataaagtag

SEQ ID NO: 50900 - protein, 222 aa, Unknown
  Obtained from environmental sample
  DOMAIN (99)...(201): CAAX amino terminal protease family
  misc_feature (1)..(222): Xaa is any amino acid
MIKRIKGYVSPLERIIICSVAAVLLYKVMGRWVFIPVFILYWGISFLITIKFAGISGIKNWLQKPNGKMGWLILSVFVGFIPFQIFLINLQIITVPLILLSIPFVLLNPFFEELYWRGFVLDFTFKSKVLSSFYSSILFIISHLFIWGVFSYGNRNYFLIGSLAIMSTVWCIVRMKTKSLWWCIISHFLVDVFNLMVFVMLNKVIPAQGYIPALELLFGRIK

SEQ ID NO: 50901 - DNA, 312 bp, Unknown
  Obtained from environmental sample
  misc_feature (1)..(312): n is a, c, g, or t
atggggaagaaaagtacagaacggcgtgtttacacgaaggaattcaaagccgaggcggtagcgttggccgagaagaaagaaaaaccggtaagccggatcgcggcagatttggggatcaacgagaatatgctgcgccgatggatgcaggcttctcgggagtcggcgggaagcggcctgcaagcgttcccaggccacgggcggccaaaggatgcggagcttgcccgcctgcggaaagataacaaagcgctcatggaggcaaatgagatcctaaaaaaagcggcggtcatcttctccgaatgggaaccccagtaa

SEQ ID NO: 50902 - protein, 103 aa, Unknown
  Obtained from environmental sample
  DOMAIN (8)...(90): Transposase
  misc_feature (1)..(103): Xaa is any amino acid
MGKKSTERRVYTKEFKAEAVALAEKKEKPVSRIAADLGINENMLRRWMQASRESAGSGLQAFPGHGRPKDAELARLRKDNKALMEANEILKKAAVIFSEWEPQ

SEQ ID NO: 50903 - DNA, 507 bp, Unknown
  Obtained from environmental sample
  misc_feature (1)..(507): n is a, c, g, or t
gtggtagacctgggcagcgaggaacgagaaatactaataacaaacctgcctgaagctgagatggaatataaggcgtttaaggagctctatcacaagaggtgggggatagagacaaagtataaaacggtgaaacagaagctggaattggaaaacttttctggaaggctggtagaaaacatcaagcaggacttttatgcgatgatgacggtgtcgaatatgatagccagttgcaggcgggtggcagaccgcaaagtaaagaaggatcgagaagggctagggaataaatatgagtatcaggttaatgtgaatcatgcgataggagtatacaaggatcgtctgatacggataataatagaggaagatcgggtaagtcgacggcatttgatgaatgagctgttacgtgaaatggaacgacgagtagtaccgatacggccgaatcgagaagttgtccgtaaaaatatcaatcggaaagcaaaattccatcataaccataaatcaaactgctga

SEQ ID NO: 50904 - protein, 168 aa, Unknown
  Obtained from environmental sample
  misc_feature (1)..(168): Xaa is any amino acid
MVDLGSEEREILITNLPEAEMEYKAFKELYHKRWGIETKYKTVKQKLELENFSGRLVENIKQDFYAMMTVSNMIASCRRVADRKVKKDREGLGNKYEYQVNVNHAIGVYKDRLIRIIIEEDRVSRRHLMNELLREMERRVVPIRPNREVVRKNINRKAKFHHNHKSNC

SEQ ID NO: 50905 - DNA, 657 bp, Unknown
  Obtained from environmental sample
  misc_feature (1)..(657): n is a, c, g, or t
ttggaacgcgagttcaacatgaatgtgattacaacggttcctaacgtttcgtacaaagtacataccaccaaaggcgaagtgttcgaaattcacaacccatcgggattgcccaatttgagcacgattgactttatcgaagagccgtatatcaaagcacaggtcatcaccaaagccgagtatatcggggctattatgacgctttgcatcggcaagcgcggcgtgttgaaaaatcaatcgtacatcacggccgaccgctcggaactcacgttcgaaatgcctttggccgaaattgtgtttgatttctacgaccgattaaaaagcatctcgcgtggctatgcctcgttcgactactatccaagcggttatcagccttccaaactttgcaagttggaaattttattgaacggcgatacggtggatgccttgtcaacgctcattcatgtggacaattcctataatttcggacggcggatgtgcgaaaagttaaaagaactcattccgcgtcaacagtttgatgtagccattcaagcggctatcggcgcaaaaatcattgcccgcgaaaccatcaaagccatgcgcaaggacgtaaccgccaaatgctacggcggtgatattacgcgaaagcgcaaacttttggaaaaaacaaaaggaaggtaa

SEQ ID NO: 50906 - protein, 218 aa, Unknown
  Obtained from environmental sample
  DOMAIN (44)...(133): Elongation factor G C-terminus
  misc_feature (1)..(218): Xaa is any amino acid
MEREFNMNVITTVPNVSYKVHTTKGEVFEIHNPSGLPNLSTIDFIEEPYIKAQVITKAEYIGAIMTLCIGKRGVLKNQSYITADRSELTFEMPLAEIVFDFYDRLKSISRGYASFDYYPSGYQPSKLCKLEILLNGDTVDALSTLIHVDNSYNFGRRMCEKLKELIPRQQFDVAIQAAIGAKIIARETIKAMRKDVTAKCYGGDITRKRKLLEKTKGR

SEQ ID NO: 50907 - DNA, 417 bp, Unknown
  Obtained from environmental sample
  misc_feature (1)..(417): n is a, c, g, or t
atggatttgccagcttacacgccttctacatgcaatcccaacggcactcctccagttggcggcagtggtggtggcagcagctcctccaaaggtggcggttccagcagctcctccaatggcggtggcggcggtggttccagcagctccagtagcgatgacggtgaagacactccgataatatccgtttcgcctaacgtggcgaacagcggggcttttgccattaaaaacggcgtgaatttgcaggttacccaaaaggcgagcattgaggtgtttaacttgaacggaaaatccatgcgtaaaatggatttttcaagaggaagctactatatatcgctcaatgatttgccaaaaggcttgtatatagctaagatcaagtttgataatcgtagggaaattttgcgaattccggtaaaataa

SEQ ID NO: 50908 - protein, 138 aa, Unknown
  Obtained from environmental sample
  misc_feature (1)..(138): Xaa is any amino acid
MDLPAYTPSTCNPNGTPPVGGSGGGSSSSKGGGSSSSSNGGGGGGSSSSSSDDGEDTPIISVSPNVANSGAFAIKNGVNLQVTQKASIEVFNLNGKSMRKMDFSRGSYYISLNDLPKGLYIAKIKFDNRREILRIPVK

SEQ ID NO: 50909 - DNA, 624 bp, Unknown
  Obtained from environmental sample
  misc_feature (1)..(624): n is a, c, g, or t
gtggaagctcatcccgcaaaaaacagccgaggaaggggcttgagcgtttgcgcaagaaggggcgggactgcgttatccttgatatcatgcttccccggcatgacgggttttaaggcgctgaaaaagatacgggcggacgagagcctgtgttccctgccggttatcatgtgtaccgcccggggggaggaagcggatatagtcgccgggctcgaattgggcgccgacgattacgtggtcaagccctacagccccagggtgcttgccgcccggatacgcgcgggactcaggcggaaagagaccgcgggctttcccgtcaagaccttttggcaatacgggaagctgagccttgatgtggaacggcacacctgtttccttgacgagacgcctttggaacttttcgccactgaattcgccatccttgcccagtttatgagccaccccgatattgtcttttcccggcagaagctcattaccgctatccggggggccgattacccggtaacggatcgttccgtggatgtgcagattctgggactcagaaagaaactaaaggaagccggggacatgatcgaaaccatccggggcgtgggttaccggttagaacagaaggaggctgcaatttag

SEQ ID NO: 50910 - protein, 207 aa, Unknown
  Obtained from environmental sample
  DOMAIN (10)...(92): Response regulator receiver domain
  misc_feature (1)..(207): Xaa is any amino acid
MEAHPAKNSRGRGLSVCARRGGTALSLISCFPGMTGFKALKKIRADESLCSLPVIMCTARGEEADIVAGLELGADDYVVKPYSPRVLAARIRAGLRRKETAGFPVKTFWQYGKLSLDVERHTCFLDETPLELFATEFAILAQFMSHPDIVFSRQKLITAIRGADYPVTDRSVDVQILGLRKKLKEAGDMIETIRGVGYRLEQKEAAI

SEQ ID NO: 50911 - DNA, 756 bp, Unknown
  Obtained from environmental sample
  misc_feature (1)..(756): n is a, c, g, or t
ttgcaggtttttgaagacccgatggtcagaaattgcagctcgtcaagcgatttctgcctgaacgatttcaaggtttttgaaaaccccatttcgctgtacatcaccgttccctttcccgatcttgaccgtctttcgtcgtttttgcggatcatcgtcactttcatactccgcaaattttcacaggacgaagtacagttcggcgaacagaaactgaagcaccctattttattccttattgacgagttccctacgcttgggacctttaccacccttgaaataatgatgggaattctcgccggatacggcataaccttctatcttatctgccagtcgccaagccagatttataaactctacggcgagcataccgccatatttgaccattgcaaattcatgatgacctacgccatgtcggacccgaaaggcgcggaaatgttttcaaaaatgaccggcgtagaatccgtcacattcgccaatgtttccaacagcggcaacaagcatgaagccggaacgaataactttagcatttcagaacaaacccagcagcgcaatctgatgaacgccgacgaaatacagcatctgcccgccaaccagcttttagtttttccccagggggcgccggcaataatcgccaaaaagaacgtctactattcagacccgcgctacaaagacaagatcaatctgccggttccgaaaaacagatccgaactgcttcgggaatgcgccggtaccacaaaaaacaggattgtactatga

SEQ ID NO: 50912 - protein, 251 aa, Unknown
  Obtained from environmental sample
  misc_feature (1)..(251): Xaa is any amino acid
MQVFEDPMVRNCSSSSDFCLNDFKVFENPISLYITVPFPDLDRLSSFLRIIVTFILRKFSQDEVQFGEQKLKHPILFLIDEFPTLGTFTTLEIMMGILAGYGITFYLICQSPSQIYKLYGEHTAIFDHCKFMMTYAMSDPKGAEMFSKMTGVESVTFANVSNSGNKHEAGTNNFSISEQTQQRNLMNADEIQHLPANQLLVFPQGAPAIIAKKNVYYSDPRYKDKINLPVPKNRSELLRECAGTTKNRIVL

SEQ ID NO: 50913 - DNA, 486 bp, Unknown
  Obtained from environmental sample
  misc_feature (1)..(486): n is a, c, g, or t
gtgcctgcaggtcgactctggaggatcccacttatcacttccttgctgccctcaagcatttcagcggaaccgccctttacctgccgggtaatttcgttcacgttgcttacgccgtccagtatctgcctgctgccctcgccctgttcctccatcgcgttgcggatattatcctcctgctccactaccgttttaacgctggagtcaatcgcttcgaacttgttaagcacgttttctgtggaacgggttatcttgtcgattgcttcctttatctttttaagtacggcgcctatggtcttggactgctcgccggagctttccgccagcttgcggatctcgtcggcgacaacggcgaagcccctgccggcatccccggcgtgggccgcttctatcgccgcgttcatcgaaagcaggttggtctggctggctatgtctttcattacagcgttaattttcagcaggccttcggagtcgcgggctatttcctga

SEQ ID NO: 50914 - protein, 161 aa, Unknown
  Obtained from environmental sample
  SIGNAL (1)...(22)
  misc_feature (1)..(161): Xaa is any amino acid
MPAGRLWRIPLITSLLPSSISAEPPFTCRVISFTLLTPSSICLLPSPCSSIALRILSSCSTTVLTLESIASNLLSTFSVERVILSIASFIFLSTAPMVLDCSPELSASLRISSATTAKPLPASPAWAASIAAFIESRLVWLAMSFITALIFSRPSESRAIS

SEQ ID NO: 50915 - DNA, 855 bp, Unknown
  Obtained from environmental sample
  misc_feature (1)..(855): n is a, c, g, or t
ttggttcatcgctggtcaaaatataaccttttttcaacttgtttccaagccgaaaatgacgaatttcgacggttttttcaaatttcgttgacattatatcgatttttaggtaaaattcccattaaagcaatgttatacggtaataatttatccagctatggaagacatatatatatactcaaaagaattcgcacatttggaattgtttttttctctattgcggtggtaattttctccgtatttattattttacatttaaaaaacagttcaaagaatgaaaaaaaagagctttcccgtatttggaatgacggcaattatgaacaagcgtatataatcagcaaagcgtcgttacaggaaaaacctgtggattatttcttacttacgattaacggtttttccgcatatcaaatgggaatagcgcaaattaacagtcaaaatacattatcttttattaacgaatgtattttctctctaagaaaagcgctgcttcacagagaagccgcgaaagacggacgcattttttatgttttaggaaaagcatacggttacaagggcagtgaatacgccgacctttccgtaaaatatcttgaaatggcaaacagtctgtcttacaaagcctatgacattcccgaataccttgggctcgcgtacgcggcttacggcgattaccgaagcagcgtagaagcgtttactcaggcttttgtttcaggtaaacagccttccgataatcttttattgtcaatatcacgatcctatatcgaaatgggagaatacaatatggcgttaggttatcttaaccgttgtattgatttttccgccgattcaaaatccattattttatcgcgctttatttag

SEQ ID NO: 50916 - protein, 284 aa, Unknown
  Obtained from environmental sample
  misc_feature (1)..(284): Xaa is any amino acid
MVHRWSKYNLFSTCFQAENDEFRRFFQISLTLYRFLGKIPIKAMLYGNNLSSYGRHIYILKRIRTFGIVFFSIAVVIFSVFIILHLKNSSKNEKKELSRIWNDGNYEQAYIISKASLQEKPVDYFLLTINGFSAYQMGIAQINSQNTLSFINECIFSLRKALLHREAAKDGRIFYVLGKAYGYKGSEYADLSVKYLEMANSLSYKAYDIPEYLGLAYAAYGDYRSSVEAFTQAFVSGKQPSDNLLLSISRSYIEMGEYNMALGYLNRCIDFSADSKSIILSRFI

SEQ ID NO: 50917 - DNA, 444 bp, Unknown
  Obtained from environmental sample
  misc_feature (1)..(444): n is a, c, g, or t
ttgaaacagcagaaaaaagaactggaagaacgcaggaaaaaaatgagggctgaaattaacgataaaaagaaacagattgaaaacctgcagaaaaaagagagtaagctgacggaaaatcttgatccggaagttgtgtataaatttgagcgtattatcaagaataaaatgggtattggtattgtcgcgattaagggcaatgtctgtatgggctgtcatatgattcttcccgttcaattcgccaatgaagtaagaatcggcgaggaatatgtattctgcccgtattgttcgcgtattctgtattacgaggaatcaggagaaggcgaggaagaattcttcaacaccgaggatacaggagccctttccgatcttgatgagtctgaggaagacgaatacgaagatgacgatgaggaagaagaaatcgttaatatcgattctgaagaatag

SEQ ID NO: 50918 - protein, 147 aa, Unknown
  Obtained from environmental sample
  DOMAIN (1)...(103): Uncharacterized ACR, COG1579
  misc_feature (1)..(147): Xaa is any amino acid
MKQQKKELEERRKKMRAEINDKKKQIENLQKKESKLTENLDPEVVYKFERIIKNKMGIGIVAIKGNVCMGCHMILPVQFANEVRIGEEYVFCPYCSRILYYEESGEGEEEFFNTEDTGALSDLDESEEDEYEDDDEEEEIVNIDSEE

SEQ ID NO: 50919 - DNA, 801 bp, Unknown
  Obtained from environmental sample
  misc_feature (1)..(801): n is a, c, g, or t
atgaaagcgttcaaaagttcgcttttacccgggggaatgcctattacgggggaaagaaagatggtgaatgaagaaactatggccaaattgcatgagatgaagctgtccgttatggccgcctcttaccgccagcagatgcaggacagcgcaatgaataagctttcttttggcgaaaggttcggccttttggtagatgccgaatgggctacgcggaagaacaaccgcctcaaaaggcttatccagagagccgatttccccttctcaggcgcttgcattgaagatgttgaatatcgttctgaccgcaagctaaaccgggaacagattgcccagctttcaacttgttcttatatcgctgaaaagcacaatgttattattctcggcgcaaccggagccggaaaaacctacatcgcttgcgccctgggactgatggcctgccgccatttttattcggcaaaatatatccgcctgccggatctgctggatgaattggctgttgccaggggggaaggtatttttcaaaaggtcgtgcaaggctataaaaaattagacttgcttatccttgacgaatggctcttaattcccattaccgactccgaacgccgggatcttctggaagtagttgaagcccgtagcgggcgttgttcaacaattttctcttctcaatttgaccctgccggttggcagataaaaattggggaaggcccccttgctgaagcgatccttgaccgtatagtccatgattcttacacaatttttattgacggtgaagaatccatgcggaaacataaaggcattcattaa

SEQ ID NO: 50920 - protein, 266 aa, Unknown
  Obtained from environmental sample
  DOMAIN (43)...(72): IstB-like ATP binding N-terminal
  misc_feature (1)..(266): Xaa is any amino acid
MKAFKSSLLPGGMPITGERKMVNEETMAKLHEMKLSVMAASYRQQMQDSAMNKLSFGERFGLLVDAEWATRKNNRLKRLIQRADFPFSGACIEDVEYRSDRKLNREQIAQLSTCSYIAEKHNVIILGATGAGKTYIACALGLMACRHFYSAKYIRLPDLLDELAVARGEGIFQKVVQGYKKLDLLILDEWLLIPITDSERRDLLEVVEARSGRCSTIFSSQFDPAGWQIKIGEGPLAEAILDRIVHDSYTIFIDGEESMRKHKGIH

SEQ ID NO: 50921 - DNA, 507 bp, Unknown
  Obtained from environmental sample
  misc_feature (1)..(507): n is a, c, g, or t
atgctggaggaaatcgaaaaaagaggcatttacacagaagaaacaaaaggttgggataaaaaactgctgcttcaatcctgccagcttcacgacgtaggcaaaatctccatcagcgacaacatactcaagaaacccggaaagttagatgacgatgaatataatgagatgaaaaaacacgcgagtttcggcgaacagataattgaaaagatagagactctggctaaggaaagcgattttcttgattacgcgaaaattttcgccgccagccatcatgaaaaatgggacggctcgggttatcccagagggcttaaaggaaacgaaatccccctgcttggccgcataatggcgattgccgatgtatacgacgcgcttacatctgcgcgcccctacaaagaagcattcagccacgaggaggcggtgcgcattatcaccgaaagcagcggaattcagtttgatccgacgcttgtagaggtattcaccggtacggcggaccggtttagaaaataa

SEQ ID NO: 50922 - protein, 168 aa, Unknown
  Obtained from environmental sample
  DOMAIN (8)...(124): HD domain
  misc_feature (1)..(168): Xaa is any amino acid
MLEEIEKRGIYTEETKGWDKKLLLQSCQLHDVGKISISDNILKKPGKLDDDEYNEMKKHASFGEQIIEKIETLAKESDFLDYAKIFAASHHEKWDGSGYPRGLKGNEIPLLGRIMAIADVYDALTSARPYKEAFSHEEAVRIITESSGIQFDPTLVEVFTGTADRFRK

SEQ ID NO: 50923 - DNA, 1575 bp, Unknown
  Obtained from environmental sample
  misc_feature (1)..(1575): n is a, c, g, or t
atgaaatatattaactttgataaaacaagcgcttataagaaactttccaaacaggctaaaaaggcttttctttttagggacaaacttgactcaaaaagggtggtggagtgcattcttccaatggcggcagggcttaaatattcatgggcggcaaaagctcttgatgcgcaaaccgttaaattattgcaggaacttgcggatgagcaggagcttatagcgaaatacaaagcccttcttaacggggaaatgatgaacacgggcgagaaaaggaaggtgcttcatcacttgtcgcgcggacagcaggggcagccggtaattgaaaacggaaaagatatcggggaattctacagaaaagaacttgcaagattctgcgattttgcctccgctgtgcatggcgctcaatataaaggctctacaggcaagaattttaccacggtagtgcagataggtatcggcggctcggatcttggaccgcgcgccatgtacctggctcttgataactgggcagtcaaggaaggcaaaaagaaacttgacgctaaatttatttccaacgtagacccggacgacgcttctgcggtaattgcgtcctgcaatcttgaacagtgtctgtttattttggtttccaagagcggcactactcaggaaactctcgccaacgaactttttgtaaaagataaacttacaaaagcgggtcttgacccaagcaaacagatgattgccgttacaagcgaaacaagccctcttgcgcgtaatagcgcgtatcttgattctttctacattgatgattatgtcggcggccgttattcgtcgtcatcggcggtgggcggctgcgttctgtctctcgccttcggtcctgatgtgttcaaggaatttcttgcgggagccgccgaagccgacaaaatggcgcttgaaaccgatgttttaaaaaacgccgctcttcttgacgcgctaatcggtgtttgggagcgcaactttttacagtatccgtatacagcggttctgccgtacagtcaggcgctttcacgatttcccgcgcacttacagcaaatggacatggagtcaaacggaaagcgtgtgaaccgcaatggacaacccgtcaattacagtaccggtcccgttatttttggagagccgggaacaaacggtcagcattcattttatcagctacttcatcagggaacgggaattattccgcttcaatttataggtttttttgaaagtcagaaaggcgatgatgtaaatgtggatggttctgtcagccagacgaaattgaaagcgaatcttgccgctcaaattgtggcttttgcgaagggacaggacagcgaagacggaaacaaagagtttaaaggaggacgtccctcaagtttgatttttggaaaacgcctgacacccgctgtattgggagccttacttgcccactatgaaaataaagtaatgttccaggggtttgtatggaatctgaacagttttgatcaggaaggcgtacagcttggaaaaattctgaccaaaaaagtgctttccggcaatttcggcgacagcgcgttggaagcgtacagcaaactgttgggcgtatag

SEQ ID NO: 50924 - protein, 524 aa, Unknown
  Obtained from environmental sample
  DOMAIN (51)...(516): Phosphoglucose isomerase
  misc_feature (1)..(524): Xaa is any amino acid
MKYINFDKTSAYKKLSKQAKKAFLFRDKLDSKRVVECILPMAAGLKYSWAAKALDAQTVKLLQELADEQELIAKYKALLNGEMMNTGEKRKVLHHLSRGQQGQPVIENGKDIGEFYRKELARFCDFASAVHGAQYKGSTGKNFTTVVQIGIGGSDLGPRAMYLALDNWAVKEGKKKLDAKFISNVDPDDASAVIASCNLEQCLFILVSKSGTTQETLANELFVKDKLTKAGLDPSKQMIAVTSETSPLARNSAYLDSFYIDDYVGGRYSSSSAVGGCVLSLAFGPDVFKEFLAGAAEADKMALETDVLKNAALLDALIGVWERNFLQYPYTAVLPYSQALSRFPAHLQQMDMESNGKRVNRNGQPVNYSTGPVIFGEPGTNGQHSFYQLLHQGTGIIPLQFIGFFESQKGDDVNVDGSVSQTKLKANLAAQIVAFAKGQDSEDGNKEFKGGRPSSLIFGKRLTPAVLGALLAHYENKVMFQGFVWNLNSFDQEGVQLGKILTKKVLSGNFGDSALEAYSKLLGV

SEQ ID NO: 50925 - DNA, 732 bp, Unknown
  Obtained from environmental sample
  misc_feature (1)..(732): n is a, c, g, or t
ttgaggtttatattcgggaacgagtggaacgagaagaaaatccgtaccgttgcccgggcggtatttcggttgcaggggaagaacctcttcgacgccgtccaccttggcgccgccaaagaagacgcgtttgacaggatagtctcccacgacagtttatacgatatagctcaagcccgcggacgcggcaagggcataatggccatcaccgcgcacttaggttgtttcgagatgcttttgcacctatgcgcccgccgcggcctcagcggcttcgccgtagggcggacgttcaaaaacccggacgtagacgaaacaatgcgaaagataagaagcggccccgacatagaacacgttgacaaatcggacagccgtagcatcgtgcgcttactgcgccaaggaagggtcatgggtgtattaatcgaccaagacacaaatgtggagggcgtattcgctgaatttctgggacacactgccttcacgccaagcagcgcggtacgcttcgcgatgaaacagggaatcccgatcttcgtatcggtcaccgcgagactgccgggagataaacaccacgtctatataagcgatgaactaataccggcaaacacaggcgacccaaaagcggatttggtcgctaacatacaaaagattaacgactttatctgcgaatacatccgcaaataccctgaacagtgggtctggatgcacgagcggtggaagactaagccggttgacacatga

SEQ ID NO: 50926 - protein, 243 aa, Unknown
  Obtained from environmental sample
  DOMAIN (1)...(238): Bacterial lipid A biosynthesis acyltransferase
  misc_feature (1)..(243): Xaa is any amino acid
MRFIFGNEWNEKKIRTVARAVFRLQGKNLFDAVHLGAAKEDAFDRIVSHDSLYDIAQARGRGKGIMAITAHLGCFEMLLHLCARRGLSGFAVGRTFKNPDVDETMRKIRSGPDIEHVDKSDSRSIVRLLRQGRVMGVLIDQDTNVEGVFAEFLGHTAFTPSSAVRFAMKQGIPIFVSVTARLPGDKHHVYISDELIPANTGDPKADLVANIQKINDFICEYIRKYPEQWVWMHERWKTKPVDT

SEQ ID NO: 50927 - DNA, 1005 bp, Unknown
  Obtained from environmental sample
  misc_feature (1)..(1005): n is a, c, g, or t
atgactatagccatagacgctcgtatgaaaaataaaagcggcattggaacttatatcaagaacctgatggcgcacataaattatgacgttgttttagacgagtcgaatttcccgtgcaaaaactacagtataaaagagcagatatttttcccgcatagcagattgcgcaaagaaaaggttgacgttttgcatgttccgcatctgaatattccgattttttatcgtggaaaactaatagttaccatacacgacttgacgcatttgagatatccgcaatttttacctagcagattgcatcatttctattttaagtttatgataggcacggcggtaaagaaagcgtctaaaattttaaccgattctctaagtacaaaaaacgatataatagagttttttaacgccaagccggacaaaattagagttataccgttgggggtcggaaatgagtttattatccgacaaaaaaacgatatttcttatctgatggaaaaatataatattcctcatgataaaaagataattttgtatgtaggaaatcttttgccgcataaaaatttaaaggctttgctaaaggcttttggtttaatagagggttgcgttctggttttggtcggaaagagttttaaagacaggtcggagcaggccgcggaacagagttctattatttatgccggagaggtcagccagaacgaacttgtggatttatataacctcgctgatctgtttgtactgccctctctttatgagggtttcggtctgccggtattggagagtatggcctgcggaacgcccgtagcatgctcaaacgtttccagtttacccgaagtcggcggggatcgcgccttttatttcgatccgaaagatgaaaataatatcgccgacacaataaataaagccattactcgggacggcgacaaatcggcattgagagaatacgccctgcgtttttcgtgggaaaagacggcgaaagagacgttggacgaaatcaattccattgccggttaa

SEQ ID NO: 50928 - protein, 334 aa, Unknown
  Obtained from environmental sample
  DOMAIN (158)...(316): Glycosyl transferases group 1
  misc_feature (1)..(334): Xaa is any amino acid
MTIAIDARMKNKSGIGTYIKNLMAHINYDVVLDESNFPCKNYSIKEQIFFPHSRLRKEKVDVLHVPHLNIPIFYRGKLIVTIHDLTHLRYPQFLPSRLHHFYFKFMIGTAVKKASKILTDSLSTKNDIIEFFNAKPDKIRVIPLGVGNEFIIRQKNDISYLMEKYNIPHDKKIILYVGNLLPHKNLKALLKAFGLIEGCVLVLVGKSFKDRSEQAAEQSSIIYAGEVSQNELVDLYNLADLFVLPSLYEGFGLPVLESMACGTPVACSNVSSLPEVGGDRAFYFDPKDENNIADTINKAITRDGDKSALREYALRFSWEKTAKETLDEINSIAG

SEQ ID NO: 50929 - DNA, 1032 bp, Unknown
  Obtained from environmental sample
  misc_feature (1)..(1032): n is a, c, g, or t
ttggcggatatccattttcatcgcaaggaatacaaggaagccgaagaacgcatacattcttatctggccaaaaaaccaaatgacagggaagcaaaaatgcttttgggcagaatgtttgcggaaatggggaatcgcgcacatgcgattcaaatttttgaggagctttcaaaagcggatcccaatgatactgaagccctgactgcggtcgcggaacttcacaaagaggctggttctgtcgaaaaagcccttcgcactgcggatacattggtaaacctacaggggaagcgggcaacagcggaagatctttcggatcttaacaaatcgctcaaactatacgaaggcgcggtgcacgcttattcatcatctgtcagggaagtgtgggatcgcaatttaaagcttgttagtgaggaaggggaaaaagaaattacaacagaagatgatttatcgctgcttatgggaagcaatattctatcgggaattgatgaggagcctgaggctctgtttacagaggaggcggattttatcccaggcgaggatgaagtggatttatttctgggcagcgaatcctatggggaaatgccggaatcaagcgatttcagtgaagagatggaaaagcccaaatatgatgatcctctggacgcgttggcggatcccgcactggcagaagagcccgccttggaggatcttgcaagggataatactgacaaagcggcggataataaaccatatgaaaagccgtatgaggaaatgcctgagcttgcggaagaaattccaatagagtcggcaaaggaaatcccaaaggaaaccccggaggaatttttgaaagaaacccttaaagaaataccaaaggaaattccaagggaaaccccgatagagttttccacacctcctgtaaattccccaccgcctaattatcggagctacccgccgcctgttgttttgttgggaatatcggcaatgccgcggctacaaacccctcctcaggggcaacagccgcccaaaaaaccggagccgattctcggccgattctga

SEQ ID NO: 50930 - protein, 343 aa, Unknown
  Obtained from environmental sample
  misc_feature (1)..(343): Xaa is any amino acid
MADIHFHRKEYKEAEERIHSYLAKKPNDREAKMLLGRMFAEMGNRAHAIQIFEELSKADPNDTEALTAVAELHKEAGSVEKALRTADTLVNLQGKRATAEDLSDLNKSLKLYEGAVHAYSSSVREVWDRNLKLVSEEGEKEITTEDDLSLLMGSNILSGIDEEPEALFTEEADFIPGEDEVDLFLGSESYGEMPESSDFSEEMEKPKYDDPLDALADPALAEEPALEDLARDNTDKAADNKPYEKPYEEMPELAEEIPIESAKEIPKETPEEFLKETLKEIPKEIPRETPIEFSTPPVNSPPPNYRSYPPPVVLLGISAMPRLQTPPQGQQPPKKPEPILGRF

SEQ ID NO: 50931 - DNA, 1458 bp, Unknown
  Obtained from environmental sample
  misc_feature (1)..(1458): n is a, c, g, or t
atggcgattaacagggttggccgcgaattatggcggcttaacctggggaaaccgatttcttatccgccggttgtaggatgggacggaagggtctttatttcgctggaatccacaatgacatgccgtaccgcggcgggaaacgggctttggaccatagaccttgggagcaatgtctcttttgcgcctatccttgacaagacgggaagcgtcgcgacagttcttcaaaacatggactttataaaagttaaccagttcggcaatgtagagaggattaaacttcagcgcattccgttaatgattgcctccctgaatgagggagcgtttcaaagttatgtgctgctttatcagtccggcgaaatggaaaagataacttttaacaacggggcaaaagcggggggcaagctttcaaaagcgaacatcagatccctgccaacgtctcccgttgcggcaatagggcgtaacgcgcaatttgtcgtatttctcagagacggaaaaacgcttttattggacagtcagggcggaaccgtgtggagtaaaaacacccacgaagctgttgaggaaaaaggagcaggtaatctttctgtcggacaggcctccttaatatgggatgagcgcggcgttttcgcgttgtcaatacgcggggtcagcgcgtttacccatgaaggccgcaggcgttttgttcacaggttaagcgtagaatcttcaggcgtcccttcgctaagcgacgagggaattttatacgcttgcggaaaagacaatatactcagggtgttcagggtggacgtaaaaccgcgcacagtgcctcgcaataaattctacggcccggagccggagggaacttacggtatgggaaatcctccgccgtctccgtgggtaggggataacagccgctacagggatcccgagcaggacgaaatgtatgaggaaatgaaagccgtaatacgcagcggacaaataggcgagaaagaaccaatttatgtcgcgtatataatggagatggtagggttcttcataggcaatcctcaaacttctcccgtgcgccctctggtaaaaccgccgcagcgcgtcaggcttattgagcttctctcatacgtcggttcaagggaaacaatcccgttcttctggaatatttttgacagagaccatgaacccattgtaaggagggcctgcgccgacgcgattggctttgtcggggtggaccccaccggaagatcattttattcctacaattttgcccttactcagggaaatccccacgttgatccccagcttgtgcttgccgcctcgtcttctatcgcgagactctgccgtttttccggtccgcctctctcggccgaaggaatccgtattatgcgctatttctcaaatctgccgacggttccaaacagagtaaaattacaaatccacgacgaaatagacggccttttcaaagaagggctggataaagttatacagtaa

SEQ ID NO: 50932 - protein, 485 aa, Unknown
  Obtained from environmental sample
  misc_feature (1)..(485): Xaa is any amino acid
MAINRVGRELWRLNLGKPISYPPVVGWDGRVFISLESTMTCRTAAGNGLWTIDLGSNVSFAPILDKTGSVATVLQNMDFIKVNQFGNVERIKLQRIPLMIASLNEGAFQSYVLLYQSGEMEKITFNNGAKAGGKLSKANIRSLPTSPVAAIGRNAQFVVFLRDGKTLLLDSQGGTVWSKNTHEAVEEKGAGNLSVGQASLIWDERGVFALSIRGVSAFTHEGRRRFVHRLSVESSGVPSLSDEGILYACGKDNILRVFRVDVKPRTVPRNKFYGPEPEGTYGMGNPPPSPWVGDNSRYRDPEQDEMYEEMKAVIRSGQIGEKEPIYVAYIMEMVGFFIGNPQTSPVRPLVKPPQRVRLIELLSYVGSRETIPFFWNIFDRDHEPIVRRACADAIGFVGVDPTGRSFYSYNFALTQGNPHVDPQLVLAASSSIARLCRFSGPPLSAEGIRIMRYFSNLPTVPNRVKLQIHDEIDGLFKEGLDKVIQ

SEQ ID NO: 50933 - DNA, 519 bp, Unknown
  Obtained from environmental sample
  misc_feature (1)..(519): n is a, c, g, or t
ttgcgagaaaccggggcttatggcgttcagaaaagaggaaagaatggtaaaacttggaggagcttcataatgaacatatcggcgcaaaacttagaccacaaagagctgaacaaactgataagaaccgcaacggaagccgtctgcgtagataattgttttggccagaggtttatcggaagcggtatgagcaataaaaacattacgattaacggaaccccgggaaacgcaatgggagcttattttaacggcgaaaaaattgtagtaaacggcaacgcgcaggacgccgtcggcgatacgatgaacgacggcaaaatcatcatccacggcaacgccggcgacgcgcttggctacgccatgcggggcggcagcatttttgtaaaaggcaatgccgggtacagaacgggcatccacatgaaggaatacaaggagaaaaaaccggtanatcgtcatcggcggcaaggtgggcagttttctgggcgaatatctggccggcggggtgattgtcgtacttggcattga

SEQ ID NO: 50934 - protein, 172 aa, Unknown
  Obtained from environmental sample
  DOMAIN (24)...(171): GXGXG motif
  misc_feature (1)..(172): Xaa is any amino acid
MRETGAYGVQKRGKNGKTWRSFIMNISAQNLDHKELNKLIRTATEAVCVDNCFGQRFIGSGMSNKNITINGTPGNAMGAYFNGEKIVVNGNAQDAVGDTMNDGKIIIHGNAGDALGYAMRGGSIFVKGNAGYRTGIHMKEYKEKKPVXRHRRQGGQFSGRISGRRGDCRTWH

SEQ ID NO: 50935 - DNA, 378 bp, Unknown
  Obtained from environmental sample
  misc_feature (1)..(378): n is a, c, g, or t
atggcgcttttacctaacgcatatatgcagggtgaatgtgctgggataaatatggcggggggcgacaaagtcttcgacaaggcaatccccatgaacgcaatcgggtttttcggcctgcacattatcacggcgggcagttatgcgggaaatgtacacgccgagaccggcagcggcaattacaggcgcttgttttacagcgacaacaaactaaacgggtatattcttatcggcaacgtggaaaaagccgggatttatacaagccttatacgcgagcggacgccgcttgacacaatcgacttcgccctcgtttgcgagaaaccggggcttatggcgttcagaaaagaggaaagaatggtaaaacttggaggagcttcataa

SEQ ID NO: 50936 - protein, 125 aa, Unknown
  Obtained from environmental sample
  misc_feature (1)..(125): Xaa is any amino acid
MALLPNAYMQGECAGINMAGGDKVFDKAIPMNAIGFFGLHIITAGSYAGNVHAETGSGNYRRLFYSDNKLNGYILIGNVEKAGIYTSLIRERTPLDTIDFALVCEKPGLMAFRKEERMVKLGGAS

SEQ ID NO: 50937 - DNA, 921 bp, Unknown
  Obtained from environmental sample
  misc_feature (1)..(921): n is a, c, g, or t
ttgaggaaaggggttaaggcgatgaaatatgttatcataggcaattcagccgcgggcataggcgcggtagagggtattcgcctcatggacaaggatggcgagattaccattatcaccaacgaacggcatcatacctattcgcgcccgctgatctcctatctactgcttggcaaggttacaagggaagagattaaataccggaatgacagtttctataaggattataactgtaaactgctcgcggacacgaccgtaacggcaattgaagccgctgaaaagaatgtggttctgctggacggtaaaaaaatcccatacgacaagctgcttgtcgccacgggttcttctccatttgttcctgtttttgaggggcttgatacagtagttaacaaacatacgtttatgagccttgatgacgcggacaggctagacgccgcgctggccgaagacaagcgggtattgattataggcgcgggccttatcggactgaaatgcgccgagggaattctgaaacatgtaaaacacataacggtggttgaccttgccccccgcgttttatcaagcattcttgatgatcagggggcaaagctggttcaaaaccacctggagagcaagggcatagagttcaagctcgcggctaacgtaaagaagtttacgtttaatcaggcctatttagagggcggtgaaataatagatttcgatatccttgtcctcgctgtgggcgtgcgtcccaatacctctcttctgaacgggatagcgaagattgagcgcggcattgtcgtaaatgagaaatcggagacatcagccccccgacatttacgccgctgggcgactgtacgcaaacgaatgacatttcaagcgggcagagcaaaatcatggcgcttttacctaacgcatatatgcagggtgaatgtgctgggataa

SEQ ID NO: 50938 - protein, 306 aa, Unknown
  Obtained from environmental sample
  DOMAIN (151)...(240): Pyridine nucleotide-disulphide oxidoreductase
  misc_feature (1)..(306): Xaa is any amino acid
MRKGVKAMKYVIIGNSAAGIGAVEGIRLMDKDGEITIITNERHHTYSRPLISYLLLGKVTREEIKYRNDSFYKDYNCKLLADTTVTAIEAAEKNVVLLDGKKIPYDKLLVATGSSPFVPVFEGLDTVVNKHTFMSLDDADRLDAALAEDKRVLIIGAGLIGLKCAEGILKHVKHITVVDLAPRVLSSILDDQGAKLVQNHLESKGIEFKLAANVKKFTFNQAYLEGGEIIDFDILVLAVGVRPNTSLLNGIAKIERGIVVNEKSETSAPRHLRRWATVRKRMTFQAGRAKSWRFYLTHICRVNVLG

SEQ ID NO: 50939 - DNA, 432 bp, Unknown
  Obtained from environmental sample
  misc_feature (1)..(432): n is a, c, g, or t
atgaaaagggtgtatgttaacgaaaaatggtgcctgggctgccatttatgcgaatattactgcgcttttgcgggaaccggagaggccgacatggcgagagccttaaaaggcatgaaaataaacccgaatatccgcatagaggaaaaagacgggatcagcttcgcagtttcctgccggcactgcaaaacgccgttatgcgtaaaaggatgtatcaccggcagcctgacaatcactgacggcgtaattaccattgacagatcaagatgcgtcagctgttatacatgcattctcagctgtcctttcggcgctgtggccccttcggatgacggcgcggtgcaaaaatgcgaactgtgcgttaatacgacagcgggaacccgggcctgcgtaaagggctgtcccaacaacgcgatagtttttgaggaaaggggttaa

SEQ ID NO: 50940 - protein, 143 aa, Unknown
  Obtained from environmental sample
  DOMAIN (82)...(105): 4Fe-4S binding domain
  misc_feature (1)..(143): Xaa is any amino acid
MKRVYVNEKWCLGCHLCEYYCAFAGTGEADMARALKGMKINPNIRIEEKDGISFAVSCRHCKTPLCVKGCITGSLTITDGVITIDRSRCVSCYTCILSCPFGAVAPSDDGAVQKCELCVNTTAGTRACVKGCPNNAIVFEERG

SEQ ID NO: 50941 - DNA, 582 bp, Unknown
  Obtained from environmental sample
  misc_feature (1)..(582): n is a, c, g, or t
ttggttaaaagagttaaaatacttccgtttgaattatccatcaggggttatatgttcgggaacatgtggtcggcctattccaaaggcgaggatttctgcggtcagaaaataaaagccggatacaagctggctgaaaagctggacgccccgctctttaccccctcgacaaaagcccacgtcgggcatgacgaatatatcaccgtcaaacatgtcgcggattcgattggcgtggatctggcaaagaaaattgaaaaagtctgttttgatatttataacacatgttacaattccgcttataagaaaaatattataatcgccgacacaaaatttgaattcggccttgacgaaaaaaataaccttatcctcgcggatgaggtgttaactcctgactcaagcaggttttgggaccttggcggttatcaggtgggggtttcgccgaaaagttatgataaacaatttgtaagggactggctcctcaataataaaaaagacggtgagatgcaatttgacaaagtgccggatgatgttctgcaaaagacatctgagatttacgcagaatgtcttaaaaagataaccggataa

SEQ ID NO: 50942 - protein, 193 aa, Unknown
  Obtained from environmental sample
  DOMAIN (1)...(176): SAICAR synthetase
  misc_feature (1)..(193): Xaa is any amino acid
MVKRVKILPFELSIRGYMFGNMWSAYSKGEDFCGQKIKAGYKLAEKLDAPLFTPSTKAHVGHDEYITVKHVADSIGVDLAKKIEKVCFDIYNTCYNSAYKKNIIIADTKFEFGLDEKNNLILADEVLTPDSSRFWDLGGYQVGVSPKSYDKQFVRDWLLNNKKDGEMQFDKVPDDVLQKTSEIYAECLKKITG

SEQ ID NO: 50943 - DNA, 528 bp, Unknown
  Obtained from environmental sample
  misc_feature (1)..(528): n is a, c, g, or t
gtgaattcacgggttgacgagcctaacaaagtactcgtgggcgacatcacgtatgtcaagacgtctgccggctgggtatatttggcggtgtttatagacctgttttcgcgcatggtggtaggatgggacataagcggcgacctaggtaccgggatggttctaaacgcgctgaaccgcgcagtaaagagccgcgggctacaatccggagtgatggttcataccgatcagggcagccagtacgccagcgatacgttccgggaaacgttacgggggtacggcttcgtccaaagtatgtcccgcaaggggaactgttgggataacgctgtcgctgaatccttcttccgcatatacaagacggaactagtgtatcaccgtaaattcaaggacttagcagatgtttggcataaaagttttgagtatatcgagtgttactataaccggaaaagaatccatggaagtttaaattacttgactcctgccgagttcgaaaaccaattttatagtaaactcgtaaagaaagtggcttaa

SEQ ID NO: 50944 - protein, 175 aa, Unknown
  Obtained from environmental sample
  DOMAIN (4)...(164): Integrase core domain
  misc_feature (1)..(175): Xaa is any amino acid
MNSRVDEPNKVLVGDITYVKTSAGWVYLAVFIDLFSRMVVGWDISGDLGTGMVLNALNRAVKSRGLQSGVMVHTDQGSQYASDTFRETLRGYGFVQSMSRKGNCWDNAVAESFFRIYKTELVYHRKFKDLADVWHKSFEYIECYYNRKRIHGSLNYLTPAEFENQFYSKLVKKVA

SEQ ID NO: 50945 - DNA, 846 bp, Unknown
  Obtained from environmental sample
  misc_feature (1)..(846): n is a, c, g, or t
ttgtccgccgggcaatttcccgaacagactgaaaaattacgcgagcgttaccaaaaaggcgaaacccttgatcatctgctgccggaagcttttgcccttgcccgtgaggcggcaaggcggaacctcggcgagcgcccctacgacgtgcaggtgatgggttccattgttctgcaccagggcaagatcgtcgaaatgaaaacaggcgagggcaaaacattgatgtccgtcgccgcggcctatttgaacgccatacccggcaagggcatacatattgtcacggtcaatgattatctggcaagccgggacgccgaatggatgcggcctatttttagctatttgggcatgactgtcgggactattctttccgacatggacaacgacaggcgcaaggaaaattacgcctgcgacattacctacggaaccaacaacgaattcggctttgactatctgcgcgacaacatgcaccgcgaaatggaaagaagggttcagcgcgggcataactactgtattgttgacgaaatcgattcgattcttatagacgaggcccgcaccccgctgatcatctccggcgccgccgaggacgacaccttcaaattcgccgaggttgataaactcctgggcagcttgaaggaagtcgaaaaaaaggaaaacggcgaataccccgatgaaacccagggcgaacaggttgtcggcgactataagatcaacgaanaaaacaaaaacatttcctttagcaatcanggacttgcctccattgaggggattctgcagaagcgcgngcttatccagggggccattgttgacgagggaaatttgaatacatacactactttacccaggcgctga

SEQ ID NO: 50946 - protein, 281 aa, Unknown
  Obtained from environmental sample
  DOMAIN (191)...(269): SecA preprotein cross-linking domain
  misc_feature (1)..(281): Xaa is any amino acid
MSAGQFPEQTEKLRERYQKGETLDHLLPEAFALAREAARRNLGERPYDVQVMGSIVLHQGKIVEMKTGEGKTLMSVAAAYLNAIPGKGIHIVTVNDYLASRDAEWMRPIFSYLGMTVGTILSDMDNDRRKENYACDITYGTNNEFGFDYLRDNMHREMERRVQRGHNYCIVDEIDSILIDEARTPLIISGAAEDDTFKFAEVDKLLGSLKEVEKKENGEYPDETQGEQVVGDYKINEXNKNISFSNXGLASIEGILQKRXLIQGAIVDEGNLNTYTTLPRR

SEQ ID NO: 50947 - DNA, 822 bp, Unknown
  Obtained from environmental sample
  misc_feature (1)..(822): n is a, c, g, or t
gtggtgcaggacggacaggtgcagattgtcgatgaatttaccgggcgcattttgcacggcaggcgttattcggacggtctgcatcaggcgatagaggcaaaagaacgtattaaaatcgcccagcgcaaccgcacgctggcgactatcaccttccagaattatttcaggctctactcaaaaatttcaggcatgacgggaaccgccgacactgaggccgccgaattcagcaagatttacaaacttgaagtcgtggttatcccgaccaacctgccggtagcgcgtctggacgaggacgacgttgtgtacctgaacgaggctgacaagtacaaggccctttgcgatgaaatcgccgagacaaacaaaaagggccagcccatgcttgtcggcacggtctcaatcgaaaaatcggaaaagatttccgcgctgctgacaaggcgcggggtgcgccatgaagtgctgaacgccaagaaccatgcgcgcgaggcgctgataatcgcggaggcgggcgcgaagggcgcggttacaatcgcgaccaatatggcgggacgcggcacggacatcaagctgggcggcagccctgaatcccgcgcccgaagacgcgcgggaacccagtcaagcccggaacaatacgccgccatctacaatgaagaatacgagaaatggaagaaggattatgaagaagtaaaatcgctcggcggcctgtatgttatcggcacggaacgccacgagagccgccgtatcgacaaccagctcagaggccgctcgggcaggcagggggatcccggcgggagcaattcttcatctccatggatgacgaactga

SEQ ID NO: 50948 - protein, 273 aa, Unknown
  Obtained from environmental sample
  DOMAIN (1)...(32): SecA preprotein cross-linking domain
  misc_feature (1)..(273): Xaa is any amino acid
MVQDGQVQIVDEFTGRILHGRRYSDGLHQAIEAKERIKIAQRNRTLATITFQNYFRLYSKISGMTGTADTEAAEFSKIYKLEVVVIPTNLPVARLDEDDVVYLNEADKYKALCDEIAETNKKGQPMLVGTVSIEKSEKISALLTRRGVRHEVLNAKNHAREALIIAEAGAKGAVTIATNMAGRGTDIKLGGSPESRARRRAGTQSSPEQYAAIYNEEYEKWKKDYEEVKSLGGLYVIGTERHESRRIDNQLRGRSGRQGDPGGSNSSSPWMTN

SEQ ID NO: 50949 - DNA, 945 bp, Unknown
  Obtained from environmental sample
  misc_feature (1)..(945): n is a, c, g, or t
atgaacaatatcacatcttttcccccatcggataatagtgcacaaaccgtacaggtatccgaacagaaaatccaaaaggaaacgatccttgaatatctcaaggttttcggtttcaccaaatccctttccgaagcggaacagaaccagtttatccaaaccgcattggccggtaaccttgatcccttcaaacgcgagatttacattgccgtctatggggaaggggacaatcgcaagctctctatccttacaggctaccaggtctatctgaaacgtgcggaacgcacgggcaagcttgacggctggagggcatggctcgaaggggacggcccccagatgaaggccgttgtcaaaatcttccgcaaggactggcattacagttttacccacgaagtctattgggaagaagccgtccagaaaaagaaggacggaaaccctacccaattttgggcgaaacagccacgattccagttgaggaaggtagccatagcccagggcttcaggcttgcgttccctgacgagcttggaagtttcccatacgagaccgccgaattgccggacaatgaagccgcccctgagacacaggcccctgccaatcacaatcctgtaaaaacgtctatccaatcccttgcggaacaggccgcctcagatgacagccccgacgttaaggcaagttcccaacagcggaatccatcgaaggccccgccgaaagcgaaagcgaatgaagcgcaacaagcgcaggctccttcatcccaggattcggaactggacaaggagaccagggacaggctcatccggaagattgaggatctctttgacgagcatccaaaagactttacgcagaagcataaggagtggattctcaacaatgccttaaaggcaaccgacagggccggtatcggcaagatgatagcctacaccgagaaggtcatcaaaaaagcggcataa

SEQ ID NO: 50950 - protein, 314 aa, Unknown
  Obtained from environmental sample
  DOMAIN (21)...(213): RecT family
  misc_feature (1)..(314): Xaa is any amino acid
MNNITSFPPSDNSAQTVQVSEQKIQKETILEYLKVFGFTKSLSEAEQNQFIQTALAGNLDPFKREIYIAVYGEGDNRKLSILTGYQVYLKRAERTGKLDGWRAWLEGDGPQMKAVVKIFRKDWHYSFTHEVYWEEAVQKKKDGNPTQFWAKQPRFQLRKVAIAQGFRLAFPDELGSFPYETAELPDNEAAPETQAPANHNPVKTSIQSLAEQAASDDSPDVKASSQQRNPSKAPPKAKANEAQQAQAPSSQDSELDKETRDRLIRKIEDLFDEHPKDFTQKHKEWILNNALKATDRAGIGKMIAYTEKVIKKAA

SEQ ID NO: 50951 - DNA, 840 bp, Unknown
  Obtained from environmental sample
  misc_feature (1)..(840): n is a, c, g, or t
ttgttaggcgcaagttttcgtaaaatgtccggcgccctgcatatattcggcagatttacaaaccgtgaaatcgccgtaaaagccatgcgcggcgaaataaaaccgggcggtcttccgaaacacgccacaatctttttttccgatatacgcggctttaccgcgctgtctgaaaattttacaaaagcgttcggagacgaagcctcggataaaatcgtcttctggctcaacaactaccttacaagtatggtcgagtgcgtggaaaaaacaggcggcgttgtagacaaattcatcggagacgcggtaatggcgcattggggcacggcttataccgcaggcagtcccaagaaagacgcgtttaactgcgtaaaagcggctcttatgatgcgcaacgcgctgatagcgttaaacaaggatcgcgcggcaaatgatcccggcaaccctcccatcagaatcggctgcggtattaatacgggaattgttacagcaggacaaatcggaagcgaacttcgcatggagtacacggtaataggcgatcctgtaaatctcgcttcccgcgtcgaagcgctgacaaagccgcttgctactgatattcttataaccgaggatacttggaatctaatcggagacagtcttattacggaagaaatgcccccggtaacggtaaagggaaaggcaaagccggtgcgtttgtttgccgtcattaattttgccgaagaaaaagaaggtccgcgcactcttgcggaagtccgtaaaatattgggcgttgatgcgcctgaactttccaatgttgatcttgacgctgaagaaaagaaatacaaaataggcgatgaaaagaaatga

SEQ ID NO: 50952 - protein, 279 aa, Unknown
  Obtained from environmental sample
  DOMAIN (33)...(235): Adenylate and Guanylate cyclase catalytic domain
  misc_feature (1)..(279): Xaa is any amino acid
MLGASFRKMSGALHIFGRFTNREIAVKAMRGEIKPGGLPKHATIFFSDIRGFTALSENFTKAFGDEASDKIVFWLNNYLTSMVECVEKTGGVVDKFIGDAVMAHWGTAYTAGSPKKDAFNCVKAALMMRNALIALNKDRAANDPGNPPIRIGCGINTGIVTAGQIGSELRMEYTVIGDPVNLASRVEALTKPLATDILITEDTWNLIGDSLITEEMPPVTVKGKAKPVRLFAVINFAEEKEGPRTLAEVRKILGVDAPELSNVDLDAEEKKYKIGDEKK

SEQ ID NO: 50953 - DNA, 456 bp, Unknown
  Obtained from environmental sample
  misc_feature (1)..(456): n is a, c, g, or t
ttgactatcgcatcaaaagcatctttggtaaaggaaagttctattccatccatcgcaaaaagttttgtgtattgttttaccaatgagttttgtggttcggttaaaatattcaaaagcgcagcctcgtctagttcgtctaggctaactatgaccggcaacctgccaaccagttctggaagcaaaccaaagcctattaaatcttctggttcgcatttgctgagtatttctccaattttggtttcatttttagataccacatctgcgccaaaacccattcctccaccggaattcacgcgccttgaaataaccttatccaaagtttcaaaggctccgccgcatataaacaaaatattgcgggtatttatatgcaccaaaggctgttctggatgcttacgaccgccctttggcggaatggcagcaatggttccttccaaaattttaagcaagccctgctga

SEQ ID NO: 50954 - protein, 151 aa, Unknown
  Obtained from environmental sample
  misc_feature (1)..(151): Xaa is any amino acid
MTIASKASLVKESSIPSIAKSFVYCFTNEFCGSVKIFKSAASSSSSRLTMTGNLPTSSGSKPKPIKSSGSHLLSISPILVSFLDTTSAPKPIPPPEFTRLEITLSKVSKAPPHINKILRVFICTKGCSGCLRPPFGGMAAMVPSKILSKPC

SEQ ID NO: 50955 - DNA, 849 bp, Unknown
  Obtained from environmental sample
  misc_feature (1)..(849): n is a, c, g, or t
gtgtggttcgtggtaaaaaatcttattttcatgtcagaccaaagcgtcatacctatagaacaacttttacctcataaactcccgctggtagcgctcatgggtcgtcccatctttcccggtatttttacgcccatcatgattggcaaccctaccgacgtaaaagtcgtggaagatgccgccgcgggggacgcgatggtgggtcttgttatgatgcaaaatgaaaccgagacccctgccattaccgatttatacactgtgggaacggtggcgaagatcgtaaaaaaaataaacctgccagacggcggccttaacatttttatttctacattaaagcgtttccgtgtaaagaagacgcttcacccgtccaatccgattgtcgccgcggttgagtaccttgaagatgaggaagataacacaagcgaggttaaagcccttacaagagcgttgatttccgagatgaaacagatcagcgagaacaacccgctgttttcggaagagatgcgccttaatatgatcaatattgaccatccaggaaaaatcgcggattttatcgcgagtattcttaacatagaaaaagctgaacagcagaagattctggaaattttaaacgtgcgaaaacgcatggaacaggtgctggtttttattaaaaaagaacaagaacttttgcgtattcaaaaaaagattcaaagagagataaacgaaaaaatagaaaaatcccagcgcgactatntcttaaaggaagagttaaaagcgataaagactgagcttggcatgacgaccgatgccaaaagctccgattaccagcgttttaggaaaaatttgacgcatttaaatttgagggcgagataa

SEQ ID NO: 50956 - protein, 282 aa, Unknown
  Obtained from environmental sample
  DOMAIN (26)...(217): ATP-dependent protease La (LON) domain
  misc_feature (1)..(282): Xaa is any amino acid
MWFVVKNLIFMSDQSVIPIEQLLPHKLPLVALMGRPIFPGIFTPIMIGNPTDVKVVEDAAAGDAMVGLVMMQNETETPAITDLYTVGTVAKIVKKINLPDGGLNIFISTLKRFRVKKTLHPSNPIVAAVEYLEDEEDNTSEVKALTRALISEMKQISENNPLFSEEMRLNMINIDHPGKIADFIASILNIEKAEQQKILEILNVRKRMEQVLVFIKKEQELLRIQKKIQREINEKIEKSQRDYXLKEELKAIKTELGMTTDAKSSDYQRFRKNLTHLNLRAR

SEQ ID NO: 50957 - DNA, 1365 bp, Unknown
  Obtained from environmental sample
  misc_feature (1)..(1365): n is a, c, g, or t
gtgcgcaaactgcgcaaggacacgaaaggctcgatagtctgccttgtggggccgccgggggtgggaaaaacttccgtgggcagatcaatcgcgcgcgcgcttggcaagcaatttttccgtttttcagtcggcggcatgagggacgaagctgaaatcaaggggcacaggcgcacctacataggggcgatgccggggaaaattattcagggactgaagattgtaaagacaagagaccccgtttttatgatagacgaaattgacaagatgggttccagttttcagggagaccccgcaagcgcccttcttgaagtgcttgatcccgaacagaactacgctttccgcgatcattatcttgatctgccgtttgatatttcccatgtgttttttattgttacggcaaacactctggacacgattcccgttccgcttatggaccgcatggaaataatccagcttcccggttatatagacatagaaaaacttgaaattgcccaacgttatcttttgcccaaaagccttgaaaagaacggacttaaaaagaatcaggttaaatacacaaaggacagtcttttacacatagcgaacgcctatgcccgggaagccggagtgcgcaactttgaaaaaaatcttgacaagatacaccgtaagctcgcaaagcagattgttgaagcgcaggaaacggcgccccccgctgaagaaaactcggataaaaaaccggcaaagccgacgaagccggaaattttccatgttgataaaaaatttgtggaaaagcagttgggaaagcctattttccccgaaggcgacataaagaaagcagacaggccgggaatgtctgtcgggcttgcgtggacaagcatgggcggcgatacccttgtgatagaggcgacatctcttcccgggaaagaaggctttacgctgacgggcaagatgggcgacacaatgaaagagagcgcgacaatcgccatgaccgtcgcccgcaagctggcggtggaacgctattgtatagaccccgagtggtttgacaagaaccatatccatttgcacataccggaaggggcgactcccaaggacggcccttcagccggaataactatggcgacggctttgatttccctgttacgcgaaaaaattatcaccgacaaactggtgatgacgggggagctttcgcttacagggcaggtactccccatcggagggcttaaagaaaagacagtcgccgcccgcagaaacaaagcgaagcacataattttcccgaagcagaatgagcgcgatcttgatgaaattcccgattatgtgaaaaaagggattgagttccatcctgttacttcttatcaagaggtgttatctctggctctgcctgattaa

SEQ ID NO: 50958 - protein, 454 aa, Unknown
  Obtained from environmental sample
  DOMAIN (12)...(155): ATPase family associated with various cellular activities (AAA)
  misc_feature (1)..(454): Xaa is any amino acid
MRKLRKDTKGSIVCLVGPPGVGKTSVGRSIARALGKQFFRFSVGGMRDEAEIKGHRRTYIGAMPGKIIQGLKIVKTRDPVFMIDEIDKMGSSFQGDPASALLEVLDPEQNYAFRDHYLDLPFDISHVFFIVTANTLDTIPVPLMDRMEIIQLPGYIDIEKLEIAQRYLLPKSLEKNGLKKNQVKYTKDSLLHIANAYAREAGVRNFEKNLDKIHRKLAKQIVEAQETAPPAEENSDKKPAKPTKPEIFHVDKKFVEKQLGKPIFPEGDIKKADRPGMSVGLAWTSMGGDTLVIEATSLPGKEGFTLTGKMGDTMKESATIAMTVARKLAVERYCIDPEWFDKNHIHLHIPEGATPKDGPSAGITMATALISLLREKIITDKLVMTGELSLTGQVLPIGGLKEKTVAARRNKAKHIIFPKQNERDLDEIPDYVKKGIEFHPVTSYQEVLSLALPD

SEQ ID NO: 50959 - DNA, 372 bp, Unknown
  Obtained from environmental sample
  misc_feature (1)..(372): n is a, c, g, or t
ttgggcaatttcaagtttttctatgtctatataaccgggaagctggattatttccatgcggtccataagcggaacgggaatcgtgtccagagtgtttgccgtaacaataaaaaacacatgggaaatatcaaacggcagatcaagataatgatcgcggaaagcgtagttctgttcgggatcaagcacttcaagaagggcgcttgcggggtctccctgaaaactggaacccatcttgtcaatttcgtctatcataaaaacggggtctcttgtctttacaatcttcagtccctgaataattttccccggcatcgcccctatgtaggtgcgcctgtgccccttgatttcagcttcgtccctcatgccgccgactga

SEQ ID NO: 50960 - protein, 123 aa, Unknown
  Obtained from environmental sample
  misc_feature (1)..(123): Xaa is any amino acid
MGNFKFFYVYITGKLDYFHAVHKRNGNRVQSVCRNNKKHMGNIKRQIKIMIAESVVLFGIKHFKKGACGVSLKTGTHLVNFVYHKNGVSCLYNLQSLNNFPRHRPYVGAPVPLDFSFVPHAAD

SEQ ID NO: 50961 - DNA, 1242 bp, Unknown
  Obtained from environmental sample
  misc_feature (1)..(1242): n is a, c, g, or t
ttgtccaaaggcaggcgcgatattgaagtagtcctgcccggcttcagccttgagcgcgttgaggccgagattcccggaagggttttcgcgtcgttgttgtttccacggcgttttcccctgtatgtcaggcttgcagccgcggatccgctgaaacctttgcaaacggcttcctctgaatttgccgcgtggagctttggcccggagccgacggcgtcatggcagattcccatggttctttcggaaggggtataccgcacaggttcagcgtctgtaaacgcgaggggaatcctcgcggcttcggcccgttttgccgtaacccgcgccggccttcgcgatcttgtccgcgcggaaaacctttccgctaatggcggcaacgccgcttcgcccctcagcctcatacgctctgtttctgatattgtctcttttcttgacggcaatgccggcgccgccgcgtggcttgccgatacccttccgcaggaaccggcaggcctgcttgtttcctcatcctggtatgaaaaccagcttgccggacatgccgcgattattgcccaggaaaggctttcggctccgccgggggaaagtgttatgggtaatcctcctttacagcaggtacgggtcgccggccttatgtttacaggcttaaatggcggaagcctcgctcagatagaaccgtttccccatctcgcgcggatagagccttttatgatatgttccacgcctgttcccacgcccgctttcatggactttcttgacgcgaacccccagtggggccccgatcaaagggagacgcttataagccgcgggctggcaaccagcgaatacctggccgactttgaagcggggacgggcagggtgaataccggcgtcagcgcggtatcatggtacgcggcgcaggcctattgcgaatggcttgggtcaaaactccccgattcgctttccggctacacagtaaggctgcctacggaagcggaatgggaatacgcggtaaaatcaagggaaaaggatcggcttgtcaggggaagcgtgtgggagtggtgcggggatccctattcgcatcttcctttcatttccgcgccgcccgagacaatagccgccgtcggttcgcccgaatatccgctgcggggcggttccctgctgaacgccgtcacgccgggcaatcctgaaacaagagcgtccctgccgcctgaaagctgctcgccctttgtttccttccgccccgtgattgcccgcaaaggccgataa

SEQ ID NO: 50962 - protein, 413 aa, Unknown
  Obtained from environmental sample
  DOMAIN (199)...(408): Domain of unknown function (DUF323)
  misc_feature (1)..(413): Xaa is any amino acid
MSKGRRDIEVVLPGFSLERVEAEIPGRVFASLLFPRRFPLYVRLAAADPLKPLQTASSEFAAWSFGPEPTASWQIPMVLSEGVYRTGSASVNARGILAASARFAVTRAGLRDLVRAENLSANGGNAASPLSLIRSVSDIVSFLDGNAGAAAWLADTLPQEPAGLLVSSSWYENQLAGHAAIIAQERLSAPPGESVMGNPPLQQVRVAGLMFTGLNGGSLAQIEPFPHLARIEPFMICSTPVPTPAFMDFLDANPQWGPDQRETLISRGLATSEYLADFEAGTGRVNTGVSAVSWYAAQAYCEWLGSKLPDSLSGYTVRLPTEAEWEYAVKSREKDRLVRGSVWEWCGDPYSHLPFISAPPETIAAVGSPEYPLRGGSLLNAVTPGNPETRASLPPESCSPFVSFRPVIARKGR

SEQ ID NO: 50963 - DNA, 462 bp, Unknown
  Obtained from environmental sample
  misc_feature (1)..(462): n is a, c, g, or t
gtggctgacggcgttaaagtcattgccgtaaaccgcaaggcgcggcatgattattctgttgacgaaacctatgagtgcggcatagaactgcttggcaccgaggtcaagtccttccgtgacggaaaaatatcattccccgacgcgtgggccgaggtgatagacagagaggtgtggctcaggtctttgcgcgtcgcggagaatcccttttcatcggtattcaaccatgatcccgaccgcaaaaaacgtcttcttctcaacagggacgaaatcaaacgcatacaccgcaaggtcgaggaaaaaggctatacccttatccccctgtcgttttactttaaaaagggaagggtaaaggtggagcttgggctgtgcaaggggaagaaggtttatgacaaacgcgccgacattcgggaacgtgatgtgaagagggatatggctcgcngaataagaaataaaaatgaatag

SEQ ID NO: 50964 - protein, 153 aa, Unknown
  Obtained from environmental sample
  DOMAIN (6)...(73): SmpB protein
  misc_feature (1)..(153): Xaa is any amino acid
MADGVKVIAVNRKARHDYSVDETYECGIELLGTEVKSFRDGKISFPDAWAEVIDREVWLRSLRVAENPFSSVFNHDPDRKKRLLLNRDEIKRIHRKVEEKGYTLIPLSFYFKKGRVKVELGLCKGKKVYDKRADIRERDVKRDMARXIRNKNE

SEQ ID NO: 50965 - DNA, 684 bp, Unknown
  Obtained from environmental sample
  misc_feature (1)..(684): n is a, c, g, or t
atgaaaatcagttttaaattatcagtgatcctggtcgcgcttgggttgttcgcgattgcctcagtcagtattaccctgcttatcaaagcgcgggccaatatctcgggcctttctgaaaaatacgttgtctccatggcaaatgactccgccgcggatgttacaaattttattgaatcatacatggacagggtggaaaacaccgctcatgttatggaacagtaccgttatatgatagttgccaaccgccggactttttttaattttatactcgccgggataacgaaggaaaacccgggaattatcgcggcatggtgcgtttgggaacctgacgttttggagggcgacgacagtcagtatattggaacaaaaggaaccagttcaggcggacggttttcaccgtattattactgggataagggaaaggtcgaacagagtgtcctggaagactttgaggatcccgcgtacataataaccaaaaaaacaggtttaccgatagttgtggacccttacgagtacgaagtcggcggcaagaaagaattaataacctcagttaccgcccctatacgcacggacggcagggttgtgggggttgtaggttatgacattccccttgcggagattcaaagaatttcgcaaacccaaaagcctttccccgattccgtacagcctatctcggccatctga

SEQ ID NO: 50966 - protein, 227 aa, Unknown
  Obtained from environmental sample
  SIGNAL (1)...(20)
  misc_feature (1)..(227): Xaa is any amino acid
MKISFKLSVILVALGLFAIASVSITLLIKARANISGLSEKYVVSMANDSAADVTNFIESYMDRVENTAHVMEQYRYMIVANRRTFFNFILAGITKENPGIIAAWCVWEPDVLEGDDSQYIGTKGTSSGGRFSPYYYWDKGKVEQSVLEDFEDPAYIITKKTGLPIVVDPYEYEVGGKKELITSVTAPIRTDGRVVGVVGYDIPLAEIQRISQTQKPFPDSVQPISAI

SEQ ID NO: 50967 - DNA, 1596 bp, Unknown
  Obtained from environmental sample
  misc_feature (1)..(1596): n is a, c, g, or t
atgttatcaacgccgccgaaatcgcccgtacaccggcatgggcaccgtatcaacacggtcatgcaggccgcctatttcaagatttccggcatattggccgaagccgacgcggtaaaacgcatgaaggagcatatcgaacactcctatggcaagaagggcaaagacgtagttgaaaagaactataaaaccgttgacgcgtcattgaacgccgttgaaaaagtagaatacccctccaagaccgaaggggacatccacatgaagaagccctttgccaccgcgaaggattcatggatcaaagatgtcctgggaaccatgtcgatacaggaaggagactctctggctgtcagcaaaattccggaagacggaaccttccccacggcgactacccaatacgagaaacgctcggtggcggagcaggttcctgtctggaatcccgacgtgtgtatacagtgcggtaactgtacggttgtatgcccccatgcctgtatgcgctttaaaaaccttaccgacgctcaggtcgcgaaagcgcccgccggcttcaaaaccgcggcgataaaacccaagccggtggacggacagaaggcggcgctggttatagcctgcgaagactgctacagttgcggcgtctgcctcaatgtatgcccgatgagcaaggacaaaagcaagccgatggcgctatcatggaaatcttacgcggacgatcatcaattccacgcggaacaggtcgcggtctgggactacttcctttcattgcccgaaacgcccgccggcgaactgaaaagcgcgaaagcgctcgcctacaaacggcctttgtttgaattctccggcgcatgcggcggctgcggcgagactccttacgtcaagcttatgtcacagcttgtcggcgaccgggcgctcatcggcaacgccacgggctgtacctcgatatacggcggaaacctccccaccaccccctactgcaaacgggcggacggacgcgggccggtgtggtcaaacagcctctttgaggacgcggcggaattcgccatgggcttcaggcttaccagcgacaagctggctgtccacgcccgcgaagttgctgaaaaggcaaagagcgaaggcatcgccgcgggaatcatcgacaagatactctccaatgatcagtccgatgacgagaagatcgacgaaatgcggaaaagcaaagacgaactcaaagccgcgattaaaaacgattcaaagcccacggcaaaattgctttactcccttgccgatttctttgtaaaaagatcggtatggggcttcggcggcgacggatgggcatacgacatcggcttcggcggccttgaccacgtgctcgcctcgggtaaaaatgttaaccttctgtgtctggacaccgaggtctactccaacaccggcggccagatgtcaaaggcgaccccggtaggcgcaatcgccaaattcgccaacgcgggaaaggaaattaccaagaaagatctgggcgcgattgcgatgagctacggttacgtgtacgtcgccaaggtatcgctgggcgcggacatgaaccagacgatcaaagcctccgcgaagccgactcgtgccgatctgatcagtgggtaa

SEQ ID NO: 50968 - protein, 531 aa, Unknown
  Obtained from environmental sample
  DOMAIN (400)...(528): Thiamine pyrophosphate enzyme, C-terminal TPP binding domain
  misc_feature (1)..(531): Xaa is any amino acid
MLSTPPKSPVHRHGHRINTVMQAAYFKISGILAEADAVKRMKEHIEHSYGKKGKDVVEKNYKTVDASLNAVEKVEYPSKTEGDIHMKKPFATAKDSWIKDVLGTMSIQEGDSLAVSKIPEDGTFPTATTQYEKRSVAEQVPVWNPDVCIQCGNCTVVCPHACMRFKNLTDAQVAKAPAGFKTAAIKPKPVDGQKAALVIACEDCYSCGVCLNVCPMSKDKSKPMALSWKSYADDHQFHAEQVAVWDYFLSLPETPAGELKSAKALAYKRPLFEFSGACGGCGETPYVKLMSQLVGDRALIGNATGCTSIYGGNLPTTPYCKRADGRGPVWSNSLFEDAAEFAMGFRLTSDKLAVHAREVAEKAKSEGIAAGIIDKILSNDQSDDEKIDEMRKSKDELKAAIKNDSKPTAKLLYSLADFFVKRSVWGFGGDGWAYDIGFGGLDHVLASGKNVNLLCLDTEVYSNTGGQMSKATPVGAIAKFANAGKEITKKDLGAIAMSYGYVYVAKVSLGADMNQTIKASAKPTRADLISG

SEQ ID NO: 50969 - DNA, 756 bp, Unknown
  Obtained from environmental sample
  misc_feature (1)..(756): n is a, c, g, or t
atgccaacggcagtttctccgcccacccgcttgtgcttggcggccgnctacgggcttggttccaaagagttcacccccacaatggtcaaggcggtatttgacaacctgtcaggcaagaaaaccgccaacttcatcgtcggcattaatgacgatgtggagcacaagagcctggaatacgatccgcattttgtgctggaagaagagggcctgaacgaagccctgttctacgggcttggcgcggacggcacggtcggcgcgaacaagaactcaatcaagatcatcagcgaggcgaaaccggaactcaacgcccaggcgtacttctcctacgattcgaaaaagtcaaacggctttaccgtttcgcatctccgcttcggcacgggccgtattaggaggccctaccttatcaactccgcggacttcctcgcctgccataaattttcctacatggaaatgtacgacatgctcaagagcgttaaggcgggaggaaccttcctcctncacagcccgttcaaggccgccgacgtatggaagaatatccccgtagaggcccagcagcgcataatcgacaaaaaattaaaattctatgttatcaacgccgccgaaatcgcccgtacaccggcatgggcaccgtatcaacacggtcatgcaggccgcctatttcaagatttccggcatattggccgaagccgacgcggtaaaacgcatgaaggagcatatcgaacactcctatggcaagaagggcaaagacgtagttga

SEQ ID NO: 50970 - protein, 251 aa, Unknown
  Obtained from environmental sample
  DOMAIN (79)...(240): Pyruvate ferredoxin/flavodoxin oxidoreductase
  misc_feature (1)..(251): Xaa is any amino acid
MPTAVSPPTRLCLAAXYGLGSKEFTPTMVKAVFDNLSGKKTANFIVGINDDVEHKSLEYDPHFVLEEEGLNEALFYGLGADGTVGANKNSIKIISEAKPELNAQAYFSYDSKKSNGFTVSHLRFGTGRIRRPYLINSADFLACHKFSYMEMYDMLKSVKAGGTFLLHSPFKAADVWKNIPVEAQQRIIDKKLKFYVINAAEIARTPAWAPYQHGHAGRLFQDFRHIGRSRRGKTHEGAYRTLLWQEGQRRS

SEQ ID NO: 50971 - DNA, 1032 bp, Unknown
  Obtained from environmental sample
  misc_feature (1)..(1032): n is a, c, g, or t
atgccttttggagtgtgcacgatgtcagaacaaagaaagtctctcgttgaagagataaagtccggcgagcatggaataagtgctctttgccgcaaatatggaataagccgcccaacggcatataaatggctcagccgcagcgaatcaggctgttcaatggagaatatgagcaaagctccgttgaaaagcccctgcaagacatctgtttccgtggaggagaaggtcaagcaggcaaggcataatcatccttgctggggcggtcgcaagctgaaagcatatttggagcgcgcaggcgaagcccatgttccttccgcaagcacaatcacagcaatcntgcatcgcaacggtcttataagcagggaggcaagccttgccgcgaaaccgttcaagcgttntgagatggatgcccccaatgacttgtggcaggcggatttcaagggtcatttcgagatgggaaatggcagccgttgccaccctctgaccgtgacggacgatatgagccgtttcagcctttgtatatcagcgaagggaaacgagcagctggaaggcgttcttggcagcttcctctcgctgttcagggagcgcgggcttccgaaagcggttctctgcgacaacgggcctccatggggattcaccagcgtattcggctacacaaagttcgaggtgttcttgatggatcgcggcgtgcttcccttgcacggcaagccgctgcatccgcaaacgcagggaaaagaggagcgtttccacagaacactgaaaaacgaactgctcaggcaaatctcaataagaaacctgctccacgcccagaaggagtttgatgctttcaggaaaatgtacaacgaggaaagaccgcactgctcgcttggctatgccgttccctcagacagatatagggacagcgaaagggctatgcctgaaaatatagagagatgggaataccccaaggagtgcgagatgaaatgggtcagggctaacggatgcatacgcttgaaaaacaaggatatgttcttgtccgaggcttttacgggctga

SEQ ID NO: 50972 - protein, 343 aa, Unknown
  Obtained from environmental sample
  DOMAIN (133)...(298): Integrase core domain
  misc_feature (1)..(343): Xaa is any amino acid
MPFGVCTMSEQRKSLVEEIKSGEHGISALCRKYGISRPTAYKWLSRSESGCSMENMSKAPLKSPCKTSVSVEEKVKQARHNHPCWGGRKLKAYLERAGEAHVPSASTITAIXHRNGLISREASLAAKPFKRXEMDAPNDLWQADFKGHFEMGNGSRCHPLTVTDDMSRFSLCISAKGNEQLEGVLGSFLSLFRERGLPKAVLCDNGPPWGFTSVFGYTKFEVFLMDRGVLPLHGKPLHPQTQGKEERFHRTLKNELLRQISIRNLLHAQKEFDAFRKMYNEERPHCSLGYAVPSDRYRDSERAMPENIERWEYPKECEMKWVRANGCIRLKNKDMFLSEAFTG

SEQ ID NO: 50973 - DNA, 1218 bp, Unknown
  Obtained from environmental sample
  misc_feature (1)..(1218): n is a, c, g, or t
atggaacgcactcggcttcttcatctcaacccacacgcagactcctcaaaaggtcagctcaaatggcagcccgcagacgaatggaaaagcgacaacgagctagacctctggataatcgcggtgctgcaagacctgagcaaaaaagtggaaaccgaaatggcagcatacagactatacgccgtagtccccgtaatcctctcgttcatagacgacctcacaaactggtatgtccgccgaagccgccgccgtttttggaaaagcgacaacgacagcgacaaaaacaacgcctatgcaacgctatacaaagcattggtagatttcagcaaaatcctagccccattcctgccattcttggcagaggaaatctaccaaatactcgtgagggaagcgaacccaaacgccccagtctcggttcatctcacatcctaccccgaacacaacgcagaatacgcaaacgaaaaactagtccgccgaatgtcattggttagaagcgccatagaaaaaggcagagcgatacgcagcgcaaacgaaatcaaaaaccgccagcccctcaaaacattgacgctagtcccacacaacgaggaagcaaagcaagtagccgagacaatgcaggatttaatcttggaagaactaaacgtagagcaactccatttcgctggcgatgacaccgagctagccaaaatctccgccaagcccaatttcgcaggcataaaagcaaaaggagcggactacgccaaaaatatgaaaaccctatccaccgccataaccgccttgaccgccgagcaaatcaagcaaatccaaagcggcaccccgcttgacgttgccggtctccaaatagactactcctgcctaatgctagtccgcgaagtagccgaaggtctcgccgttgaagcagacgaaaactacaccatagccttggatttgaaaataacgccagagctacggcaaagctgcatagctagagagctggtgaatcgcatacagaacaggcgaaaggaaatggatttgcagattacggacaagataaagatagcgttgaaaggtttggatgcttacgcggatttgcaagcagcggttgagaagcacaggggttatattttggaagaaacgcaggggttagaagttttgtgtggcggagatgttggtggcgtgtttgtttctgtcaatgttgaaggatatgaaatagaaatttccatttccccaaatttggcacaataa

SEQ ID NO: 50974 - protein, 405 aa, Unknown
  Obtained from environmental sample
  DOMAIN (35)...(189): Anticodon-binding domain
  misc_feature (1)..(405): Xaa is any amino acid
MERTRLLHLNPHADSSKGQLKWQPADEWKSDNELDLWIIAVLQDLSKKVETEMAAYRLYAVVPVILSFIDDLTNWYVRRSRRRFWKSDNDSDKNNAYATLYKALVDFSKILAPFLPFLAEEIYQILVREANPNAPVSVHLTSYPEHNAEYANEKLVRRMSLVRSAIEKGRAIRSANEIKNRQPLKTLTLVPHNEEAKQVAETMQDLILEELNVEQLHFAGDDTELAKISAKPNFAGIKAKGADYAKNMKTLSTAITALTAEQIKQIQSGTPLDVAGLQIDYSCLMLVREVAEGLAVEADENYTIALDLKITPELRQSCIARELVNRIQNRRKEMDLQITDKIKIALKGLDAYADLQAAVEKHRGYILEETQGLEVLCGGDVGGVFVSVNVEGYEIEISISPNLAQ

SEQ ID NO: 50975 - DNA, 960 bp, Unknown
  Obtained from environmental sample
  misc_feature (1)..(960): n is a, c, g, or t
atgcgcatctcaagagcaggcagggtgttcaggcacgagacgatagtgcatagctatccgcattgctggcggacaggcgttccgttgctatacagggcactcagcacttggtttatgaaactggatgcgcccgtaacgaacgcggagggcacaaccaaatccgtcaaggaatggatgctcacctgcaaccagcaaatagagtgggtgcctgaccacatcaaaaacggtcggttcggcaaatggctggaaaacgcacgcgactggaacctgtcacgcaaccgcttctggggaacgccaatacctgtgtggatagccgaagacggcgaaatgctctgcataggctcaatagaggaattgaaaaaagcaagcgggacagaattgcacgacttgcacaaacacttcgtggataaaatagcaataacaaaaaacggcaaaacattcaaacgcacaagcgaagtgtttgactgctggtttgagagcggagcaatgccttatgcccaaaaccattaccccttctcaaacgcggagcacttcaacaaaaccttccccgccgacttcatcgccgaaggcttagaccaaacaagaggctggttctacacattgaccgtgctcgccgccgccctgttccaaaaacctgcattcaaaaacgtgatagtgaatggcataatcctcgccgaagacggctccaaaatgagcaagagcaaaaagaactaccccgaccccaccgaactcatagaccgtacaggcgcagacgcagtccgcctgttcctcataaactccgccgccctcaaagccgaggaactgcggttcagcgaggagggcgttaagcaaatagtgaanagcgtgatgctccccctatggaacgcactcggcttcttcatctcaacccacacgcagactcctcaaaaggtcagctcaaatggcagcccgcagacgaatggaaaagcgacaacgagctag

SEQ ID NO: 50976 - protein, 319 aa, Unknown
  Obtained from environmental sample
  DOMAIN (1)...(269): tRNA synthetases class I (I, L, M and V)
  misc_feature (1)..(319): Xaa is any amino acid
MRISRAGRVFRHETIVHSYPHCWRTGVPLLYRALSTWFMKLDAPVTNAEGTTKSVKEWMLTCNQQIEWVPDHIKNGRFGKWLENARDWNLSRNRFWGTPIPVWIAEDGEMLCIGSIEELKKASGTELHDLHKHFVDKIAITKNGKTFKRTSEVFDCWFESGAMPYAQNHYPFSNAEHFNKTFPADFIAEGLDQTRGWFYTLTVLAAALFQKPAFKNVIVNGIILAEDGSKMSKSKKNYPDPTELIDRTGADAVRLFLINSAALKAEELRFSEEGVKQIVXSVMLPLWNALGFFISTHTQTPQKVSSNGSPQTNGKATTS

SEQ ID NO: 50977 - DNA, 1770 bp, Unknown
  Obtained from environmental sample
  misc_feature (1)..(1770): n is a, c, g, or t
atgtcagaaaataataaacagcaggaaaaattagctatcatacgccactcggtaagccatattatggcgcaggcggtggtaaatcttttcccagggacgaaagttgccataggcccgtccatcgaaaatggtttttactacgattttcttttacccaggcctgtttccgcggatgagcttgtcacgatagaagccgagatgaagcgcatcatcgattcaaaacaggatttcgcggcggtaactgtcagccgcgaggatgcgctgcgacgttttgccgtagaagaattcaagactgagcttatcaatgatctgcccggcgacgcggaaattacgatttatgaaaaccgtgacgcaaacggcaagatgctgtgggcggatctctgccgggggcctcatgtcgccaataccagggaaatcaattcggcggcgtttaaactgcaaagtttggcgggcgcttactggcgcggcgacgagaaacgcgccatgctcacccgtatatacggaaccgcgtgggaaacacccaaagacctgaaggcctacctcgcctttctggaagaggttgaaaaacgcgaccaccgccgccttggcaaggagcttgacctctactcggttcacgaggaagcgggcgcgggtctgatctactggcaccccaacggcgggcgtatccgtgtcgccattgaggatttttggcgcaaagagcattaccgcaacggctacgaaattctttacacgccccacatcggcaaaagctggctttgggaaacatcggggcatcttggtttttacaagggaaatatgtacagccccatggaaattgacaatcaggattattttataaaaccgatgaactgcccgttccatattttaatttacaataacaaaggtcactcttaccgtgacttgccgttgcgctgggcggaacttggaacggtctaccgctatgaacgttcgggcgttttgcacggactccttcgtgtgcgaggcttcacgcaagacgacgcccacatcatctgtacgcccgaacaaatggaaagcgagatacgggaagttttgcgtttcagtttaatgatttggaatgtattcggctttaaggaaataaaggcgtaccttgcgaccaaacccgccgaatcggtcggcgagcagagcaaatgggacgccgctttggaaagtttgcgtaacgcgataagcgccgagggaatgccctacgagattgacgaaggcggcggagcgttttacggacccaagatcgatataaaaattaaagacgctctcaggcgagagtggcagatgtctacaattcagtttgattttaacgaacccgaacgctttgacatgacatttgtcgataccgacggacagcacaaacgcccctacatgatacaccgcgcgcttttcggcagtatcgaaagatttttcggcgtacttatagaacacttcggcggagcgttccccgtttggattgcgccggagcaagcggcggttattcccgtctcggaagtatttaacgaatacgcgcaaaaagcagccgccgctcttaaatcgcatgatttgcgtgtaacggcggagttaggcgatgagcggctanacgccaaaatacgcgcctgccagaaccgcaagattccctatatgcttgtggtcggccagcgtgaggcggaagaaggcacggtgtcgattcgtctgcgtgacggcaggcagcttcccgcgatgcaaaccgctgattttgtcaaatatgtgatcgagaaaattgaaagccgctcattggaattgtaa

SEQ ID NO: 50978 - protein, 589 aa, Unknown
  Obtained from environmental sample
  DOMAIN (110)...(167): Threonyl and Alanyl tRNA synthetase second additional domain
  misc_feature (1)..(589): Xaa is any amino acid
MSENNKQQEKLAIIRHSVSHIMAQAVVNLFPGTKVAIGPSIENGFYYDFLLPRPVSADELVTIEAEMKRIIDSKQDFAAVTVSREDALRRFAVEEFKTELINDLPGDAEITIYENRDANGKMLWADLCRGPHVANTREINSAAFKLQSLAGAYWRGDEKRAMLTRIYGTAWETPKDLKAYLAFLEEVEKRDHRRLGKELDLYSVHEEAGAGLIYWHPNGGRIRVAIEDFWRKEHYRNGYEILYTPHIGKSWLWETSGHLGFYKGNMYSPMEIDNQDYFIKPMNCPFHILIYNNKGHSYRDLPLRWAELGTVYRYERSGVLHGLLRVRGFTQDDAHIICTPEQMESEIREVLRFSLMIWNVFGFKEIKAYLATKPAESVGEQSKWDAALESLRNAISAEGMPYEIDEGGGAFYGPKIDIKIKDALRREWQMSTIQFDFNEPERFDMTFVDTDGQHKRPYMIHRALFGSIERFFGVLIEHFGGAFPVWIAPEQAAVIPVSEVFNEYAQKAAAALKSHDLRVTAELGDERLXAKIRACQNRKIPYMLVVGQREAEEGTVSIRLRDGRQLPAMQTADFVKYVIEKIESRSLEL

SEQ ID NO: 50979 - DNA, 645 bp, Unknown
  Obtained from environmental sample
  misc_feature (1)..(645): n is a, c, g, or t
atggaacgggcagttcatcggttttataaaataatcctgattgtcaatttccatggggctgtacatatttcccttgtaaaaaccaagatgccccgatgtttcccaaagccagcttttgccgatgtggggcgtgtaaagaatttcgtagccgttgcggtaatgctctttgcgccaaaaatcctcaatggcgacacggatacgcccgccgttggggtgccagtagatcagacccgcgcccgcttcctcgtgaaccgagtagaggtcaagctccttgccaaggcggcggtggtcgcgtttttcaacctcttccagaaaggcgaggtaggccttcaggtctttgggtgtttcccacgcggttccgtatatacgggtgagcatggcgcgtttctcgtcgccgcgccagtaagcgcccgccaaactttgcagtttaaacgccgccgaattgatttccctggtattggcgacatgaggcccccggcagagatccgcccacagcatcttgccgtttgcgtcacggttttcataaatcgtaatttccgcgtcgccgggcagatcattgataagctcagtcttgaattcttctacggcaaaacgtcgcagcgcatcctcgcggctgacagttaccgccgcgaaatcctgttttga

SEQ ID NO: 50980 - protein, 214 aa, Unknown
  Obtained from environmental sample
  misc_feature (1)..(214): Xaa is any amino acid
MERAVHRFYKIILIVNFHGAVHISLVKTKMPRCFPKPAFADVGRVKNFVAVAVMLFAPKILNGDTDTPAVGVPVDQTRARFLVNRVEVKLLAKAAVVAFFNLFQKGEVGLQVFGCFPRGSVYTGEHGAFLVAAPVSARQTLQFKRRRIDFPGIGDMRPPAEIRPQHLAVCVTVFINRNFRVAGQIIDKLSLEFFYGKTSQRILAADSYRREILF

SEQ ID NO: 50981 - DNA, 1212 bp, Unknown
  Obtained from environmental sample
  misc_feature (1)..(1212): n is a, c, g, or t
gtgaagacactaacggcaccgatgattttggtttttcggcgctgccctccggcgctcgatccgatgatggtaaattcggaaaccgcgcccacggtctttggtggacaagcacggaagatgatagaagctatgcctacgtccgagtcacaagctataaaaacgaaatcttggaagaggagtccgttatcaaaggcagcggtctttcggtgcgttgcgttgagaattaaagagcgtatattaattaaaaaccacatattaacggaggattttatgattttgttcaatcggcaagctcgaacgctgcttgcggtgttgttcctatgggcggcggtctctaccgcgctcgcgcagacggagaagccgaaaatcgcgctgtatatcgccaacgagaccttgaaaccggacgagaagaactttttgacgattaaactcttaaaaccgtttacggcgagcggattgtacagcgtcatagaccgaagcgacatcttcaccaaaaaagcggctacggagaggataaagcagcgcgacggttcggtgaacgaaaaagaaatctacaagataggctatgaggccggggcgaagtacatctgtatggtggaactcaccaacgcgttcggcaggtggaatatcggcgcgcgcatggtggacgtcgagagcgccgaggtttatctgtcgcagggggagacggacatcaaagggaagctggaagacgcggatttcagcggggcggctaagacgattttcgatcagatacacgggaagagcgcggggagcaccgcgcagactcagaaatatcagacccccgctccggcgccgcccccgccgcctccgagtccaacgcccatgccgccgcagccgcctatcaattacggctcgctccgcgattccagagacgggaagacgtacaaaacggtggttataggcgggaagaggtggatggcggagaatctcaattatcagccgcaatccgggaactcttggtgttatggaaacgataattccaaatgcaacgaatacggcaggttgtacgattggaaaacagcaaagacggtctgtatggcgggatggcatttgccgtctcgtcaagagtggaataatttagtgacaacggcgggcggtaataggaaggccggcaagaagttgaaagcgaggaacggttgggataaaaaaggtaatggaacggatgattacggattttacaaaaaatgctaa

SEQ ID NO: 50982 - protein, 403 aa, Unknown
  Obtained from environmental sample
  misc_feature (1)..(403): Xaa is any amino acid
MKTLTAPMILVFRRCPPALDPMMVNSETAPTVFGGQARKMIEAMPTSESQAIKTKSWKRSPLSKAAVFRCVALRIKERILIKNHILTEDFMILFNRQARTLLAVLFLWAAVSTALAQTEKPKIALYIANETLKPDEKNFLTIKLLKPFTASGLYSVIDRSDIFTKKAATERIKQRDGSVNEKEIYKIGYEAGAKYICMVELTNAFGRWNIGARMVDVESAEVYLSQGETDIKGKLEDADFSGAAKTIFDQIHGKSAGSTAQTQKYQTPAPAPPPPPPSPTPMPPQPPINYGSLRDSRDGKTYKTVVIGGKRWMAENLNYQPQSGNSWCYGNDNSKCNEYGRLYDWKTAKTVCMAGWHLPSRQEWNNLVTTAGGNRKAGKKLKARNGWDKKGNGTDDYGFYKKC

SEQ ID NO: 50983 - DNA, 378 bp, Unknown
  Obtained from environmental sample
  misc_feature (1)..(378): n is a, c, g, or t
ttgcggaaacggcgcaggcgggtttgcccgaccggttggcgcttgccgtcccgtcaggattggagtgatttggcggcaacggctggcggtgaaaacgcggcggggaagaagctgagagcgagaagcggttgggaaaagaaaggcgataaaggtgaagacactaacggcaccgatgattttggtttttcggcgctgccctccggcgctcgatccgatgatggtaaattcggaaaccgcgcccacggtctttggtggacaagcacggaagatgatagaagctatgcctacgtccgagtcacaagctataaaaacgaaatcttggaagaggagtccgttatcaaaggcagcggtctttcggtgcgttgcgttgagaattaa

SEQ ID NO: 50984 - protein, 125 aa, Unknown
  Obtained from environmental sample
  misc_feature (1)..(125): Xaa is any amino acid
MRKRRRRVCPTGWRLPSRQDWSDLAATAGGENAAGKKLRARSGWEKKGDKGEDTNGTDDFGFSALPSGARSDDGKFGNRAHGLWWTSTEDDRSYAYVRVTSYKNEILEEESVIKGSGLSVRCVEN

SEQ ID NO: 50985 - DNA, 1818 bp, Unknown
  Obtained from environmental sample
  misc_feature (1)..(1818): n is a, c, g, or t
ttggaaaaggtgccccccgccgcccagatagcccgcctcgtgggcgaccacgagtttgcgcagaagattggttcggagccgagcaagtactatgggatgttttccggcaccgacgccaacaataacgattacctcagaaacttcggtacggcgtgtttcgaggcgaaaaattacgccagggcgggtatgctcttcaaacagctctccgacgccaatcccaaggacgcggagtctttgaagaaattgtacgagattgagaacctgaacaaaaaccctcgcggcgcctccgagcacttgaagaagtacgtggcgttggtgccgaacgacgcctcgatgcagaaaacgctgggggatatgctgtttgacaacggggacaagtccggcgctcttgccgcgtacagggcggcgatgaaattggatccttccatcaagggtatccacaagagatttgtcgatttgctgaaggaggctccggctccggagcgtattgcggcgctaaacgccgcgatagcggcaaacgaggccgacgcgccgatgttcgctcaattaggcgaactctacaaggcggggggcaactgcaaggccgccatacccgtgcttgaacaggcgatgaaattggacgcgaggaacacctccgtgatggcggctatagccgattgccaggtgaagagcgggaacaccaacggcgcggtgctcgccttggagcaggtcactctgatgaacccgggcgccaccgccgagtacaagatgctgggcgacctctacgtccagcagcggaaaccggccgaggccgtgaaggcctacaagaagttcttggagaaggggagcgacaacgccgcggcgaagctggtcggcgaagaggcgttcaaggccaagaattggtcggaggccgtcaagtacctcgccatggtgaagggcgaggagaggaacccggcgttcctagagatggtcggtaaggcggcgttcgagaacagggacaactctagggcggtggacgtctacaagacgctatccgccatgaatccgcagaacgcggagtacgtgaagatgctctacgacattgcgggaaagatgggagcgcgggacgacgcggtcacccacctgcggaagtacgtgtccatcaagccgcaggacgccgagatgcagaagacgctgggcgatctgctctatgaacgcaaggataagcccggcgcgcttgccgcatacaaggccgcgcttgccgtcgatccgcggatcaagggtttctacaagcgctacgtggagcttatggacggcagcggtaccccgccggagaagatagccgcgatggagggggcgattgccgccggcgagaccgacgcgcagatgctcataaagctgggcaacatataccgcgaacagaagcaaccggccaaagccgtgccgctcttcgaaaaggcggtcaaggataataggaacgacgtgcaacttttggccgcgttggcgcagagccaagaggccgccggcatgacgagcgaggccataacgacatacgagcagtatgtgcttatggatcccaaggcgtcgaaagagcacaagacgctgggcgacctctactccaagcagaagaagccggcagaggcgtcgcgcgcttacaaaaagtatttggagcgcaaccccaccgacaactcggttgcgcttatggtggctaaagaggcgtacagcgccaagcagtatcaagacgcacgaaggtactttgctatggtgcacggcgaggagtccaagagacccgagttcataaacatgtacggaacggccgcttttcagctgacgatgacgcgagggcgctcaccgacctaa

SEQ ID NO: 50986 - protein, 605 aa, Unknown
  Obtained from environmental sample
  DOMAIN (447)...(480): Tetratricopeptide repeat
  misc_feature (1)..(605): Xaa is any amino acid
MEKVPPAAQIARLVGDHEFAQKIGSEPSKYYGMFSGTDANNNDYLRNFGTACFEAKNYARAGMLFKQLSDANPKDAESLKKLYEIENLNKNPRGASEHLKKYVALVPNDASMQKTLGDMLFDNGDKSGALAAYRAAMKLDPSIKGIHKRFVDLLKEAPAPERIAALNAAIAANEADAPMFAQLGELYKAGGNCKAAIPVLEQAMKLDARNTSVMAAIADCQVKSGNTNGAVLALEQVTLMNPGATAEYKMLGDLYVQQRKPAEAVKAYKKFLEKGSDNAAAKLVGEEAFKAKNWSEAVKYLAMVKGEERNPAFLEMVGKAAFENRDNSRAVDVYKTLSAMNPQNAEYVKMLYDIAGKMGARDDAVTHLRKYVSIKPQDAEMQKTLGDLLYERKDKPGALAAYKAALAVDPRIKGFYKRYVELMDGSGTPPEKIAAMEGAIAAGETDAQMLIKLGNIYREQKQPAKAVPLFEKAVKDNRNDVQLLAALAQSQEAAGMTSEAITTYEQYVLMDPKASKEHKTLGDLYSKQKKPAEASRAYKKYLERNPTDNSVALMVAKEAYSAKQYQDARRYFAMVHGEESKRPEFINMYGTAAFQLTMTRGRSPT

SEQ ID NO: 50987 - DNA, 315 bp, Unknown
  Obtained from environmental sample
  misc_feature (1)..(315): n is a, c, g, or t
atgaaagaagcatatcaaattttagttgcacctcacataacagacaaaacggttaaaaataattttgaccgcatgaacgattcttatacttatgtattccgcgtagctttagatgccaacaagtttgaaataaaaaaagctgtagagagtttttttggtgttcaggtagcgtctgtgaatactttgattatgcgtggaaaagtaaaacgtgcccagctgagaacaaaatacacacagggcaaaatgccaaattggaaaaaagcctacataaagctaaaaccgggcaacaaaatagccgagtttgagggaatgtaa

SEQ ID NO: 50988 - protein, 104 aa, Unknown
  Obtained from environmental sample
  DOMAIN (5)...(104): Ribosomal protein L23
  misc_feature (1)..(104): Xaa is any amino acid
MKEAYQILVAPHITDKTVKNNFDRMNDSYTYVFRVALDANKFEIKKAVESFFGVQVASVNTLIMRGKVKRAQLRTKYTQGKMPNWKKAYIKLKPGNKIAEFEGM

SEQ ID NO: 50989 - DNA, 864 bp, Unknown
  Obtained from environmental sample
  misc_feature (1)..(864): n is a, c, g, or t
ttgagggaatgtaagcggggaattattatgggaataaaaagttataagccaaccacaccaactttgcgctacaagcagattagcacaaaggaagaggttacagccgaaaagccttacaagccgcttaccgttggtaaaaaaagaaattctggccgtgataatcaagggcatatttcaagccgcagaagaggcggtggccataagaaacgttatcgcatcatagattttaaaagaaaagaatggctcggcatcccgtgcaaagtggaaaccgtggaatacgatccaaaccgttccgcttatattgcgcttgtcagatacacaaacggcagccgtgcgtatattttggctcctaacgggacaaaggttggggatcagtttaccgctggccctggcgtagagtacaaagttggcaacacaatgccgctaaaagaaattcctttgaatgcttttattcacaatgttgagttaaaacctggacacggtggtcagcttgcccgttctgccggcacatccgcagagcttattgccaaagacgaaaagtattgccaagttcgtttgccatcaggtgaagttcgcttggtgctttctgtttgcatggctaccattggtcaaatatccaacatagatcataacaatgaagtttccggttctgccggtcgcagccgttggcttggcattcgcccctctgtgcgcggcgtagttatgaaccccattgaccatcctcttggtggcggtgaaggccgcacttcgggtggtcgccatccatgttctccttggggcaaaaactccaagggcaaaaaaacccgtaacaacaagcgcaccgataaaatgattgtgcgccgtcgtcagaagaagagggcataa

SEQ ID NO: 50990 - protein, 287 aa, Unknown
  Obtained from environmental sample
  DOMAIN (51)...(128): Ribosomal Proteins L2, RNA binding domain
  misc_feature (1)..(287): Xaa is any amino acid
MRECKRGIIMGIKSYKPTTPTLRYKQISTKEEVTAEKPYKPLTVGKKRNSGRDNQGHISSRRRGGGHKKRYRIIDFKRKEWLGIPCKVETVEYDPNRSAYIALVRYTNGSRAYILAPNGTKVGDQFTAGPGVEYKVGNTMPLKEIPLNAFIHNVELKPGHGGQLARSAGTSAELIAKDEKYCQVRLPSGEVRLVLSVCMATIGQISNIDHNNEVSGSAGRSRWLGIRPSVRGVVMNPIDHPLGGGEGRTSGGRHPCSPWGKNSKGKKTRNNKRTDKMIVRRRQKKRA

SEQ ID NO: 50991 - DNA, 369 bp, Unknown
  Obtained from environmental sample
  misc_feature (1)..(369): n is a, c, g, or t
atgcccggcgatatttgctatggtgttgccaaattgcgcaacactcgctatggcgttttgaaaatgcgcaggttaatagatattttgcgtggaagttctgttgaaagagcttttggcattttgtcggttatgcgcacaaaattaaaaggtgcagcaatagcagaaaaaactatgaaaaccgctgttaataattacaatcaggctcgcgctaaaaaaggcgggctcgcaaaatcggcggccgaacttaaaatacgcgctattttcgcagacggaggtccaataataaaaagagctaggcctcattcgcacggaagagcgtttcctattcacaagtcactttctcatcttacaatagtcgtttcggactag

SEQ ID NO: 50992 - protein, 122 aa, Unknown
  Obtained from environmental sample
  DOMAIN (10)...(122): Ribosomal protein L22p/L17e
  misc_feature (1)..(122): Xaa is any amino acid
MPGDICYGVAKLRNTRYGVLKMRRLIDILRGSSVERAFGILSVMRTKLKGAAIAEKTMKTAVNNYNQARAKKGGLAKSAAELKIRAIFADGGPIIKRARPHSHGRAFPIHKSLSHLTIVVSD

SEQ ID NO: 50993 - DNA, 600 bp, Unknown
  Obtained from environmental sample
  misc_feature (1)..(600): n is a, c, g, or t
atggaaggaacaatgcaaataatatttggaattttaacggggcttttgggattattctccctgctgataatcatcaggattatcctacatgggttntcgggcggagacttcggcaggcccatggaaattttggccggtattacagatccatatcttgactggtggcgtcggaggctcaacctgagggccggctatctggatctttctcctattgtcgcgatggcggctctctctgtagcgcagactatatgttccgccattgcccaaacaggaaggtttacactggggcttctgtttgccgtatgtctttccgcgctgtggtcggcggtttcttttatactgggtttttgcctcgtcgtgcttatcctccgcctgattgcctatcttatcaacgccgatatgttcggcgtattctggcgggtcatagattccatatcacggcctatcctgtaccgcgtcagccggataatcttcagaaatcgtatagtccgtttttcaacaagtattattatcaccattcttgctctgaccgctctttggattggcggaaaaatcgtcatacagtttgtttcgtatttattattcaggctgccgctgtaa

SEQ ID NO: 50994 - protein, 199 aa, Unknown
  Obtained from environmental sample
  DOMAIN (5)...(87): YGGT family
  misc_feature (1)..(199): Xaa is any amino acid
MEGTMQIIFGILTGLLGLFSLLIIIRIILHGXSGGDFGRPMEILAGITDPYLDWWRRRLNLRAGYLDLSPIVAMAALSVAQTICSAIAQTGRFTLGLLFAVCLSALWSAVSFILGFCLVVLILRLIAYLINADMFGVFWRVIDSISRPILYRVSRIIFRNRIVRFSTSIIITILALTALWIGGKIVIQFVSYLLFRLPL

SEQ ID NO: 50995 - DNA, 1299 bp, Unknown
  Obtained from environmental sample
  misc_feature (1)..(1299): n is a, c, g, or t
atggcgagctattccacgggcgcgtttgatgattttaaggtatcacgcgaaacgcttgcgggtaatatggagaaagcgatagagtacgcgcaaaaaatgaaagaagacagactgcttggacagtcaaacctgttcggagattcaaatgaatccggcatgcccgattttcagtttacggaatttccgcctgtaagcagatccgaaagattgaatattgaaaaaaagttaattggtttttatttttccggccatccgttagacgaataccggcagttatgggaaaaagccgtgaaagttgatctggctcaccatgaaaccatacagcctggaaaccatattcttattggactaatcaaaaatattaaaacaattaattctaaaagcggaaaaatggcttatgccacactggaagactacaacggagaaattgaggttacatttttctccagggcatgggaaacctgcgaggacaaggcccaggatgacaaagtcgccatattaaaaggcaaaattgaataccagagaaacaaagacaagtacggtttcattaccgacagttggattgacgtccgtgaagcgaaggcggcgatagaagaggaagaagccatgcaaaaaaagcgggaaaagttccgttcaacatggctttatatggcggacctgaaaagcggcgggcttgccaaagcggaaaaaggcagctacacggtgatcgggcagcttgtctccctgagggaaagccgggatagaaacggcgaggacatggcgttcggaaccctgcaggactttgaggggaacattgacctcgtgttctgggcaaaaacctggaaagaaaaccgcgaattattaaacacgggagaatttgtggcgcttaaaggaagccttgatccggaaagggaccgcgacccgcaaaaaccgagcctgaaagtgagcaaggttgacgaccttgcggccttaagccgttcagcggcgcgaaaagcggaagccggggagcggccgaaagtcccgcccctggagatgcaagcggaaaaaatgcaaaattcccctaacgcggaacagcccgccccgccgttaaacgaaattcatatccgtctggaaaacggcgccgccgacagggacgaaaccatacggcccctccggaattaccttaccggaaaccagggcccctgtccggtttatatccatatcggggaaaaaaccatcagggctgacaagggcttaagccttgaagccgaaaaggaagcgctgggcgtgctggaaggctgtatcggggtggcccagtcatggaaggaacaatgcaaataa

SEQ ID NO: 50996 - protein, 432 aa, Unknown
  Obtained from environmental sample
  DOMAIN (112)...(190): OB-fold nucleic acid binding domain
  misc_feature (1)..(432): Xaa is any amino acid
MASYSTGAFDDFKVSRETLAGNMEKAIEYAQKMKEDRLLGQSNLFGDSNESGMPDFQFTEFPPVSRSERLNIEKKLIGFYFSGHPLDEYRQLWEKAVKVDLAHHETIQPGNHILIGLIKNIKTINSKSGKMAYATLEDYNGEIEVTFFSRAWETCEDKAQDDKVAILKGKIEYQRNKDKYGFITDSWIDVREAKAAIEEEEAMQKKREKFRSTWLYMADLKSGGLAKAEKGSYTVIGQLVSLRESRDRNGEDMAFGTLQDFEGNIDLVFWAKTWKENRELLNTGEFVALKGSLDPERDRDPQKPSLKVSKVDDLAALSRSAARKAEAGERPKVPPLEMQAEKMQNSPNAEQPAPPLNEIHIRLENGAADRDETIRPLRNYLTGNQGPCPVYIHIGEKTIRADKGLSLEAEKEALGVLEGCIGVAQSWKEQCK

SEQ ID NO: 50997 - DNA, 1293 bp, Unknown
  Obtained from environmental sample
  misc_feature (1)..(1293): n is a, c, g, or t
atgcataaagtatatcataaaattgaaagaattgctggcaacgtcatcacggttgcagcagacggtgtcacttaccacgaattggcacaggtgcaaagcccgcagggaacttcccttgcgcaggttattcgcatagatagcggcatgatagatttgcaggtttttgcaggcagccgtggtgtttccacggattcgcaggtgcgctttttaggacgccctatgcaagttccatttagcgagtctctgctagggcgagtgttttccggtgcaggcgagccacgcgacaatggcccaaacataagtgaaaacatgatagacataggcggcccttccgttaatccgtctaagagaattatcccaaagagcatggtgcgcacaggtatcccgatgattgatgtgttcaacacattggtcgttagccaaaagttgcccattttctcaatagctggcgaaccttacaacgaacttctagctcgtatagctttgcaagccgaagtggacattattgtactcggtggtatgggcttaaagtacgatgattatctatttttccgcgactttttggaagaacgcggagcgttaagccgtaccgtttcttttatgcacaccgctagcgacccaattgtggaatgtttgcttgttcccgatgtagctttggctgttgcggagcaattcgcaactcagggcaaaaaggtgttggtgcttttaacagatatgaccaactttgccgatgctatgaaagaaattgctataactatggaacaggtgccatctaatcgtggctaccctggcgatttatattcacagctcgcaagccgctacgaaaaagcggtggattttgaaggttccggttcaataaccattttggcagttaccacaatgcctggcgatgacgtgactcaccctgttccagataacacgggttacatcaccgagggtcagttctatctgcgtaaaggcagaatagagccatttggttcgctttcccgcttaaaacagcaggttaacggcgatacccgcgaagaccatcgcaccatgatgaacaccatgattcagctttacgccagctacaaagaaaccttagaaaagcagtctatgggtttccgtatgagcaactgggatgcaaagctcttgaaatacggtgttcgttttgaaaaagagatgatggatttatccgtaaacattcctttggaagcggctttagacctaggttggaaaatcctagcagattgctttaaacccgaagaaacgggtattcccagcaaactgataggaaaattctggccaaagtaa

SEQ ID NO: 50998 - protein, 430 aa, Unknown
  Obtained from environmental sample
  DOMAIN (8)...(71): ATP synthase alpha/beta family, beta-barrel domain
  misc_feature (1)..(430): Xaa is any amino acid
MHKVYHKIERIAGNVITVAADGVTYHELAQVQSPQGTSLAQVIRIDSGMIDLQVFAGSRGVSTDSQVRFLGRPMQVPFSESLLGRVFSGAGEPRDNGPNISENMIDIGGPSVNPSKRIIPKSMVRTGIPMIDVFNTLVVSQKLPIFSIAGEPYNELLARIALQAEVDIIVLGGMGLKYDDYLFFRDFLEERGALSRTVSFMHTASDPIVECLLVPDVALAVAEQFATQGKKVLVLLTDMTNFADAMKEIAITMEQVPSNRGYPGDLYSQLASRYEKAVDFEGSGSITILAVTTMPGDDVTHPVPDNTGYITEGQFYLRKGRIEPFGSLSRLKQQVNGDTREDHRTMMNTMIQLYASYKETLEKQSMGFRMSNWDAKLLKYGVRFEKEMMDLSVNIPLEAALDLGWKILADCFKPEETGIPSKLIGKFWPK

SEQ ID NO: 50999 - DNA, 657 bp, Unknown
  Obtained from environmental sample
  misc_feature (1)..(657): n is a, c, g, or t
atggctcaaaacacattcaagaatttactggaaataatgcagcggctccgttcaggcagcggttgcccttgggatagggagcagaatttcaacagtttgctcccttatcttttagaggaatcttacgaatatatagacgctgttcaaagcgaaaaccttaaaaatatggtagaagaacttggcgatgtgcttttacaggtggtatttcactctcaaatagccaaggaagagggcaaattcacaatagacgatgttatagggggaatttgcgaaaaaatggttaggcggcatcctcacgtttttggctcagaaacgctaggaacttccaaggaggttcttaaaaaatgggaagagataaagagtgaggaaaagaaggaaaaacctgcctctgctatggacaaggtgcctcgttccatggtggctctttcacgtgcccaagagctttcaaggagggcggcaaaggttggttttgactggaacgattcggggcctgttttagagaaggtaaaagaggaaataggggagtttgaggcagaagaagcgggctctttgaaagccgaagaggaatttggcgatattctctttgccttggtgaatttggctaggcataaaggcataaatgccgaaaccgccctacaagggcaaatgccaaattga

SEQ ID NO: 51000 - protein, 218 aa, Unknown
  Obtained from environmental sample
  DOMAIN (28)...(101): MazG nucleotide pyrophosphohydrolase domain
  misc_feature (1)..(218): Xaa is any amino acid
MAQNTFKNLLEIMQRLRSGSGCPWDREQNFNSLLPYLLEESYEYIDAVQSENLKNMVEELGDVLLQVVFHSQIAKEEGKFTIDDVIGGICEKMVRRHPHVFGSETLGTSKEVLKKWEEIKSEEKKEKPASAMDKVPRSMVALSRAQELSRRAAKVGFDWNDSGPVLEKVKEEIGEFEAEEAGSLKAEEEFGDILFALVNLARHKGINAETALQGQMPN

SEQ ID NO: 51001 - DNA, 1086 bp, Unknown
  Obtained from environmental sample
  misc_feature (1)..(1086): n is a, c, g, or t
atgagaacagtttttgtaattggagcaggagccaatactgaaattggtatgcctccaggtgaaggactaaaaacaaaaatagcagatttattgaattttttttgggatcgcagtggactgactagaggagatcatttaatagaatccgttatcaaacaatattgtagagatgacaataattccgattatgttaaattatgtgaagctgccatgtttatttcaaaggcaatgtcttatacatcatctattgataattttattgaatctcatagaggaaatcagcaaatagagctctgtggaaaactggcaatagtacgttcaattttgaatgcagaacatgactgcgatttatttgaagcatacaggataagtatatctaaaattagaaataaagaaaaaattgaaaaactaaataattcgtggtatccgtcaatatttaaatttgttacagatgggtatcgaatcgatgaattatctatgaggcttaataatttttcatttatcatctttaattatgaccgttgttttgaatatttcatgtataatgcattgataataaaatatgcaataaaagatgaagaagcaaagaacattataagaaatatgaatataattcatccatacggtattgttggagaactatgggatgagcatggtgaacttacatttggagaaactccaaatcaaaaggaatttatttctctttcaaaaaaaattaagacatttagagaaaacactgcaagtgataatgaatataatataaaaataaaagcttttattaatagtggagaaatgattatttttctggggtttgcatatcatgagcaaaatatgaatttattatattataatcctagtgttctttctgttacagatggtgttcccataagtaataatgttaagtgttatggaactggttatggaatgcatgaaaaggatatcttgcatttagaaaatacaataaaaatgcgagagaaaagaataaatgaaattaatatctccaatacaacatgttcaaaatttttccatgaatttttattaagattgtcatttaaacagacaaaatctgatcaggaagataattga

SEQ ID NO: 51002 - protein, 361 aa, Unknown
  Obtained from environmental sample
  misc_feature (1)..(361): Xaa is any amino acid
MRTVFVIGAGANTEIGMPPGEGLKTKIADLLNFFWDRSGLTRGDHLIESVIKQYCRDDNNSDYVKLCEAAMFISKAMSYTSSIDNFIESHRGNQQIELCGKLAIVRSILNAEHDCDLFEAYRISISKIRNKEKIEKLNNSWYPSIFKFVTDGYRIDELSMRLNNFSFIIFNYDRCFEYFMYNALIIKYAIKDEEAKNIIRNMNIIHPYGIVGELWDEHGELTFGETPNQKEFISLSKKIKTFRENTASDNEYNIKIKAFINSGEMIIFLGFAYHEQNMNLLYYNPSVLSVTDGVPISNNVKCYGTGYGMHEKDILHLENTIKMREKRINEINISNTTCSKFFHEFLLRLSFKQTKSDQEDN

SEQ ID NO: 51003 - DNA, 756 bp, Unknown
  Obtained from environmental sample
  misc_feature (1)..(756): n is a, c, g, or t
atgaaaacgagccttctccgccatttacaggaagaaaaagccatgcggctaaaaggcgggttatatcacacaacccaaataaaactggcgtataactcaaaccgtatcgaaggcagtttgttatctgaagaacagacccgctatatttttgaaacaaatactttgagtgtcgcgccgaatgagtccgccaatgtggacgatattatcgaaactgtgaatcattttttctgttttgatttcatgcttgacatggcggaagaaaacctgtccgaagaaatgattaaagagttccataagattttaaaaagtaatacgtctgattcacgcaaagaatggttcaagatcggtgattataaaacccggcccaatgtggttggtgatactgaaacaacatctcccgctaaggttccgggtgcggtagcggccttacttgatttatatcataggacttccgttgattttagggcgcttgtcgattttcactaccggtttgaaaaaattcatccttttcaggacggtaatggccgtgttggcagaattatacttttcaaggaatgccttaaacatgacattgttccgtttattattgaagacgagtacaaaatgttttattaccggggtttaacagaatttgagaagacaccgggttatctcgtggatacctgtctttcggcacaggataagtatagggagatggtggggtattttttggaagggaatggtataattaagcagttgaatattattttaccatga

SEQ ID NO: 51004 - protein, 251 aa, Unknown
  Obtained from environmental sample
  DOMAIN (94)...(214): Fic protein family
  misc_feature (1)..(251): Xaa is any amino acid
MKTSLLRHLQEEKAMRLKGGLYHTTQIKLAYNSNRIEGSLLSEEQTRYIFETNTLSVAPNESANVDDIIETVNHFFCFDFMLDMAEENLSEEMIKEFHKILKSNTSDSRKEWFKIGDYKTRPNVVGDTETTSPAKVPGAVAALLDLYHRTSVDFRALVDFHYRFEKIHPFQDGNGRVGRIILFKECLKHDIVPFIIEDEYKMFYYRGLTEFEKTPGYLVDTCLSAQDKYREMVGYFLEGNGIIKQLNIILP

SEQ ID NO: 51005 - DNA, 1299 bp, Unknown
  Obtained from environmental sample
  misc_feature (1)..(1299): n is a, c, g, or t
atggctgtagccgaaaccggcatgggcgtagtcgaggataaagtgattaaaaaccactacgcctcggagtacatctacaatacctacaaagacgaaaaaacctgcggcgtaatcgaagacgaccccgtctccggcattactcgcatagctgaaccaataggccttgtggcggcggtcatacccaccacaaaccccacttccacggcgatattcaaggcgcttatttgcctgaaaacccgcaacgggattattatctcgccgcacccccgcgccaaaggctgcacctgcgccgccgccaaaattgtgctggacgcagcggtcgccgccggcgcgcccgagggaatcatcggctggatagacgagccgagccttgaaatgactaacatggtgatgaaagaagcggacactattcttgccacgggcggacccggcatggtcaagtccgcatactcttccggcaagcccgcaatcggcgtagggtcgggcaacactcccgccattatcgacgacagcgcggatatactcctcgcggtcaactcaattatccattcaaagacatttgacaacggaatgatatgcgcgtccgagcaatcggtcatcgccctgaccggcgtctacgaaaaagtgaaagccgaattcaaacgacggggctgttacttccttacaacggaagaaaccgagaaggtacgaaaaacaatcattgtcaacggatcgctgaacgcgaagatcgtcggacagaaagcggcgaaaatcgcggagcttgcgggcgtgaaggtggacggggcgacaaaaatcctaatcggcgaagttgagagcgttgagctttcagaagaattcgcccacgaaaaactttcccctgtgctggcgatgtacaaagcgaaaaattttgacgacgcgctggacaaggccgaccatttgataaaagacggcggctacggccataccgccagcgtattccttaacccgcaaaccggcgcggaaaaacttgacacattcggcaagcgcatgaagacctgccgcattgtgctgaacacaccgtcggctcacggcggcataggcgacttgtataactttcgcctgaggccttcgctcactttgggctgcggtagttggggcggcaattcagtttcggaaaatgtcggcgttaaacatctgttaaatattaaaacactggcggcaaggagggaaaatatgctgtggttccgcgctcccgagaaagtatatatcaagaggggatgcctccccgtggcactggacgagcttaaaacgttatggggaaaaaacgcgcgttcatcgtaa

SEQ ID NO: 51006 - protein, 432 aa, Unknown
  Obtained from environmental sample
  DOMAIN (3)...(391): Aldehyde dehydrogenase family
  misc_feature (1)..(432): Xaa is any amino acid
MAVAETGMGVVEDKVIKNHYASEYIYNTYKDEKTCGVIEDDPVSGITRIAEPIGLVAAVIPTTNPTSTAIFKALICLKTRNGIIISPHPRAKGCTCAAAKIVLDAAVAAGAPEGIIGWIDEPSLEMTNMVMKEADTILATGGPGMVKSAYSSGKPAIGVGSGNTPAIIDDSADILLAVNSIIHSKTFDNGMICASEQSVIALTGVYEKVKAEFKRRGCYFLTTEETEKVRKTIIVNGSLNAKIVGQKAAKIAELAGVKVDGATKILIGEVESVELSEEFAHEKLSPVLAMYKAKNFDDALDKADHLIKDGGYGHTASVFLNPQTGAEKLDTFGKRMKTCRIVLNTPSAHGGIGDLYNFRLRPSLTLGCGSWGGNSVSENVGVKHLLNIKTLAARRENMLWFRAPEKVYIKRGCLPVALDELKTLWGKNARSS

SEQ ID NO: 51007 - DNA, 1176 bp, Unknown
  Obtained from environmental sample
  misc_feature (1)..(1176): n is a, c, g, or t
atggggaaaaaacgcgcgttcatcgtaaccgacacattcctgtacgaaaacggttacaccaaatgcatcaccgacaaactggacagcttaggtattgtccacgaaactttttttgatgtcgcccccgacccgactcttgcctgcgcgataaaaggcacatcgattatgagcgccttcaagcccgatgtgatcattgcgctgggcggcggttcggcaatggacgcgggcaagatcatgtgggtgctctacgaacatcccgaagttgattttgaggatatggctatgcgcttcgccgacatacgcaaacgtatctacaccttccccaaaatgggagagaaggcgtactttatcgccatacccacctccgccggaacgggcagcgaggtgacaccctttgccgtcatcaccgatgaaaaaaaaggcatgaagtacccgcttgcggattacgaacttttacccgacatggcgatagtggacgccgacatgcagatgaacgcgcccaagggactgacgagcgcaagcggcatagacgctgtaacccacgcgctggaagcctacgcctctatcatggcgacggactacacagacggccttgcgatacaggcgctcaaagtaattttcgagtggctgcccatcgcgtacaacgaaggcgcggcgaatcctgtcgctcgcgaaaagatggcgaacgccgcgacgattgcgggcatggcttttgccaacgccttcctcggcgtgtgccactcgatggcgcacaagttaggcgcgttccaccacctgccccacggcattgccaacgcgctgatgatcagcgaagtgctgcgctacaacgcctgcgaagttccgcctaagatgggctccttcccctcatatgatcatcccaaaacattatcccgttacgcgcaaatcgcggacgcgttaaatctcggcggcaaaaccgatgaggaaaaacttgagaacctcatcgccgccgtggaaaagttgaaagagcagatagggatcaagaagacaatcaaagattacggcattgatgaaaaagattttcttgcccgccttgacgacatgagcgaacaggcatttgacgatcaatgcaccggcgcgaatccccggtatcccttaattgaggaaatcaaaaagatgtacctcaatgttttttacggaaagaaggagagggtgtaa

SEQ ID NO: 51008 - protein, 391 aa, Unknown
  Obtained from environmental sample
  DOMAIN (1)...(376): Iron-containing alcohol dehydrogenase
  misc_feature (1)..(391): Xaa is any amino acid
MGKKRAFIVTDTFLYENGYTKCITDKLDSLGIVHETFFDVAPDPTLACAIKGTSIMSAFKPDVIIALGGGSAMDAGKIMWVLYEHPEVDFEDMAMRFADIRKRIYTFPKMGEKAYFIAIPTSAGTGSEVTPFAVITDEKKGMKYPLADYELLPDMAIVDADMQMNAPKGLTSASGIDAVTHALEAYASIMATDYTDGLAIQALKVIFEWLPIAYNEGAANPVAREKMANAATIAGMAFANAFLGVCHSMAHKLGAFHHLPHGIANALMISEVLRYNACEVPPKMGSFPSYDHPKTLSRYAQIADALNLGGKTDEEKLENLIAAVEKLKEQIGIKKTIKDYGIDEKDFLARLDDMSEQAFDDQCTGANPRYPLIEEIKKMYLNVFYGKKERV

SEQ ID NO: 51009 - DNA, 630 bp, Unknown
  Obtained from environmental sample
  misc_feature (1)..(630): n is a, c, g, or t
atgtcgagtgacccttggtttaagtccgatccgaccatggcatccctgtccgtgacggatgtccacgagcctgggcagtgccccttggccgccgccactgcggacgttttgcagataccagccttcctctgccgtcagacagacctgctgttggcagccgccgccacagggaaagccatcaatataaaaaaggggcaatttctggccccatgggacatgcgccacgcggtagagaaagtaaagtcagtcccgcaggccggccctgtctgggtgacagagaggggcgcgtcatttggctatggaaacctagtggttgacttccagtccttcccccacctccgcaaaactggctgcccagtggtgtttgacgctacgcacagcgtacaaaaaccgggttctttgggcgatgccaccgggggggcgcgcgaaatgatccccacgctggcaagggccgcagcgacatgcacggacgggttcttttttgaagtccacgaagagccggagagggccctcagcgacggcccaaatgtgtttaggctgtccgaatttggacaactgctcgatgacctgctttcgatctggaggacagcccggccagtagtgatgcgggaaacacaaggcaagggttga

SEQ ID NO: 51010 - protein, 209 aa, Unknown
  Obtained from environmental sample
  DOMAIN (1)...(196): DAHP synthetase I family
  misc_feature (1)..(209): Xaa is any amino acid
MSSDPWFKSDPTMASLSVTDVHEPGQCPLAAATADVLQIPAFLCRQTDLLLAAAATGKAINIKKGQFLAPWDMRHAVEKVKSVPQAGPVWVTERGASFGYGNLVVDFQSFPHLRKTGCPVVFDATHSVQKPGSLGDATGGAREMIPTLARAAATCTDGFFFEVHEEPERALSDGPNVFRLSEFGQLLDDLLSIWRTARPVVMRETQGKG

SEQ ID NO: 51011 - DNA, 1965 bp, Unknown
  Obtained from environmental sample
  misc_feature (1)..(1965): n is a, c, g, or t
atgcggcccccgctcatctacagggccgtcggctcgtggttcgtcaatatcgaaaaaattaaaaaagacatgctgaaggcgaacagcgaaattcactgggtgcccgagcatataagggacggcagattcggaaaatggctggaaggggcgcgggactgggccatcagccgcaaccgctactggggcaaccccctgccgatatggcgttgcgacgactgcggaaagatcgtctgcgtcggcagcagaaaagaattgcaggaactctccggcacataccccgaagacctccataagcattttgtcgataacataacgattccctgctcgtgcaaaggtgttatgcgcagagttcccgaagtcctggactgctggtttgagtcaggcgccatgccttacgcgcaaagccactacccctttgaaaacaaggagttctttgaaagccatttcccctcggactttatcagcgagggactcgaccaaacgcggggctggttttacacgctgacgattcttgccgcggcgctgttcaaaaaaccggccttcaaaaactgcatagtcagcgggctcgtgctcgcccatgacggcaagaagatgagtaaaagcctccgcaattataccgacccgatggaggtgatcaactcttttggggcggacgccctgcggcttttcctcgtccattccgcagtagtaaaagccgacgacctccgttacagcgacgacggggtgcgcgacgtaatgaagagcatcatcatccctctttggaacgcctacagcttttttgtcacttacgccaacatagacagcataaccgcggaaggggctccggacaggccgggcaatcccctggatcagtggattctttcggcggcggaaagcctcgcggaaaaagtcagcgcggcccttgacgcctacgatctgtccagggcaatagacgcaattctggaatttatagatttccttaacaactggtacatacgccgatcccgccgccgtttctggaggtcggttgaaaaaggaggaagcgacaccgacaaggccgaagcctacgcaaccctgtacgaggttctcaaaaaattgatcaccgtcgcggcgcctttcatgccctttaccacggacgcgatttggcagaacctccgcaaggaatctgatcccgaatcggtgcatctggcggacttccctctgcccaaggaaagccggcgggaccgttccctggaattccgcatggcggcggtgcaaaaggccgtctccatggggcgcgccctgcgctcgcagtacaatatcaaagtccgccagccccttcgcatggcggagctcgttacgcgcaactcagatgaaaaaagcgcccttcttgaaatggtggaaattatccgcgaggagcttaacgtaaaaaatgtttctttcagggacaatgaggaagaccttgtcgaatacagcgtaaaagccaatttccgcgtgctgggcaaagaactggggaaggacatggccgccgccgccgcgaggatagaggcgctgagccagaacgagatccgcggcctgcttgagggcgcgtccctttcgctggacctcgcgctcgcggacggaaggacgcgcgccgtggaaatcaccgcggacaagctggacatcaggcgcaatgagaaagctaacctccgcatacttaacgaaggcaccctcaccgtcggtcttgacacggaattaacccctgagctgagcatggaaggcgacatccgcgaccttatccgcggcgtgcagaacagccgcaaggaaatgggactattggtcctcgaccggattaaactgactgtctttggctccgataaactgaagcaagcctgggacaagatgggcgcaagcgtagcgaaggagactctggcgatacaaaccacctgggcaaaagcagaaggccagataccgcttgaagccggcgatgagacgtggctggttaaaattgagaagaatggggagtag

SEQ ID NO: 51012 - protein, 654 aa, Unknown
  Obtained from environmental sample
  DOMAIN (1)...(236): tRNA synthetases class I (I, L, M and V)
  misc_feature (1)..(654): Xaa is any amino acid
MRPPLIYRAVGSWFVNIEKIKKDMLKANSEIHWVPEHIRDGRFGKWLEGARDWAISRNRYWGNPLPIWRCDDCGKIVCVGSRKELQELSGTYPEDLHKHFVDNITIPCSCKGVMRRVPEVLDCWFESGAMPYAQSHYPFENKEFFESHFPSDFISEGLDQTRGWFYTLTILAAALFKKPAFKNCIVSGLVLAHDGKKMSKSLRNYTDPMEVINSFGADALRLFLVHSAVVKADDLRYSDDGVRDVMKSIIIPLWNAYSFFVTYANIDSITAEGAPDRPGNPLDQWILSAAESLAEKVSAALDAYDLSRAIDAILEFIDFLNNWYIRRSRRRFWRSVEKGGSDTDKAEAYATLYEVLKKLITVAAPFMPFTTDAIWQNLRKESDPESVHLADFPLPKESRRDRSLEFRMAAVQKAVSMGRALRSQYNIKVRQPLRMAELVTRNSDEKSALLEMVEIIREELNVKNVSFRDNEEDLVEYSVKANFRVLGKELGKDMAAAAARIEALSQNEIRGLLEGASLSLDLALADGRTRAVEITADKLDIRRNEKANLRILNEGTLTVGLDTELTPELSMEGDIRDLIRGVQNSRKEMGLLVLDRIKLTVFGSDKLKQAWDKMGASVAKETLAIQTTWAKAEGQIPLEAGDETWLVKIEKNGE

SEQ ID NO: 51013 - DNA, 672 bp, Unknown
  Obtained from environmental sample
  misc_feature (1)..(672): n is a, c, g, or t
gtgtcgctcaaggacttcagcgacagcgaatacctgttcatgggaacatcgcacgccgttgttaaaaaagtaaaaaccagcgaatttgtcaacgccaagacaaggggcatagtagcgataaatctggacgacggggacaagcttgtcagcgcgcttttaacgaagggcgacgacgaaatagtactgatttcccgcaagggacaggcgctccgcacccacgaagaacacgtccgcgccatgggacgctcttcaagaggggtcacaggcatgaagctttccgaaggggacgagctgaccgggatgttgcgggtagacaccggtaaagaccggccgcccgagaaagtcgaaaaaatgctgatcatctccgaatacggctacggcaagcgggttgatttcagcgaattttcatcgcacgggcgcggcaccggcgggcagaagatttatacggtcagcgagaagaccggggaaatcgtcggctgtgtttccgtgtttgacgatgacgacataatgtgcatcaccagccagggcaaatcaatcaagatgaaagtggacgatatacgcgtaatgggacgctcagcccagggagtgcgtctgctcagcatagacaagccggattttgtaattggtctcgacagaatcgttaaggaagacgacgctgccggagaagaatag

SEQ ID NO: 51014 - protein, 223 aa, Unknown
  Obtained from environmental sample
  DOMAIN (115)...(165): DNA gyrase C-terminal domain, beta-propeller
  misc_feature (1)..(223): Xaa is any amino acid
MSLKDFSDSEYLFMGTSHAVVKKVKTSEFVNAKTRGIVAINLDDGDKLVSALLTKGDDEIVLISRKGQALRTHEEHVRAMGRSSRGVTGMKLSEGDELTGMLRVDTGKDRPPEKVEKMLIISEYGYGKRVDFSEFSSHGRGTGGQKIYTVSEKTGEIVGCVSVFDDDDIMCITSQGKSIKMKVDDIRVMGRSAQGVRLLSIDKPDFVIGLDRIVKEDDAAGEE

SEQ ID NO: 51015 - DNA, 2211 bp, Unknown
  Obtained from environmental sample
  misc_feature (1)..(2211): n is a, c, g, or t
atggtaagcgcctaccgatcggtgatggttcatcccgcggttttttacataggcctgcaccggccgggcggcggtttcgcgcggaaaggacaggaattatcctacaattatattaccgttaataccgccggtgaaaaaacagcgaataacgggcttttcctgcaaacaggggaaaacgcgggacggctcaaggtggaacttatccgggaagaatggcgccgcgtccagcagcggggggtgaacggttatatttatgacgaatattcaccggaacaggtaatcgacagcgttcaaaatatagcgattagaaacggcggcggttcaatcaagataaccccaagcggatcggggtattataccctgcgggtttccgcgcaggacagggaaggcagaacagcccttacggaactgagtttttatgtcaccggttcgggcggctactggaacatgagcaaccccagcgaattaaggcttacgccggatcaggaaatgtataaccccggcgacacggcgaaggttctgctgcaaagcacgcttcccgaaggccggtatctaatcacggtggagagggaaggcatattcaccgaggaagtccgtcattttaccgaaccggtttcggtgattgacattcccattgcgcgtaactatgtgccggtggtctatgtggcggtttcgtcctattctgtgcgctccggccctcccacccatgaatacggcagccccgacctggacaaacccaaaggttatttcggcgtaacgcggctcagtgtaaatccccgcgcgcgggcattttcggtaaaggtggaaagcaacaagaaaacctaccgtcccggcgaggaagttaccatgaccctgaccgcgaccaaggacggtaaacctctgtccaacgcggaactgaccctgatggcggtagacaggggcgtattggaccttatcaattaccatgtgcccgacccgatacagtatttttataatgaagaccgcttcccccttatggtagcgggcggcgattcccgttcatggcttatggatcctgtaacctacagcgtcaaaaacctcgccggcggcgacgcggaaggcgacagcaaaattgaggaacgcaaggactttaaccccaccgcggtatttgagccgatgctgataaccgatgattcgggcaaggttacctgtaaattcaaactccccgataatcttaccacatatcgcgtaacggtctttggggtgcggggggatattttcgcccttaaagaaagcgagattgccgcccagaacaagataaacgtgcgtgaagttctgccccggcgcacacgggaaagggataccgccgaagcgggggtgcttatcaccaatctcgattcatcgtcccataccctgtcggtcaggcttgatataggcccgcccctgcccaatgacgattcaagcggaatgagaaaaattaccgggcaggcttttgttgacggagtttttgagcgccgcataacggtaaaaagcggcgagaacgccgtggtgtactttgacgtggccgcggtaaaggaagggaatgttacgcttaactttaccttcaattcggatattctcaatgagaagcttatacgggaactggtgatagagcatccctatgttatggaaactgttaccactaccggatctgtggacaaggattcggaaagcgaaggcattgtcatcccttctttcgccgataacggggtgggcagcctttcggtgactctggacgccacgcgcctgagccttttggattcggcggttacctaccttttccgctatccttacggatgcatggaacagcgcagcgcggcgatcatgccgctggtaatattcggcgaataccttgacagtctgggcctaaggagcgaggtttccaatccgcggcaggtggtggaaaacgaacttaaatcatgggccaaggtacagctttccgacggcggttttccttactggccctccggtacaaaagcagatttctatgtcagtctgcgtatagcccatattatcgccatcgcgaaatcaaagaaaatgaacgttccttcctcgctgaatatagcggagctcaactcttaccttagccacggttatcaggaagcgcaggggtggcgcaatgattcatcgtcatattattatcagtcgtatttacagtcgtatatgctgtatgtccagtccctgctcggtgaaaagtcgatccctcccgcttag

SEQ ID NO: 51016 - protein, 736 aa, Unknown
  Obtained from environmental sample
  DOMAIN (152)...(314): Alpha-2-macroglobulin family N-terminal region
  misc_feature (1)..(736): Xaa is any amino acid
MVSAYRSVMVHPAVFYIGLHRPGGGFARKGQELSYNYITVNTAGEKTANNGLFLQTGENAGRLKVELIREEWRRVQQRGVNGYIYDEYSPEQVIDSVQNIAIRNGGGSIKITPSGSGYYTLRVSAQDREGRTALTELSFYVTGSGGYWNMSNPSELRLTPDQEMYNPGDTAKVLLQSTLPEGRYLITVEREGIFTEEVRHFTEPVSVIDIPIARNYVPVVYVAVSSYSVRSGPPTHEYGSPDLDKPKGYFGVTRLSVNPRARAFSVKVESNKKTYRPGEEVTMTLTATKDGKPLSNAELTLMAVDRGVLDLINYHVPDPIQYFYNEDRFPLMVAGGDSRSWLMDPVTYSVKNLAGGDAEGDSKIEERKDFNPTAVFEPMLITDDSGKVTCKFKLPDNLTTYRVTVFGVRGDIFALKESEIAAQNKINVREVLPRRTRERDTAEAGVLITNLDSSSHTLSVRLDIGPPLPNDDSSGMRKITGQAFVDGVFERRITVKSGENAVVYFDVAAVKEGNVTLNFTFNSDILNEKLIRELVIEHPYVMETVTTTGSVDKDSESEGIVIPSFADNGVGSLSVTLDATRLSLLDSAVTYLFRYPYGCMEQRSAAIMPLVIFGEYLDSLGLRSEVSNPRQVVENELKSWAKVQLSDGGFPYWPSGTKADFYVSLRIAHIIAIAKSKKMNVPSSLNIAELNSYLSHGYQEAQGWRNDSSSYYYQSYLQSYMLYVQSLLGEKSIPPA

SEQ ID NO: 51017 - DNA, 834 bp, Unknown
  Obtained from environmental sample
  misc_feature (1)..(834): n is a, c, g, or t
ttgccttttgtgggcatgacttaccgcgctctgcgccagaataccgacgccgcgaataccgcgcagcgccttcgcaaccttgtccgcatgagcgcaaggggcgcggacattaccgatcctctggacaaattccgctacagttattacggcggcatggttgaacagcttgccctgaccctgcaattttttgtggatcagtatccgggcgatgatataaacacgcggctgctcttttcactgctggagagcaaacgttccggcagtggatattgggaaagtacggcggtaacaatacgggttctttcggcggttgacgctttaatccgggcggagaaccttaccaaccttgacgtaaacggaacggttacgctggcgggaacggaactcctcaagggagcgttcaagggactgggggcaaaacccgttacgcaaacacttgattttacagggcctgttttgtcgggccttccgagggacagcctgcaatccctgaattttacccgcagaggcagggggaatatttactacaccgtttcactccgttatgcgataccgtttgagcttcaaactttccgcgatgagggcatcggggtttttatgagcctgtacgatataaataccaacgaggaaatcaggggaaccgccctgcaaaacggaaagacctaccgcgccagggtaagggtgtcctcaaaccgggatcggacctatgttgccctgcgggttcccgttccttccggtgcggagattctggacgcgacgtttgttaccaccgcttcctatggagacaggggcggtacaagcgggaatgaacagatacggtcaagttcatggtaa

SEQ ID NO: 51018 - protein, 277 aa, Unknown
  Obtained from environmental sample
  misc_feature (1)..(277): Xaa is any amino acid
MPFVGMTYRALRQNTDAANTAQRLRNLVRMSARGADITDPLDKFRYSYYGGMVEQLALTLQFFVDQYPGDDINTRLLFSLLESKRSGSGYWESTAVTIRVLSAVDALIRAENLTNLDVNGTVTLAGTELLKGAFKGLGAKPVTQTLDFTGPVLSGLPRDSLQSLNFTRRGRGNIYYTVSLRYAIPFELQTFRDEGIGVFMSLYDINTNEEIRGTALQNGKTYRARVRVSSNRDRTYVALRVPVPSGAEILDATFVTTASYGDRGGTSGNEQIRSSSW

SEQ ID NO: 51019 - DNA, 432 bp, Unknown
  Obtained from environmental sample
  misc_feature (1)..(432): n is a, c, g, or t
atgattgagtttatttctaattcccctgatgaaactattgcccttggtaaaaaaatagccgcttccctaaacgcgggatcagttgccgctatttcaggcgcgcttggaagcgggaaaacctgtcttacaaaaggtatcgcgcttggtttaggtcttacggagaatatcacaagccctacatacacaataatcaatgaataccaaagagagggctcccctgccctgtaccatattgacgcgtatcgtttaaactgcgacaaggattttgaagacatcggcggcattgatataattaattcgggagggatttcaataattgagtggagcgaacgtatccctaattcaattccaaaaaattcaatttccattagtcttgaaataaaagacgctctttcaagatcaataaaaataaaagggcttgatagtttatga

SEQ ID NO: 51020 - protein, 143 aa, Unknown
  Obtained from environmental sample
  DOMAIN (12)...(135): Uncharacterised P-loop hydrolase UPF0079
  misc_feature (1)..(143): Xaa is any amino acid
MIEFISNSPDETIALGKKIAASLNAGSVAAISGALGSGKTCLTKGIALGLGLTENITSPTYTIINEYQREGSPALYHIDAYRLNCDKDFEDIGGIDIINSGGISIIEWSERIPNSIPKNSISISLEIKDALSRSIKIKGLDSL

SEQ ID NO: 51021 - DNA, 522 bp, Unknown
  Obtained from environmental sample
  misc_feature (1)..(522): n is a, c, g, or t
atgaatttacttgcgatagaaacagccgcatccgttttatctgtcgctgtttcaaagaatgaagaaatctttgtcagcgaaacaatagccggaacaaggcactcggaacttgtaatggaattaatagacagccaaatgaaaaagtccgctctttcgccaaaagaccttaacggtattctctgcatgggaggtcccggttcatttacggggcttcgcataggctattcaatcgcaaagggacttgccctttcactttccattccttttgcgccagtcccaactttggaatgtattgtctatggtgagcaatttaaacaggggctaactcttgcggcggttgaggcaagaaaaaacgcctactttaacgcgttttttaaagacggaaaccgtctcacagaggataaggattcggagcttttgcaaataacggatgaaattgctcagtatgtaaaagacggagaaaaaataacacttacgggctatgggtcaagcgtcctttatgaatccctgtctgagaattaa

SEQ ID NO: 51022 - protein, 173 aa, Unknown
  Obtained from environmental sample
  DOMAIN (22)...(151): Glycoprotease family
  misc_feature (1)..(173): Xaa is any amino acid
MNLLAIETAASVLSVAVSKNEEIFVSETIAGTRHSELVMELIDSQMKKSALSPKDLNGILCMGGPGSFTGLRIGYSIAKGLALSLSIPFAPVPTLECIVYGEQFKQGLTLAAVEARKNAYFNAFFKDGNRLTEDKDSELLQITDEIAQYVKDGEKITLTGYGSSVLYESLSEN

SEQ ID NO: 51023 - DNA, 858 bp, Unknown
  Obtained from environmental sample
  misc_feature (1)..(858): n is a, c, g, or t
atggcggaaaatatatcgggtcttgtttatcacgccgtattaaataattttttcacagagctgaaaaatgacgctcccctgctcgctcccgtgcaaactgattacggtctgtctctcccgccttcttacagcgctctccttgaaagaagcgtaaataaaatttttgactgttttccgttattggagcaggacggtcatccgcagatgagcgagctaaacgcacatcttttatacgcaggaaaagacgacttttattataatcttgatcgatgcctttcttcttttctttctttctttgccggatataaagtcgccggaagcgaatgtaattatgaatatgaaaaagatacatatatacttaacggatttattgactgcgttctaaaagaaaatacagatggaattgttaaatatgttattgtcgattttaagttaaaaaaattacccagccgaagcgattgcacggcggaagatgaaacgcctcttgcggactttcagcttcccatgtatataactttaatcgaaaaaaatgaacaattcgacgtatataccgctctcttttacagcattctcgatcaaaaatccgaagtaataatcggaacaatctacaatgaaaacacaaataaaaccattcccgctaaagaagaagatcaaattgaccgaagtaaggtacgttataagaaaatttttgaagaattccaaaataagacggagcagtttacgaatgaaatatcatcaggcgattttactgtttttccgcagactaacagtgagtgtaacgattgcagctatcagcgtatatgccgaactgtttatattatcggacgagaaaacaataattctttggggaagcattga

SEQ ID NO: 51024 - protein, 285 aa, Unknown
  Obtained from environmental sample
  misc_feature (1)..(285): Xaa is any amino acid
MAENISGLVYHAVLNNFFTELKNDAPLLAPVQTDYGLSLPPSYSALLERSVNKIFDCFPLLEQDGHPQMSELNAHLLYAGKDDFYYNLDRCLSSFLSFFAGYKVAGSECNYEYEKDTYILNGFIDCVLKENTDGIVKYVIVDFKLKKLPSRSDCTAEDETPLADFQLPMYITLIEKNEQFDVYTALFYSILDQKSEVIIGTIYNENTNKTIPAKEEDQIDRSKVRYKKIFEEFQNKTEQFTNEISSGDFTVFPQTNSECNDCSYQRICRTVYIIGRENNNSLGKH

SEQ ID NO: 51025 - DNA, 972 bp, Unknown
  Obtained from environmental sample
  misc_feature (1)..(972): n is a, c, g, or t
atgaataaaaatctcccttggaaaaatgagcttcctatagaagaattagtgcaattcggaatagagaataattgtctttattcttgggtggaagaaattgacggagaagaaaaatatatcaatgtatgggaagacgctcttaaaaaaccgattcaccgttatgacaataaaataagcgagtttttttatgaattaaaaaaacgcataacggctttttcccgctgtgagacattttccgatgtaagaaaacagtattttatttttcgtgactctttttttgatatggaaaactgcgttgaagaaacagaccttattctttcccgttgtatttcagaactaatgaaccttgtagaaatagaaaaaagtttccccgatgtgaaagcggctcaacctttcaagttttatactgaatatttagatgaaattcagtatcttcctcaacaggaattttcaggcgtggctattcttccgtataaaacagcggcggcggctcattttgactgtcatattattctgggagcgaggcaggaaagcctatccgttgtttattcacgccttgctttcttgcccaagaaaaagcgtgagggattgggaattcccgatgaagacgcttctttggaatttatcaatatgcacaaatataactctgaaaaaatatcggctttcttttgcagtgaacaaactttttcaggttttgccattccgcattcaagaattaacgccccttccgagccaaaaacgtgttattcggcagacgctgcgtttgtcggtaaattcgcgcaagacccttttaatattgaagcttctttttattcttcgctctcaaataaagaaaaaaatcagaaactgcatgataaccagataaacggatttacaaattggaaaaaccgcagatcggcaaaaagcgcatcaagcggaaaatggactgcgagcgaagaaataaagaacagcataaaaaaagcgtttcgctaa

SEQ ID NO: 51026 - protein, 323 aa, Unknown
  Obtained from environmental sample
  misc_feature (1)..(323): Xaa is any amino acid
MNKNLPWKNELPIEELVQFGIENNCLYSWVEEIDGEEKYINVWEDALKKPIHRYDNKISEFFYELKKRITAFSRCETFSDVRKQYFIFRDSFFDMENCVEETDLILSRCISELMNLVEIEKSFPDVKAAQPFKFYTEYLDEIQYLPQQEFSGVAILPYKTAAAAHFDCHIILGARQESLSVVYSRLAFLPKKKREGLGIPDEDASLEFINMHKYNSEKISAFFCSEQTFSGFAIPHSRINAPSEPKTCYSADAAFVGKFAQDPFNIEASFYSSLSNKEKNQKLHDNQINGFTNWKNRRSAKSASSGKWTASEEIKNSIKKAFR

SEQ ID NO: 51027 - DNA, 912 bp, Unknown
  Obtained from environmental sample
  misc_feature (1)..(912): n is a, c, g, or t
gtgaacgagtgggaacttcgcgccgttatcatgacgcaggctgatgggcattacaccgcagacaacgcattgcattatcgtttcaaaaagccacgcaaggtagagcgttgtaagcgggtgttgcgtcaatgtggaatacctttcgtaacccgtgaatacgcagacgcagttgtattagaggtatcccatcgttgtatccccgtgtggcttagaatgtttcgcggtaaaacattcggctggtggttacttgatgaagatcccgctgttgtccttgacgaattgcaatattgggatgggtacaaattacccaaaagtcctaacagtacgcaatactgcaccacaaaccgacagaacgccgacatcatacaggcattggcagttacagcgggatacgcggcgacgatgctgataaaaaaccgacagaatgagtcgcataagccgtcgttcgtaatcaatatttggttcacgccaggtgagtacaccgaattacgccgtaaaccgaacgtcattgatttcagcggcacagtgtactgcgctgaaacgccaacaggattttttcttgtccgtcgcaacgggaaagtgtgggtgacgggcaattccgggaggctcctgcagccacaaaatttaccccagaaccatctaccagacttggaacaggcgcggggcttggttaaaagcggtgattttgtcgcactggaaatgctatatgacaacgtgccgtcggtgctgtcggaacttatccgcacggcgtttgtgccgcaagatggccggaaatttatcgtatgcgatttttcggcgattgaagcccgtgtcatcgcgtggcttgcgggagagaaatggcgtaatgatgtgttcgccacgcatggcaagatttacgaagccagtgcgagccaaatgtcaaagtcccgatga

SEQ ID NO: 51028 - protein, 303 aa, Unknown
  Obtained from environmental sample
  misc_feature (1)..(303): Xaa is any amino acid
MNEWELRAVIMTQADGHYTADNALHYRFKKPRKVERCKRVLRQCGIPFVTREYADAVVLEVSHRCIPVWLRMFRGKTFGWWLLDEDPAVVLDELQYWDGYKLPKSPNSTQYCTTNRQNADIIQALAVTAGYAATMLIKNRQNESHKPSFVINIWFTPGEYTELRRKPNVIDFSGTVYCAETPTGFFLVRRNGKVWVTGNSGRLLQPQNLPQNHLPDLEQARGLVKSGDFVALEMLYDNVPSVLSELIRTAFVPQDGRKFIVCDFSAIEARVIAWLAGEKWRNDVFATHGKIYEASASQMSKSR

SEQ ID NO: 51029 - DNA, 1191 bp, Unknown
  Obtained from environmental sample
  misc_feature (1)..(1191): n is a, c, g, or t
gtggagagcggcagtctccaaatcaaccaagcaattaccgtggggacacacgtgtcctatttcaaagcggcctcccagagcagcttgagcaccgcttcaacgaccacgataaacaatgtggacatcgtgtcggcgtcaaactacaaactcaccaagggcgagctcaacaacaacgtcacgatcggcaacagcaagcctctcaccagtggtgaaatcgatatgctcgccgagggcagcgttctcgccaagggcagctatatcgaaatgctctcctcttccacccccggagcgggaaccaccaccgccatcaggataatggtgagcggcaacgaggttgaaatatcatacgacgacgtcaacgatatactgaaggtgggtcaagatatagtggcccccgggaaaagcataacgctcgacgacggcacggttctcacccacgcaagcacgctcggcgaccgtaacgtctcgacaggcatagtgttcgtagataccggccgcgttatcttggccgaagaccttacacccggccaaaacgttaagggattctcactcgcgaaagacagcactatggccaccagcaccaaggtaaaggacgacaccgtgctaatggccggcaccgtaatcaccagcccggacaagttctacccgggcagcgtgaccatagcgcacgagggcaggagcatctcgttctccgccaactccgacgtcacactggccgcccgctactacgacatggccgtaagcgagagcatgacctacatattctctcgctacgaaccggcgtccagcaacttaagagactccgtcatggctcagatcggcgccaacagcggccaaaccgctttcgtctccatgggcgacatgcgggccgtggcgctgaacgtgcacaatatagacatcagctccaagtggggcgcggccaccgccatagaaacggtgaacaacgccttgcaacgcgtctctcaccagcgcgcccttctcggcgctatgcagaacaggcttgagcacacgataaagaacctcgacgcctccaccgagaacctgcaagccgccgaaagccgcattcgcgacgtcgacatggccaaggagatcatggagttcacgaaggacagcatcctcatgcagtcggcgcaagcaatgctggcgcaggcgaaccagataccggagagcgtgctgcagctgcttaggtag

SEQ ID NO: 51030 - protein, 396 aa, Unknown
  Obtained from environmental sample
  DOMAIN (303)...(374): Bacterial flagellin C-terminus
  misc_feature (1)..(396): Xaa is any amino acid
MESGSLQINQAITVGTHVSYFKAASQSSLSTASTTTINNVDIVSASNYKLTKGELNNNVTIGNSKPLTSGEIDMLAEGSVLAKGSYIEMLSSSTPGAGTTTAIRIMVSGNEVEISYDDVNDILKVGQDIVAPGKSITLDDGTVLTHASTLGDRNVSTGIVFVDTGRVILAEDLTPGQNVKGFSLAKDSTMATSTKVKDDTVLMAGTVITSPDKFYPGSVTIAHEGRSISFSANSDVTLAARYYDMAVSESMTYIFSRYEPASSNLRDSVMAQIGANSGQTAFVSMGDMRAVALNVHNIDISSKWGAATAIETVNNALQRVSHQRALLGAMQNRLEHTIKNLDASTENLQAAESRIRDVDMAKEIMEFTKDSILMQSAQAMLAQANQIPESVLQLLR

SEQ ID NO: 51031 - DNA, 570 bp, Unknown
  Obtained from environmental sample
  misc_feature (1)..(570): n is a, c, g, or t
ttgcccagcattgggatattaaatagtatgaagggggaggaatccatgtccgatgcggtaaatccataccagagtcccgaaactgcggtggtgcctgaaaagcccatggttattcagggaacgcttacggaaaccatgctggcctatctgaagggggctactccctggcttcgtttggtgggcattttggggtttataaactcaggttttgtggctcttatgggtttttcggttttaccctttatttcagttgcgattagggcctggactgaagtacctggctttgaatcgttaaatggcgcttctggcaatgttttcaacgtgtttatggtggttttgtttgtcggggtgggtgtattgctgtttttcccttccctttatgtattcaggttcggagaaaaaatccgtagttaccttaaaacgggcgcggatgaggagctggaattggcgtttcggaacaacaaatccctttggaagtttgccgggataatcggcattgtccaattggcttttttcccgttgttgatactgggcagcattatcacggcgcttgtagcggctttttcctga

SEQ ID NO: 51032 - protein, 189 aa, Unknown
  Obtained from environmental sample
  misc_feature (1)..(189): Xaa is any amino acid
MPSIGILNSMKGEESMSDAVNPYQSPETAVVPEKPMVIQGTLTETMLAYLKGATPWLRLVGILGFINSGFVALMGFSVLPFISVAIRAWTEVPGFESLNGASGNVFNVFMVVLFVGVGVLLFFPSLYVFRFGEKIRSYLKTGADEELELAFRNNKSLWKFAGIIGIVQLAFFPLLILGSIITALVAAFS

SEQ ID NO: 51033 - DNA, 648 bp, Unknown
  Obtained from environmental sample
  misc_feature (1)..(648): n is a, c, g, or t
atgataaaccatgcccgcctggattccgtgcttagggtgcaaactcctgaaggaatagaatactacctttatccggcgggttttgctgtacgcgcctgcgccctggctattgatagtttatttcagggctttttggtacttgttttcattattactacgggttttcttggcagagcgacggggatgtggttcttgttcattttgtccttcgttattaactggttttaccattcggcctttgatatttttaatcgcgggcagagtccggggaagaagattatgggtcttcgcgtggtaaaaggggacggctcgcctgtggatcccggcgcgtcctttctaagaaaccttctgcgtttcgcggatacctttatgttcctgtaccttatcgcttttatctgcatgctggtcagtccgggcttcaggcgtttgggcgactgggtagctgatactttggtggtgtatgcggacaaggctcaaagcaggtttatttccccagccttaaagcggcccgatatgccctggctttccgattttcccgcgcttntcccttcgcgccgtctcggctataaggagaaacaagccgtcttgatgttcgcccgctgttaccctttgttgggcaggcgcgtgctggtgaaattgcccgaatag

SEQ ID NO: 51034 - protein, 215 aa, Unknown
  Obtained from environmental sample
  DOMAIN (25)...(154): RDD family
  misc_feature (1)..(215): Xaa is any amino acid
MINHARLDSVLRVQTPEGIEYYLYPAGFAVRACALAIDSLFQGFLVLVFIITTGFLGRATGMWFLFILSFVINWFYHSAFDIFNRGQSPGKKIMGLRVVKGDGSPVDPGASFLRNLLRFADTFMFLYLIAFICMLVSPGFRRLGDWVADTLVVYADKAQSRFISPALKRPDMPWLSDFPALXPSRRLGYKEKQAVLMFARCYPLLGRRVLVKLPE

SEQ ID NO: 51035 - DNA, 945 bp, Unknown
  Obtained from environmental sample
  misc_feature (1)..(945): n is a, c, g, or t
atgaacaacgttcatgacagcgctttgccattgcgaagcagaagcgtctgggaggccgtagattcaggcgtccttctctggcgaagcaattttgtctattttatcccttttttcgctgttccggtctgggttgttgcttgcggtctgcgccttttctcgggggagcttttcttcattccctaccttggcctttggtggctaaagccgctgtttgatcgcattgtccttcacattgtttccaaaaggttttttggcgactcctccatgttaaagcttaatgatctcttccgtggaatttcggaaatgcggcgtggacttttaggggatcttttgtggaggcgtttcagcccaggcagggcggcaaggatgcccgtcagggttctggagcgtctgggggcaaggcaattcgcgcagaggaaaaaagttcttgaaggcgggggtattaatttttgctcgtttatcagcgtcctgggtttggcgctggaagccgcgcttcttcttggagaaatactttttgcgttaatgacggccagtttgttttttccaaccgcagttgagtatttagaagagaataagcagataacggaaatatttatctttgcggcgttttgttttaactacatccttgtagaaagcttatatgtgtgtatgggttttggcctttacataaacagccgagtggaagtcgaaggctgggatttggaactgctctttaagaaattcgttaagcgtcagaatgacgctaaacctctaaaaattgccttgcttgtctgcctttttatcgtcctgcctttttcagcttactcgcaaataacaagcgactttcccgatgattttcctgttccggatgagcaggctgtccttgatttgaaagagatccttgcctctcctgattttggtagcgagagggaaggctggactatacgcttcaaaaacagcgattag

SEQ ID NO: 51036 - protein, 314 aa, Unknown
  Obtained from environmental sample
  misc_feature (1)..(314): Xaa is any amino acid
MNNVHDSALPLRSRSVWEAVDSGVLLWRSNFVYFIPFFAVPVWVVACGLRLFSGELFFIPYLGLWWLKPLFDRIVLHIVSKRFFGDSSMLKLNDLFRGISEMRRGLLGDLLWRRFSPGRAARMPVRVLERLGARQFAQRKKVLEGGGINFCSFISVLGLALEAALLLGEILFALMTASLFFPTAVEYLEENKQITEIFIFAAFCFNYILVESLYVCMGFGLYINSRVEVEGWDLELLFKKFVKRQNDAKPLKIALLVCLFIVLPFSAYSQITSDFPDDFPVPDEQAVLDLKEILASPDFGSEREGWTIRFKNSD

SEQ ID NO: 51037 - DNA, 888 bp, Unknown
  Obtained from environmental sample
  misc_feature (1)..(888): n is a, c, g, or t
ttgaaaagctgtgtaagcgcaatccctcctattgcaattccagcggcaataataatcgcaattccttcattcatggctcccagcctccttctgcggatttggtttgtggcaatcccatcatgccacggaagggggctttttataaccgcccacgcatgcgagggcggcatgaccgacaaatggctgaccgtcagcgagatcgccgaattaatatctcgcacaagaggccctgtcatcagaagggctaagcttgagagttggccataccgcagttatgccgtccggggcggaaaggaacgccgctaccatctggcgagcctaccggaagatgtccaagccgcttatgccgccagcatcgatgcatcgttaacagacttacaaaaccaattcaaaccggatttaaagacggataaaaagatcgatatacctcggtattccggcaggggcgcgaaaaccagggcggcaaaaaattgggacgaactgcctgaaaaatatcaaaagattgcaaatggccgccggaagctgcttgaagcttattcggattccaatctatcagttgcgcggtttgtcgaagcgtataacagcggaaaagtcgtcccagacctccgcgcccagttaggatgccacggcgatatcaaaaggccgtctagcttttaccgttggcttgagcagtacgaaagagacgggataacaggccttgccccgcagtacgccgggcgcggcatcggcgcgtcattatcgcaggaagcaaaagaccgtatcgagtggctgtatctcgattcgggtcagccgaatgcgacaatggtttgcgagcttcttggccagtacggaatagaagccggagaatccacagtgcgccggtaccaaactccatccctgattgggtaa

SEQ ID NO: 51038 - protein, 295 aa, Unknown
  Obtained from environmental sample
  SIGNAL (1)...(25)
  misc_feature (1)..(295): Xaa is any amino acid
MKSCVSAIPPIAIPAAIIIAIPSFMAPSLLLRIWFVAIPSCHGRGLFITAHACEGGMTDKWLTVSEIAELISRTRGPVIRRAKLESWPYRSYAVRGGKERRYHLASLPEDVQAAYAASIDASLTDLQNQFKPDLKTDKKIDIPRYSGRGAKTRAAKNWDELPEKYQKIANGRRKLLEAYSDSNLSVARFVEAYNSGKVVPDLRAQLGCHGDIKRPSSFYRWLEQYERDGITGLAPQYAGRGIGASLSQEAKDRIEWLYLDSGQPNATMVCELLGQYGIEAGESTVRRYQTPSLIG

SEQ ID NO: 51039 - DNA, 480 bp, Unknown
  Obtained from environmental sample
  misc_feature (1)..(480): n is a, c, g, or t
gtgcctctgtcgcaggtgcttttcttcccccgattcggcatggaggtggtgttggcccatcctaagggctgggagctgcccgattgggtcatcgccgaggcgaaggccaacgcggagaagtttggcggcagcgtgacggttacgaacgacgaggcctacgcctacaaggacgcgcacatcgtcatcccgaaaaactggggcaactgggtgaacgaccagacggggctcgccgcgaccggcgcggtgaaggtcgtcgacgacaaactgatggctcacaaatcctggaagtgcaccgaggaaaaaatcgcgaccgcagacaaagacgtcgtttacatgcatgccctgccagcggatcgcaacaacgaggtcgaagattccgtcatcgatggccctcattccatcgtctacgacgaggctgaaaaccggctgcacaccgccaaggccgtcatgctcctgacaatggggggaagaggaaaatag

SEQ ID NO: 51040 - protein, 159 aa, Unknown
  Obtained from environmental sample
  DOMAIN (3)...(153): Aspartate/ornithine carbamoyltransferase, Asp/Orn binding domain
  misc_feature (1)..(159): Xaa is any amino acid
MPLSQVLFFPRFGMEVVLAHPKGWELPDWVIAEAKANAEKFGGSVTVTNDEAYAYKDAHIVIPKNWGNWVNDQTGLAATGAVKVVDDKLMAHKSWKCTEEKIATADKDVVYMHALPADRNNEVEDSVIDGPHSIVYDEAENRLHTAKAVMLLTMGGRGK

SEQ ID NO: 51041 - DNA, 369 bp, Unknown
  Obtained from environmental sample
  misc_feature (1)..(369): n is a, c, g, or t
ttgaccctcgaacacgcggagcacgcgctgggcgaactcaacgacgctttgtcgcagatgcaaaaagccaacgattccattcaaaatatcgcctccatagcggaagagcaagcggcctccagtaaagaaatggcacactcgctcgacagcgctacaaaggcatcaattgacgtggtccacaccttatcgggcatcaaccaatcgaccgacaccacgacttatgccatagagggcgtcgcgaagcaggcagaggccatatcgcgtcacgctcaaacgttggcggaactgttggccgttttcaaactggtggagcttgttcagcccttggacgcctccttaaacatcaagaagctgacggcggccaggtga

SEQ ID NO: 51042 - protein, 122 aa, Unknown
  Obtained from environmental sample
  misc_feature (1)..(122): Xaa is any amino acid
MTLEHAEHALGELNDALSQMQKANDSIQNIASIAEEQAASSKEMAHSLDSATKASIDVVHTLSGINQSTDTTTYAIEGVAKQAEAISRHAQTLAELLAVFKLVELVQPLDASLNIKKLTAAR

SEQ ID NO: 51043 - DNA, 1926 bp, Unknown
  Obtained from environmental sample
  misc_feature (1)..(1926): n is a, c, g, or t
atgggaaagattatcggcattgacttaggaactactaactcatgtgtggccgtccttgaggggggcgagccagtggtaatccagaattcagaaggggatcgtacaactccgtccattgttggctttaccagcaagggggacaggatcgtcggcgccccggccaaaaatcagatgattaccaatccggagaatacggtttattcaattaaaaggtttatgggcaggcggtattccgaggtaaccagtgaaatgaagcgggtgccctaccgcatcgtagagcagggggatgacgttagggtgaaaatcgacgacaaaccctattccccgcaggaaatatccgctttcgtgcttcagaagatgaagcagaccgccgaggattacctgggcgagtccgttaccgaggcggtcataaccgtcccagcttacttcaacgatgcccagcgccaggcgacaaaggacgccggtaaaatcgcgggtctggacgtaaagcgtatcatcaacgagccgactgccgcttcgctggcttttggctttaacaaagaccaaaagaaagagaaaactatcgctgtctacgacttggggggcggtactttcgatatttccattctggaattaggcgaaggggtttttgaagtaaattccccaaacggggatacccaccttggaggcgacgactttgaccggcgtatccaggaatggcttattaccgaattcaaaaatgacacggggattgatttgtcccaggatcgcatggccctgcagcgcctccgtgaagcggcggaaaaggccaaaatagaactgtcagccatgcaaaccacggagatcaaccttccctttatcactgcggatcaaagcgggccaaagcatctacagaaaaacctgaccagggcgaagtttgaacagatggtctcggatcttctggaacggtccaaggagccctgcaagaaagccctggccgatgcggggcttaaccccgacgacatccatgaagtgatccttgtcggcggctctacccggattcccgcagttcagcagattgtcaaagagctctttaagaaagaacccaacaggggagtcaacccggatgaagcggtagccataggcgccgctatccagggaagtatcttgtccggagacgtaaaggacgtgctccttctggatgtaactcccctttctctggggattgaaactttgggcggcgtgatgacacggcttatcccccgtaacaccaccatacccaccaggaaaagccagattttctccaccgccgccgacggccagaccgccgtttcaattcaggttcttcagggtgagcgggaaatggcaaaccagaaccgtgttctgggccgttttgatttggtgggcattcccccggctcccagaggcgttcctcaaattgaggttacttttgacatagatgccaacggcattgtccatgtaagcgccaaggatctgggtacgggcaaggaacaaaagatccgcatagaaagttcttccggcctttccgattccgacattgaccggatggttaaagaggcggaactccacgccgaagaagacaagagggaaagggaaaaggcggaaataaggaacgaagcggattcgatgatttacggcacggaaaagaacatcaaggatctgggggataaggtcagcgctgccgacaaaagcaagattgaagaagccatcgccgatctgaaaaaagccctggaaggcggggatgttcagatcatcaaagacaagaccgaagtccttaagcaggcctcctacaaaattgccgaagaagtttataaacaacaggctgctcagggtcaggggccaatgggcggaggcccggatgccggaaacgccgggcccggagacggcggagggccggaaaccaaaagcgccgaagacgcagattacgaagtggtaaacgacaagtag

SEQ ID NO: 51044 - protein, 641 aa, Unknown
  Obtained from environmental sample
  DOMAIN (2)...(381): MreB/Mbl protein
  misc_feature (1)..(641): Xaa is any amino acid
MGKIIGIDLGTTNSCVAVLEGGEPVVIQNSEGDRTTPSIVGFTSKGDRIVGAPAKNQMITNPENTVYSIKRFMGRRYSEVTSEMKRVPYRIVEQGDDVRVKIDDKPYSPQEISAFVLQKMKQTAEDYLGESVTEAVITVPAYFNDAQRQATKDAGKIAGLDVKRIINEPTAASLAFGFNKDQKKEKTIAVYDLGGGTFDISILELGEGVFEVNSPNGDTHLGGDDFDRRIQEWLITEFKNDTGIDLSQDRMALQRLREAAEKAKIELSAMQTTEINLPFITADQSGPKHLQKNLTRAKFEQMVSDLLERSKEPCKKALADAGLNPDDIHEVILVGGSTRIPAVQQIVKELFKKEPNRGVNPDEAVAIGAAIQGSILSGDVKDVLLLDVTPLSLGIETLGGVMTRLIPRNTTIPTRKSQIFSTAADGQTAVSIQVLQGEREMANQNRVLGRFDLVGIPPAPRGVPQIEVTFDIDANGIVHVSAKDLGTGKEQKIRIESSSGLSDSDIDRMVKEAELHAEEDKREREKAEIRNEADSMIYGTEKNIKDLGDKVSAADKSKIEEAIADLKKALEGGDVQIIKDKTEVLKQASYKIAEEVYKQQAAQGQGPMGGGPDAGNAGPGDGGGPETKSAEDADYEVVNDK

SEQ ID NO: 51045 - DNA, 345 bp, Unknown
  Obtained from environmental sample
  misc_feature (1)..(345): n is a, c, g, or t
ttggtctttgttaaagccaaaagccagcgaagcggcagtcggctcgttgatgatacgctttacgtccagacccgcgattttaccggcgtcctttgtcgcctggcgctgggcatcgttgaagtaagctgggacggttatgaccgcctcggtaacggactcgcccaggtaatcctcggcggtctgcttcatcttctgaagcacgaaagcggatatttcctgcggggaatagggtttgtcgtcgattttcaccctaacgtcatccccctgctctacgatgcggtagggcacccgcttcatttcactggttacctcggaataccgcctgcccataaaccttttaattga

SEQ ID NO: 51046 - protein, 114 aa, Unknown
  Obtained from environmental sample
  misc_feature (1)..(114): Xaa is any amino acid
MVFVKAKSQRSGSRLVDDTLYVQTRDFTGVLCRLALGIVEVSWDGYDRLGNGLAQVILGGLLHLLKHESGYFLRGIGFVVDFHPNVIPLLYDAVGHPLHFTGYLGIPPAHKPFN

SEQ ID NO: 51047 - DNA, 507 bp, Unknown
  Obtained from environmental sample
  misc_feature (1)..(507): n is a, c, g, or t
ttgtttataaacttcttcggcaattttgtaggaggcctgcttaaggacttcggtcttgtctttgatgatctgaacatccccgccttccagggcttttttcagatcggcgatggcttcttcaatcttgcttttgtcggcagcgctgaccttatcccccagatccttgatgttcttttccgtgccgtaaatcatcgaatccgcttcgttccttatttccgccttttccctttccctcttgtcttcttcggcgtggagttccgcctctttaaccatccggtcaatgtcggaatcggaaaggccggaagaactttctatgcggatcttttgttccttgcccgtacccagatccttggcgcttacatggacaatgccgttggcatctatgtcaaaagtaacctcaatttgaggaacgcctctgggagccgggggaatgcccaccaaatcaaaacggcccagaacacggttctggtttgccatttcccgctcaccctgaagaacctgaattga

SEQ ID NO: 51048 - protein, 168 aa, Unknown
  Obtained from environmental sample
  misc_feature (1)..(168): Xaa is any amino acid
MFINFFGNFVGGLLKDFGLVFDDLNIPAFQGFFQIGDGFFNLAFVGSADLIPQILDVLFRAVNHRIRFVPYFRLFPFPLVFFGVEFRLFNHPVNVGIGKAGRTFYADLLFLARTQILGAYMDNAVGIYVKSNLNLRNASGSRGNAHQIKTAQNTVLVCHFPLTLKNLN

SEQ ID NO: 51049 - DNA, 870 bp, Unknown
  Obtained from environmental sample
  misc_feature (1)..(870): n is a, c, g, or t
atggatttccgcccccaaggcagcctgggtaatggaaataggcaccgcgcagtacaggtcaaagtcctgccgttcaaaatattcgtggggcttgatccgtatgaaaacatagaggtctcccggaggtccgccaccggggcccgcatcgccctgctgggagatcaccacacgcttgccgttttccactccagcggggattgtaaccatgatcttctgccgcttccgctgggttccgccgccgccgcagtcccggcaaggctgctcaataatgtagccttcgccgcggcagttgtggcaggtagaagccacggaaaaaaagccctggctgtgccgtatctggcccgaaccctgacagacggagcagacttttttgccggaaccttctgcggctccggtacccttgcaagaaggacaagcgtcgtttttggtgtattggatttccaccttggtgccgaataccgcgtctttaaagggtatttcgatgtcgtagcggaggttcgctccctgacgcacgccgccggaagaacggcgccgcccgcccccgccgaagacggtatcgaagatccccgaaaagtccccaaagagatcttcaaaaccccggaaggtctgggaaaagtccccctgccctgccatgccgtcaaccccggcaaagccaaattgatcataggcggattttttctgatcatcccccagaatctcgtaggcttcggtggcctctttgaatttctcttccgcttccttgttccccggatttttgttcggatgatactgaatagcaagtttgcgatacgctttctttatatcgtctttggaggcattcttgggtacacccaacacctcgtagtaatcgcgtttagccactttttttaa

SEQ ID NO: 51050 - protein, 289 aa, Unknown
  Obtained from environmental sample
  misc_feature (1)..(289): Xaa is any amino acid
MDFRPQGSLGNGNRHRAVQVKVLPFKIFVGLDPYENIEVSRRSATGARIALLGDHHTLAVFHSSGDCNHDLLPLPLGSAAAAVPARLLNNVAFAAAVVAGRSHGKKALAVPYLARTLTDGADFFAGTFCGSGTLARRTSVVFGVLDFHLGAEYRVFKGYFDVVAEVRSLTHAAGRTAPPAPAEDGIEDPRKVPKEIFKTPEGLGKVPLPCHAVNPGKAKLIIGGFFLIIPQNLVGFGGLFEFLFRFLVPRIFVRMILNSKFAIRFLYIVFGGILGYTQHLVVIAFSHFF

SEQ ID NO: 51051 - DNA, 462 bp, Unknown
  Obtained from environmental sample
  misc_feature (1)..(462): n is a, c, g, or t
atgaaaaagattattttcgtagtttgcttagtattctttatcgcgggtttcgcagtggctcaagttggccccggcggaacattgtatgtgtcggttaaaaccatggacttgaagtcatcggcgggtaaaaaaatggcaaccttaaattacggtgacaaggttacggtgacacaggtagacggtaaaaatgtggaagttaaaagcgccacggatgccacattaatcggctgggcgccggtggcaaattttaccgtaaagaaaattgttaccggaagcacgtccacgacaacggcgaaagaagtcgccctggcgggaaaaggttttaatcaggatattgaaaatacctacagttcgcagggacaggttgatttcgccgatgtggataaaattgaggcgataacggcggatgaaaacgcccttatgcgttttattgaagagggtcgtctgtctcccggaaaatag

SEQ ID NO: 51052 - protein, 153 aa, Unknown
  Obtained from environmental sample
  SIGNAL (1)...(20)
  misc_feature (1)..(153): Xaa is any amino acid
MKKIIFVVCLVFFIAGFAVAQVGPGGTLYVSVKTMDLKSSAGKKMATLNYGDKVTVTQVDGKNVEVKSATDATLIGWAPVANFTVKKIVTGSTSTTTAKEVALAGKGFNQDIENTYSSQGQVDFADVDKIEAITADENALMRFIEEGRLSPGK

SEQ ID NO: 51053 - DNA, 906 bp, Unknown
  Obtained from environmental sample
  misc_feature (1)..(906): n is a, c, g, or t
atgaaaaaaacaataatgcttgcattgatggttatgatttttttcataaccatcattacatgcaagcatgtagactcactcgcgcaggcggcggcaaattcggatattatcgatcatggtacggcggacataatcagccttgccgcgagggcttttggttccgccgccgaaaacgcgactcctgaacaggaatattttatcgggcgcgcggttgccgccaatatcctctccaattacaaaatttgggataaaaatccgactctcaccgcatatcttaattatatttgcggtgtcattgtcattaattctcccgaaccgcatattttcaacggctaccatgtcgccatacttgacagcaacgacattaacgcctttaccacttccggcgggcatattttcctgacgcgcggcctcgttagaatcgccaaaacagaagacgctctggcggcggtcattgcccatgaagtcgcccacaaccaattgaagcacagccttaaagccattaaaacaagccgcgttactaacgcgtttttaattaccgcaaccgccggagtcggggcgttaactggaatggatgcaaatgaattcgccgaggtattaaatgaatctgtcggtgaagtaatgcaggcaatggtaaacagcggttattcaaaggaacaggaatacgaagccgacattgccgcgatgtgctttatggccgccgcaggttatcagccatcggggcttattgatatgctaaatgaattgaaagccgtacataccatcggtattggactcagcaaaacccaccccgccccgggacagcgcatttattacgctgaaaaagcgcttaacagattcaccgttaccgataccatgctcatcagacaaggacgtttcaacgaaaccttaaaattaattaattaa

SEQ ID NO: 51054 - protein, 301 aa, Unknown
  Obtained from environmental sample
  SIGNAL (1)...(28)
  DOMAIN (99)...(278): Peptidase family M48
  misc_feature (1)..(301): Xaa is any amino acid
MKKTIMLALMVMIFFITIITCKHVDSLAQAAANSDIIDHGTADIISLAARAFGSAAENATPEQEYFIGRAVAANILSNYKIWDKNPTLTAYLNYICGVIVINSPEPHIFNGYHVAILDSNDINAFTTSGGHIFLTRGLVRIAKTEDALAAVIAHEVAHNQLKHSLKAIKTSRVTNAFLITATAGVGALTGMDANEFAEVLNESVGEVMQAMVNSGYSKEQEYEADIAAMCFMAAAGYQPSGLIDMLNELKAVHTIGIGLSKTHPAPGQRIYYAEKALNRFTVTDTMLIRQGRFNETLKLIN

SEQ ID NO: 51055 - DNA, 975 bp, Unknown
  Obtained from environmental sample
  misc_feature (1)..(975): n is a, c, g, or t
atggcgaccgacaaatggcgattgactgttcaacccttcataatgaaaaaactcgtcgacaaggacgttgtctacaatatcaagaaagccaagatgctgcttgaggccgagagcgcggaaattttcgcaattcttgatgaggttgtaaaagaacacccggttctgctgaaccgcgcgcccacgctgcaccgccttggtatacaggcctttgagccggtgcttgtggaaggcaaggcgatcaaactgcatccccttgtctgccacgcctttaacgccgactttgacggcgaccagatggccgtccacgtaccgctgacccaggcggcccagatggagtgctggacactgatgctctccgcccgcaaccttcttaaccccgcgaacggcagaaccattgtgttcccctcccaggacatggtgcttggaataaacttccttacccgcgtcaaacctaacggcaaacgtcccgagtcttcaaagccggagggcaaaagccacattccctattattcctctcctgaagaagcccttatggcggtggagaataaatttctcgattggggatccctcatacgggttaagcccgtgaaatttccgatatgggacaagattgaccatgaggcggagctcccgaaggacggaatcatcgaaaccacagtcggaaggctgatattcaacgaggaacagcccaaagagattccctttatcaattatgaaatgaaagacaaggagctacgcgcccttattgaacatgtcttcaagaaaaacggctcctggattacggtaaagatgctggacgcgattaagtcaacaggctaccgttacgcgacagttttcggcgccacgattggcattgacgatattgtggttccaaaagaaaagcccggaatgatcgataaggcaaacagggaagtcgaggcgattcaggcccagtggcgcaaggggcattatgacctaggaagagcgctaccataa

SEQ ID NO: 51056 - protein, 324 aa, Unknown
  Obtained from environmental sample
  DOMAIN (122)...(288): RNA polymerase Rpb1, domain 3
  misc_feature (1)..(324): Xaa is any amino acid
MATDKWRLTVQPFIMKKLVDKDVVYNIKKAKMLLEAESAEIFAILDEVVKEHPVLLNRAPTLHRLGIQAFEPVLVEGKAIKLHPLVCHAFNADFDGDQMAVHVPLTQAAQMECWTLMLSARNLLNPANGRTIVFPSQDMVLGINFLTRVKPNGKRPESSKPEGKSHIPYYSSPEEALMAVENKFLDWGSLIRVKPVKFPIWDKIDHEAELPKDGIIETTVGRLIFNEEQPKEIPFINYEMKDKELRALIEHVFKKNGSWITVKMLDAIKSTGYRYATVFGATIGIDDIVVPKEKPGMIDKANREVEAIQAQWRKGHYDLGRALP

SEQ ID NO: 51057 - DNA, 312 bp, Unknown
  Obtained from environmental sample
  misc_feature (1)..(312): n is a, c, g, or t
atgggaaagaaaggcaaagaaaggcgtgtttacacgaaggaattcaaagccgaggcggtagcattggccgagaaaaaggagaagccagtaagccggattgcggtcgatctgggaatcaacgagaatatgctgcgccgatgggtgcaggcttcacgggagtcggccggaagcggcttgcaagcgttcncaggccacgggcgaccaaaggacgcagagcttgcccgcttgcggaaagagaacaaagcgctcagggaggccaatgaaatcctaaaaaaagcggcggtcatcttcgcgcaaggggaaccccaataa

SEQ ID NO: 51058 - protein, 103 aa, Unknown
  Obtained from environmental sample
  DOMAIN (8)...(90): Transposase
  misc_feature (1)..(103): Xaa is any amino acid
MGKKGKERRVYTKEFKAEAVALAEKKEKPVSRIAVDLGINENMLRRWVQASRESAGSGLQAFXGHGRPKDAELARLRKENKALREANEILKKAAVIFAQGEPQ

SEQ ID NO: 51059 - DNA, 804 bp, Unknown
  Obtained from environmental sample
  misc_feature (1)..(804): n is a, c, g, or t
gtgtgtgaggtctctcttttagggcaagcatacgcgcttgcaaaaccagacccggctacttttgacaatgcggaggaaattgcattttttcaggcagttaaagctcgacttaccaaattcgagacaggaggctccggcagagataaaaattatgattccgttatccgcaatattgtgaactctgccatagcatcagatcaggttgtagatatatttagcgcagcgggacttgaaaagccggaactttcgattctttctgaagaattcttaaaagaaattgagggaatgaagtataaaaatgtcgctattgaacttttaagaaaactgttgttcgatgaaataaaaattcgttccaggcataacctcgctaaatcaaaatctctgatggagatgctcgacagtgcaataaagcgttatcagaacaatctattgaccaccgctgaaattattgaggaacttatccgcatcgctcgtgagataaaagcctctgataaacgcggtcatgaaatggggctttcggaagaagaacttgctttttatgacgctctcgaaaccaatgacagcgcagtaaaggttcttggtgacgatgtattacgggcaattgcgcgggaagtagctgataaagtcaggcagaacgccactatagatttcacaatcaaagaaactgcccgtgccagaattatggttattgtccgcagaatcttgactaaatacggatatcctcctgataaacaacctgcggcgattgaattagtgatgaagcaggcggaaaatttggcggatgtctgggctttaaatcaataa

SEQ ID NO: 51060 - protein, 267 aa, Unknown
  Obtained from environmental sample
  misc_feature (1)..(267): Xaa is any amino acid
MCEVSLLGQAYALAKPDPATFDNAEEIAFFQAVKARLTKFETGGSGRDKNYDSVIRNIVNSAIASDQVVDIFSAAGLEKPELSILSEEFLKEIEGMKYKNVAIELLRKLLFDEIKIRSRHNLAKSKSLMEMLDSAIKRYQNNLLTTAEIIEELIRIAREIKASDKRGHEMGLSEEELAFYDALETNDSAVKVLGDDVLRAIAREVADKVRQNATIDFTIKETARARIMVIVRRILTKYGYPPDKQPAAIELVMKQAENLADVWALNQ

SEQ ID NO: 51061 - DNA, 1170 bp, Unknown
  Obtained from environmental sample
  misc_feature (1)..(1170): n is a, c, g, or t
gtggaacagatagtaagggcggcgatctataaagagatgaaaaacctggattaccgggcattggaatacgcgcaggaagattccagaatatgtgaaaaatttgtaaaaataaatccactgcggccgtacagtttccaggtatggcagaaatacataagccggataagcgaggaaaaattagaaaagttcatgatagcgatgaacaagatagcgataagcgaaggcctggaagacgtgcgagaattccggcaggacaccacggtaatagagacggacatccattacccgacgaacaacagccttgtatgggactgcataaaagaatgcgaaaggcttttaagcctcctgaaagaagaggttgaaacgcttgagtttgaagaataccggaagaaggcgaagaaaatccattttaagataaacgtggagaaaaacgaagaaaaacgggtaaaactgttcaaaaagcagcttgaaatgttcacaaacagcataaaacaggtatcaaacatagtaaaaaaaaagaaagaatacggagggacaacaaagtcggacggcattatagccgcgatggaggagttaataccggtaatggagaaagtattcaggatgacggaacgcagagagatattgaaagagaaagtgcctgttgaggaaaaaatattttcgatatacgagcggcatactgacataatagtgaaaggcgggcgtgaagcccagttcgggcataaagtaaaccttggcagcgggagtagcaacttaatactaacctgcgagatactggaaggaaatcctaaagacagcgaattgtatgaggggacaataaaaaagctgaagaaggattacggcaagacgccgcaatcaagcgttgctgacggcggatttgcgagcaaggcgaacatagaatattcacagaaggcagggataataaatatagtgttcaacaagatacgtgggagcatgcaaaacatagcgaacagcaaatgggtggaaaacaagctaaagcgctggaggagcggaatagaggcaataatatccaacttgaaacggggatttcaaatacgccggtgcgcttggaaaggccttgcacattatggacaaaaagtattttggagcgtcattggatataaccttcgggtaatgactggcactatattgcaaacaatgactttatag

SEQ ID NO: 51062 - protein, 389 aa, Unknown
  Obtained from environmental sample
  DOMAIN (212)...(376): Transposase DDE domain
  misc_feature (1)..(389): Xaa is any amino acid
MEQIVRAAIYKEMKNLDYRALEYAQEDSRICEKFVKINPLRPYSFQVWQKYISRISEEKLEKFMIAMNKIAISEGLEDVREFRQDTTVIETDIHYPTNNSLVWDCIKECERLLSLLKEEVETLEFEEYRKKAKKIHFKINVEKNEEKRVKLFKKQLEMFTNSIKQVSNIVKKKKEYGGTTKSDGIIAAMEELIPVMEKVFRMTERREILKEKVPVEEKIFSIYERHTDIIVKGGREAQFGHKVNLGSGSSNLILTCEILEGNPKDSELYEGTIKKLKKDYGKTPQSSVADGGFASKANIEYSQKAGIINIVFNKIRGSMQNIANSKWVENKLKRWRSGIEAIISNLKRGFQIRRCAWKGLAHYGQKVFWSVIGYNLRVMTGTILQTMTL

SEQ ID NO: 51063 - DNA, 420 bp, Unknown
  Obtained from environmental sample
  misc_feature (1)..(420): n is a, c, g, or t
atggaagaaaaagacgtaaatattagatatgccaaaagcgaagattattattggctaactgaacatgataaacatattccagaaaatatggtaaaaaataaaattgaaaacatggaattatatgttgctgaaaataatggaaaaatagttggttggttaaggtataatttattttgggataatgtaccgtttatgaacatgatatattttttagaagaatataggaaattgggaataggtacaaaattaatagaatattgggaaaatgaaatgaaacaaaaaggttataaaagtgtattaacatcaactcaatcaaatgaagaagcacaacatttttatagaaaaatgggatataaggaaataggtggatttaagtattttaatgatccttatgaaataatattccaaaaaatattttaa

SEQ ID NO: 51064 - protein, 139 aa, Unknown
  Obtained from environmental sample
  DOMAIN (41)...(119): Acetyltransferase (GNAT) family
  misc_feature (1)..(139): Xaa is any amino acid
MEEKDVNIRYAKSEDYYWLTEHDKHIPENMVKNKIENMELYVAENNGKIVGWLRYNLFWDNVPFMNMIYFLEEYRKLGIGTKLIEYWENEMKQKGYKSVLTSTQSNEEAQHFYRKMGYKEIGGFKYFNDPYEIIFQKIF

SEQ ID NO: 51065 - DNA, 954 bp, Unknown
  Obtained from environmental sample
  misc_feature (1)..(954): n is a, c, g, or t
atggcggctctaaaagagataaatttatcttacatttgtttcaacttttcatgcgcgccggactcgttcattctccattatgtgaaatggatgatggggcaaaaaccgttcctcgtgcttgaattggattcccattcagccgacgcgggagtcgatacccgtgttgaggcgtttctcgacatcatcgacggttaccgcgcgaagaaaaatcagtttgaagacgagcgttacgacaacggaatgaggtttgtctgcgaaaaaatgtattcgggcgaattcgatttgcgcatagacaatataaaaacaggagagagaattccggttatagacaacaagagggtaaaagttctgctatctaacatgggaaatatttccaccgagtatatgggagccgccattcgcagtttgggcattaacgcggaagcgatgcctgtggcgacggcaaaaacaattcaggcggcgcgcgctcacgcgtccggtaaggaatgtgtgccaagccatttggttttgggaagcgcattggaatttttcttcagcgacaaataccgcaaagacgagttgtatcttctctttgtgccgataacgacaggtccctgccgtacggggcagtattatgtctactacgataatcttttccgtgatttgcgtcttgaaaacgtagtggtctttatcctctccgcagataattcatacacagagcttggacccagtttcgcaaaagagatgtggaaaggtttggtgttatccgactacttaaaagacattcaatgttctctcttggctgcggcggttgatccagtaaaagcggaaaaagattttgaacattcatggcgcaaagttatgcacgccgtagaacacaaccccaaagcgctgtggaaagaacttaaacatgtcgccgtggacgtaaaaaaaataccgttaaacgaaaagtcgcggattgtccgcgcgtgttaa

SEQ ID NO: 51066 - protein, 317 aa, Unknown
  Obtained from environmental sample
  misc_feature (1)..(317): Xaa is any amino acid
MAALKEINLSYICFNFSCAPDSFILHYVKWMMGQKPFLVLELDSHSADAGVDTRVEAFLDIIDGYRAKKNQFEDERYDNGMRFVCEKMYSGEFDLRIDNIKTGERIPVIDNKRVKVLLSNMGNISTEYMGAAIRSLGINAEAMPVATAKTIQAARAHASGKECVPSHLVLGSALEFFFSDKYRKDELYLLFVPITTGPCRTGQYYVYYDNLFRDLRLENVVVFILSADNSYTELGPSFAKEMWKGLVLSDYLKDIQCSLLAAAVDPVKAEKDFEHSWRKVMHAVEHNPKALWKELKHVAVDVKKIPLNEKSRIVRAC

SEQ ID NO: 51067 - DNA, 660 bp, Unknown
  Obtained from environmental sample
  misc_feature (1)..(660): n is a, c, g, or t
gtgttaattgtgggggagatttatgtacgcagggatgattttgccgttggcgaattaattgagcttatgagcgagaggggtattgttgtaaaagtagccggcgtaagcgaatggattcattaccttgactttgtgcgcgagtacgcccttaaaaaacttattaaactgcgaaaacccggcacaagattgttctctaaaccgtcaagggaccttaaaaaacttcaaattgaagaatggtggaaacatcatattgaaaagaaaattcttgccatcttggaacctacgggccttattcccaaaacgccccacgatatgcggcatattatgaagtacaccgtaaaacattttgttaatctggaactcaattcggagattgcggtttcttcaggttcggcggcggcggcgatggacgaaggttattcaggcatcgtgaatatcagcccatttgcctgccttatcggacgcgtaattgaagggttgttcaccccgtgggcgagggagcgcaattacccgacactctccgtggaagttgacggtaaccttctgccgccgaatattgtcaataaactgaatatttttatggttaacgtattgcgttttaagggcggcggcgatctttcaacattggttgacaaagccggcggagaagagtccgtatga

SEQ ID NO: 51068 - protein, 219 aa, Unknown
  Obtained from environmental sample
  misc_feature (1)..(219): Xaa is any amino acid
MLIVGEIYVRRDDFAVGELIELMSERGIVVKVAGVSEWIHYLDFVREYALKKLIKLRKPGTRLFSKPSRDLKKLQIEEWWKHHIEKKILAILEPTGLIPKTPHDMRHIMKYTVKHFVNLELNSEIAVSSGSAAAAMDEGYSGIVNISPFACLIGRVIEGLFTPWARERNYPTLSVEVDGNLLPPNIVNKLNIFMVNVLRFKGGGDLSTLVDKAGGEESV

SEQ ID NO: 51069 - DNA, 675 bp, Unknown
  Obtained from environmental sample
  misc_feature (1)..(675): n is a, c, g, or t
ttgcggaaacttaccgttggaaaagttaaaaaattatctttggccctaaagtgcgaggtagagaagagtcttgctttttccgtgaggtacggagagttaaattgcgggcataaaagctgtggggccgcggccgcccttgtagttgaagaattctttgaagaactacccagaattagggttatattagtgcaggatttggacgccgcggtacgtggagacccggctgcgaaaagttctaacgaagtgattctttcatatcccggttttcaggcgattgccattcacagaatagcgcattttttctggacgcggcaggttcccataatcccgaggatgatgagcgagattgttcacgggcggacgggcattgacattcatcccggcgcgcaaatagacgagtcattttttatcgatcacgggacgggcgttgtaataggggaaactaccgttataggaaaaaatgttaaactttatcagggagttacgcttggcgccctttcagtaaaaaaagaggaaagtaaccgcaagcgccacccgaccattgaagacgacgtgacaatttacgctaacgccacgattcttggcggggagacaatcattggcagtggcagcatcatcgggggcagcgtgtggataacgcattccgtcccgccgggaagcagggtgagccaatag

SEQ ID NO: 51070 - protein, 224 aa, Unknown
  Obtained from environmental sample
  misc_feature (1)..(224): Xaa is any amino acid
MRKLTVGKVKKLSLALKCEVEKSLAFSVRYGELNCGHKSCGAAAALVVEEFFEELPRIRVILVQDLDAAVRGDPAAKSSNEVILSYPGFQAIAIHRIAHFFWTRQVPIIPRMMSEIVHGRTGIDIHPGAQIDESFFIDHGTGVVIGETTVIGKNVKLYQGVTLGALSVKKEESNRKRHPTIEDDVTIYANATILGGETIIGSGSIIGGSVWITHSVPPGSRVSQ

SEQ ID NO: 51071 - DNA, 393 bp, Unknown
  Obtained from environmental sample
  misc_feature (1)..(393): n is a, c, g, or t
atgtttaatttaaaagtatgtccgcgtttcggcgacatagacgcccttggacatgttaacaatacggtgcttcctatctggtttgaaatggcgagaaaacccattatgcaaatcttcgacccggaattaacgcttgaaaatttcccgcttatcatggcgcataatgattttgattataaaagtcctattttttttaagtacgatgttgaaattaaaacatggatttcaaaaataggaactaagtcatttacagtttatcacgaagcgtggcaagaggggcatctttgcacaaaaggaaactgtgtaatagtttacattataaacgggcaaacaactccccttcctgatgacaaaaggaaaattttatcggaacatatactaaataccgaatag

SEQ ID NO: 51072 - protein, 130 aa, Unknown
  Obtained from environmental sample
  DOMAIN (16)...(98): Thioesterase superfamily
  misc_feature (1)..(130): Xaa is any amino acid
MFNLKVCPRFGDIDALGHVNNTVLPIWFEMARKPIMQIFDPELTLENFPLIMAHNDFDYKSPIFFKYDVEIKTWISKIGTKSFTVYHEAWQEGHLCTKGNCVIVYIINGQTTPLPDDKRKILSEHILNTE

SEQ ID NO: 51073 - DNA, 537 bp, Unknown
  Obtained from environmental sample
  misc_feature (1)..(537): n is a, c, g, or t
gtgcgttctaaacttggccgcgatcttggcctttactctccggacaattttgaatttgtgtggatagttgattttcccatgtttgaatatgacgaagaaaacaaaaaatgggaggcggcgcaccatttgtttacatggccgcaggataaataccactcgacaatggaaagtgatccgggttcggtaaagggcgacctttacgatcttgttctgaacggttatgaacttgcgtccggttccatccgtattcacgacccggaaatgcaaaagcgggtattcaaaatagtggatattgatcccgctcaggcggaaaaaaagttcggctttttaacggaagcgtttaagtacggagctccgccccacggcggaatcgcccccggccttgaccgcttggtgatgatcatggcaggtctgtcctcgctaaaggatgtaatagctttcccgaaaaactctttcgccgtaagcccgatggacgattgtccctcagatgtagatcaaaaacagcttgaagaattgcatcttattgtaaagaaataa

SEQ ID NO: 51074 - protein, 178 aa, Unknown
  Obtained from environmental sample
  DOMAIN (1)...(152): tRNA synthetases class II (D, K and N)
  misc_feature (1)..(178): Xaa is any amino acid
MRSKLGRDLGLYSPDNFEFVWIVDFPMFEYDEENKKWEAAHHLFTWPQDKYHSTMESDPGSVKGDLYDLVLNGYELASGSIRIHDPEMQKRVFKIVDIDPAQAEKKFGFLTEAFKYGAPPHGGIAPGLDRLVMIMAGLSSLKDVIAFPKNSFAVSPMDDCPSDVDQKQLEELHLIVKK

SEQ ID NO: 51075 - DNA, 2034 bp, Unknown
  Obtained from environmental sample
  misc_feature (1)..(2034): n is a, c, g, or t
atgctggtaagagaagccatcgcgaaactgggttgctaccataacgtgtcgctggtcttcgttttcgccttagattatgaggctaaaaacacgcgtctggcctatcactggtgcgccgacgaggcgccgccgcggacggccatatccaacctattcgagtatctaataaccctcttccccgaacacctgccggagagcgaccataaaccgatagtcgtttgcgacgacaccgccaagaatctcgagcccgtctttcaggcgctctactccatagacgtcatggcggtcatcggcgcgccgctctacgtggacggccgcctatggggggtggtctgcgtggaacagaactccgtgccccgccactggaccgaacgggaaaaagagttcgtctccgtaaccacaagcaccatagccggcgtaatcatgcgcgacatctacaccataaaactcaaggaggctctgcataaggcgaccgaggcgagcaaggcgaagggcgagttcctctccaacatgagccacgagatgcgcacccccctaaacgcgataaccggcatgacggcaataggcaaaaacgcgaaagacatggaccgcaaagactacgccctcggcaaaatacaagacgcctcaacccacctcctcggcctgatcaacgacatactcgatatgtcgaaaatcgaggcgaacatgcttaaattgtccgccgtcgagttcagtttcgaaaaagtcctcaaaagagtggtcgaaatggtcaacttccggattgacgaaaaacatcagaaattcacagtgcgcatcgacaaagctatccccggcaccttgttcggggacgaccagcggctggttcaggttatcatcaacctgctggggaacgccatcaaattcacccccgaaaacggctccatctcccttgacacgcgcttcttgggcgaagacggcggcatctgcaccatagaaatctcggtaagcgacaccggcatcggcataagccccgaacagcagaaacacctgttccagtctttccagcaggccgacggcagcactgtccgcaaattcgggggcacggggctcggcctcgccatatccaaaaatatcgtggagatgatgggcggcaaaatttggatcgagtcggagataggcaagggatcaaccttcatctttaccgttaggatgaaacgcgggacggagaaaaaacgcgctttgggggctccgggcgtaaatttcagcaacatacgtattttagccgtggacgacgaccacgatattctggaatatttcgaagaaacggcgatctcactaggcctgcactgcgatacagcaacgagcggcgacgaggcgctgtcccttatagaacaacgcggcgcctaccatgtctgctttgtggactggaagatgccgggcatggacggcatacagctggcccacgaacttaaaacccgcaaggcctccgtaaactcctttgtcatcatgatctccgccgccgagtggagcgtcatcgaggaagacgcgaaaaaagccggcgtcgacaggttcatgtcaaaaccgctcttccaatccaccataaccgaaatcatacacgaatatatcggaaccgacggaaagcccccggaaacaaaaagcgcggaagaggcgcaaaccccctctaataacttcgcgggacggtgcgtcctgctggccgaagacgtggagatcaaccgcgaaatcgtgctggccctgctcgaacccacggagcttaatatcgactgcgcggaaagcggcgcggaagccgtccgcttgtttacccaatcgccggataaatacgacctcatcttcatggacgtgcaaatgcccggcatggacggctatgaggcgacgcggctaataagggcgatggacgttccacgcgccaaaaccgtcccaatcgtggccatgaccgccaacgtattccaagaagacatcgaaaaatgtttgcaagcgggtatgaacaaccacatcgggaaaccgcttgatttagacgaggtcttggacaaactgcggaagtacttgggggagaaataa

SEQ ID NO: 51076 - protein, 677 aa, Unknown
  Obtained from environmental sample
  DOMAIN (30)...(141): GAF domain
  misc_feature (1)..(677): Xaa is any amino acid
MLVREAIAKLGCYHNVSLVFVFALDYEAKNTRLAYHWCADEAPPRTAISNLFEYLITLFPEHLPESDHKPIVVCDDTAKNLEPVFQALYSIDVMAVIGAPLYVDGRLWGVVCVEQNSVPRHWTEREKEFVSVTTSTIAGVIMRDIYTIKLKEALHKATEASKAKGEFLSNMSHEMRTPLNAITGMTAIGKNAKDMDRKDYALGKIQDASTHLLGLINDILDMSKIEANMLKLSAVEFSFEKVLKRVVEMVNFRIDEKHQKFTVRIDKAIPGTLFGDDQRLVQVIINLLGNAIKFTPENGSISLDTRFLGEDGGICTIEISVSDTGIGISPEQQKHLFQSFQQADGSTVRKFGGTGLGLAISKNIVEMMGGKIWIESEIGKGSTFIFTVRMKRGTEKKRALGAPGVNFSNIRILAVDDDHDILEYFEETAISLGLHCDTATSGDEALSLIEQRGAYHVCFVDWKMPGMDGIQLAHELKTRKASVNSFVIMISAAEWSVIEEDAKKAGVDRFMSKPLFQSTITEIIHEYIGTDGKPPETKSAEEAQTPSNNFAGRCVLLAEDVEINREIVLALLEPTELNIDCAESGAEAVRLFTQSPDKYDLIFMDVQMPGMDGYEATRLIRAMDVPRAKTVPIVAMTANVFQEDIEKCLQAGMNNHIGKPLDLDEVLDKLRKYLGEK

SEQ ID NO: 51077 - DNA, 1200 bp, Unknown
  Obtained from environmental sample
  misc_feature (1)..(1200): n is a, c, g, or t
atgcaatacggtcattttgacgatgaagcgcgggaatatgtcatcacccgcccggataccccgtatccgtggatcaattatcttggcagtgaggatttttacggccttttctctaacacgtccgggggctattgcttttaccgggacgcgcgtttactgcgtttaacccgttaccgctacaacaacgtgcctaccgacgcgggcgggcgttatttttaccttcgggacggcggcgatatatggacgccttcctggatgccgatgaaatccgttctggaccgctacgaatgtcgtcacggatggggctattcgcgcatttcttccgcacgaaacggccttgctttttctcaaacctcgtttgtgcctctgaaagataattgtgaaattcacaaaatcgtgttgacaaacgaatccggtgcggacaaggatgtggatgttttctcttttatcgaattttgcttgtggaacgccaatgacgacatgacgaatttccagcgcaactttagcataggcgaggttgaggtagaagcaggtggagcacgtatctaccataaaacagagtaccgcgagcgcagaaaccattacgcgctatgggctgtcaatgtccctgtcgctggtttcgataccgaccgtcaaactttcctgggcctttacaacggctttgatcatcctgagaccgtatttgccggaaaagcgaataactccgttgcttccggctgggcaccgattggctcgcaccatatcaaggcgcaccttaagcccggcgaatcgaaggcgctggtgttcgtgctgggttattgcgagaacccggatgatcaaaagtggaagaagcccggcgttatcaacaaagcaccggctaacgctttgcttgaaaaatacggctcgccggaagtggcggacaaggcacttgccgcgttaaaagaatattgggacgcgcttttgggccgcttcagcgtggaagccgaagacaagcgcatggcgcgcatggcgggagtgtggaaccagtaccagtgcatggttacctttaatatgtcgcgtagcgcgtcttattttgaatccggcatagggcgcggcatgggtttccgcgattcaaatcaggatcttttgggctttgtgcatcttgtgccggaacgcgcccgcgcccgtattctggacatcgccgcaacgcagtttcccgacggcagcgcaaccccgcgataa

SEQ ID NO: 51078 - protein, 399 aa, Unknown
  Obtained from environmental sample
  DOMAIN (1)...(64): Putative carbohydrate binding domain
  misc_feature (1)..(399): Xaa is any amino acid
MQYGHFDDEAREYVITRPDTPYPWINYLGSEDFYGLFSNTSGGYCFYRDARLLRLTRYRYNNVPTDAGGRYFYLRDGGDIWTPSWMPMKSVLDRYECRHGWGYSRISSARNGLAFSQTSFVPLKDNCEIHKIVLTNESGADKDVDVFSFIEFCLWNANDDMTNFQRNFSIGEVEVEAGGARIYHKTEYRERRNHYALWAVNVPVAGFDTDRQTFLGLYNGFDHPETVFAGKANNSVASGWAPIGSHHIKAHLKPGESKALVFVLGYCENPDDQKWKKPGVINKAPANALLEKYGSPEVADKALAALKEYWDALLGRFSVEAEDKRMARMAGVWNQYQCMVTFNMSRSASYFESGIGRGMGFRDSNQDLLGFVHLVPERARARILDIAATQFPDGSATPR

SEQ ID NO: 51079 - DNA, 609 bp, Unknown
  Obtained from environmental sample
  misc_feature (1)..(609): n is a, c, g, or t
atggtcagattggccgagattcttgttgttctggcgctgtgcggcgttttttcctcctgcgcgagccagccgccgcagactgtgccggaaaaaccggaaccgtccgagtatatcatgggaaaagggaatatcgcgggggaacaactggcgcttttccttgaacggaacaatccgcaagcggatcggggttttgcgcgatcattggcgggttattatattgaggaggcggcggcggaaggggtaaaccacgacacggcttttgcccagatgtgcctggaaaccggctatttgcgctacggagggcttgttaagccggaaatgaacaatttctgcggacttggcgctattggcccgcagcagcccggggaatcgtttcccgatccgcgtaccggcgtgcgcgcccatatccagcatttaaaggcttacgccaccgaggaaccgctgaaccggccattggtggacccccgctacaaatgggtccgcaaaggctccagccccagcatcaacggcctttcaggaacatgggccgcggataaagcctacagcggcaagattgcatccatattgcagaggctctacgatttctcctatggtgaaaaaatgctatga

SEQ ID NO: 51080 - protein, 202 aa, Unknown
  Obtained from environmental sample
  SIGNAL (1)...(21)
  misc_feature (1)..(202): Xaa is any amino acid
MVRLAEILVVLALCGVFSSCASQPPQTVPEKPEPSEYIMGKGNIAGEQLALFLERNNPQADRGFARSLAGYYIEEAAAEGVNHDTAFAQMCLETGYLRYGGLVKPEMNNFCGLGAIGPQQPGESFPDPRTGVRAHIQHLKAYATEEPLNRPLVDPRYKWVRKGSSPSINGLSGTWAADKAYSGKIASILQRLYDFSYGEKML

SEQ ID NO: 51081 - DNA, 351 bp, Unknown
  Obtained from environmental sample
  misc_feature (1)..(351): n is a, c, g, or t
gtggaagaggcaaaaggcagcgaacatgattttaaggtgtacaaaaacacgataggggaatcggtgagcgaatccattccgcttgatgccgaccttggataccaagggatagaaaagtatcatgcaaacagttctattccaataaagtcaagcaagaatcatcagttgacgaagaaggaaaaagcgtataacaagcggcttgcgcgtcgacgtgtggtgattgaacatatcaatgggatgataaaagtattcagatgtatgtcatatccataccggagcccctgctgcaatcggcatttgttaaggacgaaattaatttgtggttttataaactatgatcgacttgcttaa

SEQ ID NO: 51082 - protein, 116 aa, Unknown
  Obtained from environmental sample
  misc_feature (1)..(116): Xaa is any amino acid
MEEAKGSEHDFKVYKNTIGESVSESIPLDADLGYQGIEKYHANSSIPIKSSKNHQLTKKEKAYNKRLARRRVVIEHINGMIKVFRCMSYPYRSPCCNRHLLRTKLICGFINYDRLA

SEQ ID NO: 51083 - DNA, 378 bp, Unknown
  Obtained from environmental sample
  misc_feature (1)..(378): n is a, c, g, or t
atgtttaataatcattttgtagataattcttcaaacattatattacttggcttaagcgatgacggtggtttcattgttaaatttcctgcaagcgcggcaactgccgctaccgctaaaccatcaggctggccaaaaataattaatggaaataaagcagcttttgtgggtgggttagctattagtgataattcaggatatatacttgttggtgaaaaacaaggtacaaatggcggaacagatgtatgggtagtaaaaacagacacaaatgcggttatgttctgggaaaagttttttggcggtacaggtgatgaatgggggcaggcagttattgaacaacagacggtttcattattgccggtgcaacccgttcaccggtaa

SEQ ID NO: 51084 - protein, 125 aa, Unknown
  Obtained from environmental sample
  misc_feature (1)..(125): Xaa is any amino acid
MFNNHFVDNSSNIILLGLSDDGGFIVKFPASAATAATAKPSGWPKIINGNKAAFVGGLAISDNSGYILVGEKQGTNGGTDVWVVKTDTNAVMFWEKFFGGTGDEWGQAVIEQQTVSLLPVQPVHR

SEQ ID NO: 51085 - DNA, 396 bp, Unknown
  Obtained from environmental sample
  misc_feature (1)..(396): n is a, c, g, or t
atggtgtattatctctgtatggatttggaatggaaggtaatctattattctgagcaggatggttcaaagcctgtagagaagtatattgataaccttaccactagagagcaggcaaaaacattggcttttatcggattattggaagaaaacggaccaaatttgcctcgtccttatgctgacattttggatgatgggatacacgaactgaggattaagttaagcggaacacaggttaggatactttattttttctgttatcaaaatattataattttaataaatgtttttgataaacatacagataaagtaccaaaagagcaaattaaattagcaaaaagaaatcgtgatgattttttattgaggttttcagagcaggatattaggaggttattatga

SEQ ID NO: 51086 - protein, 131 aa, Unknown
  Obtained from environmental sample
  DOMAIN (63)...(118): Phage derived protein Gp49-like (DUF891)
  misc_feature (1)..(131): Xaa is any amino acid
MVYYLCMDLEWKVIYYSEQDGSKPVEKYIDNLTTREQAKTLAFIGLLEENGPNLPRPYADILDDGIHELRIKLSGTQVRILYFFCYQNIIILINVFDKHTDKVPKEQIKLAKRNRDDFLLRFSEQDIRRLL

SEQ ID NO: 51087 - DNA, 816 bp, Unknown
  Obtained from environmental sample
  misc_feature (1)..(816): n is a, c, g, or t
atgccggaaacccacgttcttcgctgggtaaaagacggaaaatccctgcaggaagaagccattaaacttggctatagcgcggatgtatcgtacggcgacgcggatcaggctacacaaaacaagcagattcaaggcttccttacaaagaatcccaaagcgctggtagtcggctgtatcaatgacggcgttagctcggtaatcgccgaagcgggacgcgacaaagtagtggttatcgcttatgaccgcataatccctaattcagcggattatgaatactttattactttcaacaacttcaaagtcggcgttcttcaggctgaaagtattgtacagggcttgaatcttacgtccgctactgcaagcgcgcccaagtacatcaccctctttgccggttcaccgacagacggaaacgcgttcttcttctttgacggcgctatgagcgttcttaattcctacatcgacaaaggcgtactcaaagtaatcggaccctatcccaaaacatcagcggacagggaaaattttcagagaatcgcgacagaaaactggcaggctcccattgcgaaacagcgcatggaaaaccttctcggcaacgacgcgcgcagcgtaacgctcgacgcggtactcgcccccaatgacacactcggccgcgccattatcgaagcttgtaaaggcgacgccaaataccgcggcaaactgcccgtagtaagcggacaggacgcggaatttgaatccgctatgtcgattaaaacggcgaacagtacagcaccgttttcaagacacagcccagctcgcggaagccgcaatccttttggctga

SEQ ID NO: 51088 - protein, 271 aa, Unknown
  Obtained from environmental sample
  misc_feature (1)..(271): Xaa is any amino acid
MPETHVLRWVKDGKSLQEEAIKLGYSADVSYGDADQATQNKQIQGFLTKNPKALVVGCINDGVSSVIAEAGRDKVVVIAYDRIIPNSADYEYFITFNNFKVGVLQAESIVQGLNLTSATASAPKYITLFAGSPTDGNAFFFFDGAMSVLNSYIDKGVLKVIGPYPKTSADRENFQRIATENWQAPIAKQRMENLLGNDARSVTLDAVLAPNDTLGRAIIEACKGDAKYRGKLPVVSGQDAEFESAMSIKTANSTAPFSRHSPARGSRNPFG

SEQ ID NO: 51089 - DNA, 1212 bp, Unknown
  Obtained from environmental sample
  misc_feature (1)..(1212): n is a, c, g, or t
gtgctgcagaccttgaaccgcgttttttgcaaagaatgcgttgagcatgagttggacgaaaccacgcaatatattcccattcccgatggcattttggaattttacaaagcctatcgcccttcgcctcttatcagagcttattttttggaaaaagcattgggaacgcctgcggagatttactacaaacacgaaggcacaaataccagcggttcgcataaattgaactccgctgccgcacaagcattctacgccaagcaagagggtttaacgagcttgacaacggaaaccggagcggggcagtgggggagcgcgatgtctatggcgtgcgcattttatggcttggatttaaccgtttatatggtgaaagtatcggcagaacaaaaaccctaccgcaaagcccttatggaaacttatggggcggagttaatcccatcgccctcaaacacaacaaatgctggcaggaaaattttggaaaaagacccaaataccggagggtctcttggctgcgcgattagcgaggctattgaaaaggcagtaggcactccaaaatgccgatatgttttggggagcgttctgaaccacgttcttttgcatcagagcataatagggctggaatgtaaaacggcttttgacaaatacggtgttaaaccggatatgataataggctgtgctggcggcggttccaacatcggcggcttgatagctccttttatgggcgataaattacagggcaagagcgatgtgaaaataatagccgttgaacctgcgagctgcccctcgtttacgcgtggaaaattcgcttacgattttggcgacaccattcaaagcacgccgttgatgaaaatgtacacgcttggcaacggttatattccagcttcaaaccacgctggcgggcttcgctatcacggtatgaattccacgctttcgcagctttaccacgataaattcatagaagctcgctcagttgttcaaaccgaggtttttgatgcagccgtgaagtttgcgaaaattgagggtatattgcctgcaccggaatcttcccacgccattaaggttgcaatagacgaggctttggagtgcaagcgtactggcgaaaaaaaggttattctatttgggctaacgggtactggctattttgatatgagtgcttatatgcaatacaatgcaaaaaaaatgagcgaccacgtccctaccgatctcggccgaatctga

SEQ ID NO: 51090 - protein, 403 aa, Unknown
  Obtained from environmental sample
  DOMAIN (34)...(376): Pyridoxal-phosphate dependent enzyme
  misc_feature (1)..(403): Xaa is any amino acid
MLQTLNRVFCKECVEHELDETTQYIPIPDGILEFYKAYRPSPLIRAYFLEKALGTPAEIYYKHEGTNTSGSHKLNSAAAQAFYAKQEGLTSLTTETGAGQWGSAMSMACAFYGLDLTVYMVKVSAEQKPYRKALMETYGAELIPSPSNTTNAGRKILEKDPNTGGSLGCAISEAIEKAVGTPKCRYVLGSVLNHVLLHQSIIGLECKTAFDKYGVKPDMIIGCAGGGSNIGGLIAPFMGDKLQGKSDVKIIAVEPASCPSFTRGKFAYDFGDTIQSTPLMKMYTLGNGYIPASNHAGGLRYHGMNSTLSQLYHDKFIEARSVVQTEVFDAAVKFAKIEGILPAPESSHAIKVAIDEALECKRTGEKKVILFGLTGTGYFDMSAYMQYNAKKMSDHVPTDLGRI

SEQ ID NO: 51091 - DNA, 549 bp, Unknown
  Obtained from environmental sample
  misc_feature (1)..(549): n is a, c, g, or t
atggaagcttttgtattctttgtaaataaaaataatgccataaataatttaactataaaaaatattcaggatatttattccggtaaagttacaaattggaaagaattaaatggcgccaatcagataataagggtttttcagaggcctgaaaattcagggagccagacgatgctggaaaaagtaatgggcgaaatccccattattaagcctcgcagggaaaatgtttccagcggtatgggcgagataattaatcaagttgctgtttatagaaatttttcaaacgcgataggttattcatttttgttttattcaaccgaaatggttaaaaacgaacaaatcaagttattgtctattgaaggtatttatccttcaagggaaacaattcaggatggaagctatccgttttctgacagtttttacgctatttacaacgacactgacgataaaaatcgcaatattgaattatttatcgaatggatgctgtcaagccaggggcaggaattaattacaaagactggttacataccaattaaaatagtacagtattag

SEQ ID NO: 51092 - protein, 182 aa, Unknown
  Obtained from environmental sample
  misc_feature (1)..(182): Xaa is any amino acid
MEAFVFFVNKNNAINNLTIKNIQDIYSGKVTNWKELNGANQIIRVFQRPENSGSQTMLEKVMGEIPIIKPRRENVSSGMGEIINQVAVYRNFSNAIGYSFLFYSTEMVKNEQIKLLSIEGIYPSRETIQDGSYPFSDSFYAIYNDTDDKNRNIELFIEWMLSSQGQELITKTGYIPIKIVQY

SEQ ID NO: 51093 - DNA, 615 bp, Unknown
  Obtained from environmental sample
  misc_feature (1)..(615): n is a, c, g, or t
gtggccgaattacaggattttgatattatctgccggaacagaagcaccatgaatcacgcaatggatctgcgaaccgtcaaagacgcggaagagattgcgattatccgcaaagcggcagtttttacaaataaaattatcgatcttttggaaaaaaaagtgagatccggaaaaatcaaaaccgaatctgatgccgttatgctgattgagcttgagtccagaaagctgggctgcgatggcgcggcttttgagattcttgctgcggggcaggacaggagttttggcatacacgcattccctgcatggacagacgccccttttggcgggaaaggtctgtccatcctggatttcggcgtgcggtattgcggttataacaccgatgttactatgacctttgtgagggagccaagcccgcagcagctaanaatggtaaacatggtagagaaagcatacaaggctgcggttgattcaattacagacgggtacgatacaatggccactgccattcgtgttgatgagcttttggcaaaatcgagaaaacgcatggtacacggattgngacatggtatcgggctggatgtgcatgagtgcccctttctcagaagccgcatgaagtaa

SEQ ID NO: 51094 - protein, 204 aa, Unknown
  Obtained from environmental sample
  DOMAIN (33)...(204): metallopeptidase family M24
  misc_feature (1)..(204): Xaa is any amino acid
MAELQDFDIICRNRSTMNHAMDLRTVKDAEEIAIIRKAAVFTNKIIDLLEKKVRSGKIKTESDAVMLIELESRKLGCDGAAFEILAAGQDRSFGIHAFPAWTDAPFGGKGLSILDFGVRYCGYNTDVTMTFVREPSPQQLXMVNMVEKAYKAAVDSITDGYDTMATAIRVDELLAKSRKRMVHGLXHGIGLDVHECPFLRSRMK

SEQ ID NO: 51095 - DNA, 414 bp, Unknown
  Obtained from environmental sample
  misc_feature (1)..(414): n is a, c, g, or t
atgtggattatatttgcgttattatcggcgctttttgcggccctaacttctatcctggcgaagattggcattcaaaatataaattctaatttggcaactgcaatcaggactgttgtcgttctcgttatgtcctgggttattgtttttattaccgggaaacacaatgaaatcggaaatatcggaaataaaaatttactttttttgattttatccggaatagcgacagggttatcatggctttgttattacagagctttacaaatcggcgaagcgtcaaaagtaatacccatagacaaattcagtttggtaataggcatggtaatggcgtttattattttaaaagaagcaataacagtaaagacaattatcggcggcgtttttattaccattggaacctttgttttgatattttaa

SEQ ID NO: 51096 - protein, 137 aa, Unknown
  Obtained from environmental sample
  SIGNAL (1)...(20)
  DOMAIN (11)...(137): Integral membrane protein DUF6
  misc_feature (1)..(137): Xaa is any amino acid
MWIIFALLSALFAALTSILAKIGIQNINSNLATAIRTVVVLVMSWVIVFITGKHNEIGNIGNKNLLFLILSGIATGLSWLCYYRALQIGEASKVIPIDKFSLVIGMVMAFIILKEAITVKTIIGGVFITIGTFVLIF

SEQ ID NO: 51097 - DNA, 996 bp, Unknown
  Obtained from environmental sample
  misc_feature (1)..(996): n is a, c, g, or t
gtgaacaaacgcgcccttagggcggacgttctgttactgctcactgccggaatctggggctttggttttgtcgcccagcgttccggcatggagtatgtagggccattcgcttttaacggaattcgctttattttaggaagcctttccctgttgccattaatcttcttcctgaacagacacagccagaaagtatccggcacaaatcccatctcttataaaaaattttttatatattcactttacgccggtacatgcctgtttatcgccgttatcctgcagcagattggcattatgttcacgacggcgggcaatgccggatttatcaccagcctctacgtggtgcttacccccatattcggcattttcatcggcagaaaaaccggcccggcgacatggttaggctcggtgttcacccttgccggcctttacttcatctgcgccattggcaaacaaggatcgcttaacccgggcgacattatcgttttggtaagcgcggttttctgggcctgccacgttctgctgatagaccgccttgtacaaaacattgacccaatagcgctatcctcagggcaattcgccgtatgcggcatcctcatgcttataggaacatttctggtagaaccctttattacgcctattgttgaaaggctcaaccccgcgctgctggaaaccgggactttttcgtggctgcctctgatgactctggtcagcggcatatcagcacaaacaatcgccttccctgttgacgcgataatcccgattctgtacggagggctgggttccgtgggcatagcctacaccctgcaggcagtagcgcaaagagacgcgccgcccgcccacgcgacaatcatcctctgttttgaaggctgctttgccgccattggcggcgcactgctgctctcggaaagagtcggcctctggacgcttttaggctttttccttatgcttgcgggaatgttgataacgcagtgggaagttatcgccaaaaaacaatga

SEQ ID NO: 51098 - protein, 331 aa, Unknown
  Obtained from environmental sample
  SIGNAL (1)...(25)
  DOMAIN (166)...(324): Integral membrane protein DUF6
  misc_feature (1)..(331): Xaa is any amino acid
MNKRALRADVLLLLTAGIWGFGFVAQRSGMEYVGPFAFNGIRFILGSLSLLPLIFFLNRHSQKVSGTNPISYKKFFIYSLYAGTCLFIAVILQQIGIMFTTAGNAGFITSLYVVLTPIFGIFIGRKTGPATWLGSVFTLAGLYFICAIGKQGSLNPGDIIVLVSAVFWACHVLLIDRLVQNIDPIALSSGQFAVCGILMLIGTFLVEPFITPIVERLNPALLETGTFSWLPLMTLVSGISAQTIAFPVDAIIPILYGGLGSVGIAYTLQAVAQRDAPPAHATIILCFEGCFAAIGGALLLSERVGLWTLLGFFLMLAGMLITQWEVIAKKQ

SEQ ID NO: 51099 - DNA, 708 bp, Unknown
  Obtained from environmental sample
  misc_feature (1)..(708): n is a, c, g, or t
ttgcggcgcatgaaggacgatggccagtacccgcatccctttggctctggggacgccgcgcctataatcggcaaacttggaaccggagtcgagcttaacgagctttatgtcagttttgagcagggcgcgcttaaggaaacccaaagcgattttgacatagcgctggacgggaagggctttcttgccgtcagtactccctggggcgagcgctataccagaaacggctcattccagcttggaaaagaaggctttcttgaaacaaaagaaggctaccccgttatgggcgagaacgggccaatccgtgtaaaagctaataattttcagatagataagttagggcagatttggataaatgccgaatatgacgacaacgatcccaatgtccttgtatcaagggaaggcaacagctggtccgaccccgtcttgttggatatcctcaaagtggttgattttgatattgacagatatttaaagaaacagggttccagtctttactatgaaactgaaatttccgggcctgccgtgatcatggaagaagaagacaggcccaaggtaatacagggctttgtggaagcggccaatgtggaacctgtccgcgaaatggtacagatgatcgaagtaaaccgcgcttacgaggcaaatcaaaaagttatacaaacccacgatactatgcttggcgttttgatcaatcaggtagccaaggtttaa

SEQ ID NO: 51100 - protein, 235 aa, Unknown
  Obtained from environmental sample
  DOMAIN (193)...(231): Domain of unknown function (DUF1078)
  misc_feature (1)..(235): Xaa is any amino acid
MRRMKDDGQYPHPFGSGDAAPIIGKLGTGVELNELYVSFEQGALKETQSDFDIALDGKGFLAVSTPWGERYTRNGSFQLGKEGFLETKEGYPVMGENGPIRVKANNFQIDKLGQIWINAEYDDNDPNVLVSREGNSWSDPVLLDILKVVDFDIDRYLKKQGSSLYYETEISGPAVIMEEEDRPKVIQGFVEAANVEPVREMVQMIEVNRAYEANQKVIQTHDTMLGVLINQVAKV

SEQ ID NO: 51101 - DNA, 789 bp, Unknown
  Obtained from environmental sample
  misc_feature (1)..(789): n is a, c, g, or t
atggtcagaagtttgtggaccggcgcttccggcatgataggccagcaggccaatattgatacgatttccaataacctggcgaacgtgaatacagccgggtacaaaaagatgcgggctgattttgaggatcttatctatcagaccgtaaaaaccgccgggactccggccaccgaagatacggttgtgccggtaggcattcagatgggacacggcgtaaagctcgccgatacccaacgggtgttcacccagggcgctcctcaaaataccgatgttgttacagatatggcaatcatgggggaaggctttttcagaatacagatgtacgacggctcctgggcatatacccggaacgggaattttgaggttgacagtaccggacggcttgttactcccaacggttattgggtactgccggatatcattatgcctgaaaattttttaccggaatccatcactgtttcccaggatggaagggtatcggtaaaagtaccgcagatagatgacgaacctatccaggtggggcagatcgagctgtaccgtttccccaaccctgtgggccttaccgccgtgggtgaaaacctcttcaagattaccaacgcttccggggatcccattcccggacggccgggctttgatggcatgggacagatacgccataaattccttgagatgtcaaacgtcgcggttgtgcgtgaaatggtcgaccttatcgtcgcccagcgcgcctacgagttcaattcccgtacaatacanaccagcgacacatgcttgggancggcancagtttaa

SEQ ID NO: 51102 - protein, 262 aa, Unknown
  Obtained from environmental sample
  DOMAIN (225)...(257): Domain of unknown function (DUF1078)
  misc_feature (1)..(262): Xaa is any amino acid
MVRSLWTGASGMIGQQANIDTISNNLANVNTAGYKKMRADFEDLIYQTVKTAGTPATEDTVVPVGIQMGHGVKLADTQRVFTQGAPQNTDVVTDMAIMGEGFFRIQMYDGSWAYTRNGNFEVDSTGRLVTPNGYWVLPDIIMPENFLPESITVSQDGRVSVKVPQIDDEPIQVGQIELYRFPNPVGLTAVGENLFKITNASGDPIPGRPGFDGMGQIRHKFLEMSNVAVVREMVDLIVAQRAYEFNSRTIXTSDTCLGXAXV

SEQ ID NO: 51103 - DNA, 735 bp, Unknown
  Obtained from environmental sample
  misc_feature (1)..(735): n is a, c, g, or t
atgacgaacctatccaggtggggcagatcgagctgtaccgtttccccaaccctgtgggccttaccgccgtgggtgaaaacctcttcaagattaccaacgcttccggggatcccattcccggacggccgggctttgatggcatgggacagatacgccataaattccttgagatgtcaaacgtcgcggttgtgcgtgaaatggtcgaccttatcgtcgcccagcgcgcctacgagttcaattcccgtacaatacanaccagcgacacatgcttgggancggcancagtttaaagaggtactggggagtagagatagggaggcagtatgggatattagcgctttaggtgttcagtacgtaaatcaggaatatattccctnttcgtcctctcagcctacaacaagcgttggttccgatgaatccagtggatttgaaaaacttttaaaaaaggcgcaagagaaggattcttcaactaccagttttccctccgcaaaaaaaactcctatcgacaaaaccgacaagctctacgaagcctgcatggagcttgaaacctttttaatcaaaaacctgataaagagcatgaggtctacggttcaaaaaaacggccttattgatacgggctttgccggggaagtctacgaggatatgctctacgacgagtacgctaaagcctttgcgcaaaacgcgaattttggttttgcggagatggcgtatagagagttggcagggatgcggtaa

SEQ ID NO: 51104 - protein, 244 aa, Unknown
  Obtained from environmental sample
  misc_feature (1)..(244): Xaa is any amino acid
MTNLSRWGRSSCTVSPTLWALPPWVKTSSRLPTLPGIPFPDGRALMAWDRYAINSLRCQTSRLCVKWSTLSSPSAPTSSIPVQYXPATHAWXRXQFKEVLGSRDREAVWDISALGVQYVNQEYIPXSSSQPTTSVGSDESSGFEKLLKKAQEKDSSTTSFPSAKKTPIDKTDKLYEACMELETFLIKNLIKSMRSTVQKNGLIDTGFAGEVYEDMLYDEYAKAFAQNANFGFAEMAYRELAGMR

SEQ ID NO: 51105 - DNA, 633 bp, Unknown
  Obtained from environmental sample
  misc_feature (1)..(633): n is a, c, g, or t
atgagcattgaacggcgcaaactgctcaaagcgctgggggccgagctggagcttaccgaaggggccaagggcatgaaaggggcaattgccaaggcggaagaacttgcggcggcgacacccaattcgttcattccccagcagttcaacaatccggctaatccggctattcacgaaaaaaccaccggcccggagatctggaatgataccgaagggaagattgatattctgattgacggagtgggaacaggcggaactttggccggtgccggaaggtttctaaaatcgaaaaaacctggtataaagataatagccgtggagcctgccgcctcaccggtgctttcgggcggacagccggggccgcataaaattcagggtataggagcgggctttcagccacaggtatatgatcctgccatcattgacgagatttaccagaccgatgaggtgaaagccggaactgtcgcgcggcggcttgcgaaagaagaaggcattattgtgggtatttcatctggttctgttcttgaagcggcactgactgtctcaaaacgtcccgaaaacaacggcaagaccatagtagccatattgccggataccggcgagcgttatctctcaacatggctgtgggaggagtga

SEQ ID NO: 51106 - protein, 210 aa, Unknown
  Obtained from environmental sample
  DOMAIN (1)...(198): Pyridoxal-phosphate dependent enzyme
  misc_feature (1)..(210): Xaa is any amino acid
MSIERRKLLKALGAELELTEGAKGMKGAIAKAEELAAATPNSFIPQQFNNPANPAIHEKTTGPEIWNDTEGKIDILIDGVGTGGTLAGAGRFLKSKKPGIKIIAVEPAASPVLSGGQPGPHKIQGIGAGFQPQVYDPAIIDEIYQTDEVKAGTVARRLAKEEGIIVGISSGSVLEAALTVSKRPENNGKTIVAILPDTGERYLSTWLWEE

SEQ ID NO: 51107 - DNA, 933 bp, Unknown
  Obtained from environmental sample
  misc_feature (1)..(933): n is a, c, g, or t
atggagattgaaaatgagatagaacgagttgccgccgaattgctcaagggttttcagaagaagcgcgatatagcaaaacagccggtaaaaacggtaataatcgatattatcggcaaattacagcaccttttgtttcccggaatttttgaaagcgttttatctggcggttcggcaaaaaacagactcaacgtcatgctagaggaagtttccaatgatctggcggcgcagacaagattggctctgcgttatgacctgcggtacaaagacacggatcaggacgaaattgacaaaatggcgtgggaaataatgcggcaatttatcttcaagattccgactatcaaagattttcttgaaaaagatattgaagcggcgtatagcggagaccccgcagcgtacagcaaggcggaaatcgtcatctcgtatcccggtatttacgccataatggtttaccggatagcgcatgaattgtatttattgtccgtacctctcattcccagaattatgagcgaatatgcgcacagcgttacaggtattgacattcatccgggcgcggtaataggcaaatatttttttattgaccacggcacgggtattgtaataggggagactacaataatcggggacaatgtaaaattatatcagggagtgacgttgggagccttgtccacaaagggagggcagagtattaaaggcgttaagcgtcatcctagtataagcgataatgttacgatatactcaggcgctaccattttgggaggagataccataatcggcgagggcgtggtgatcggcggcaatgcctttgtgatacggtctgttcccgagaaaacccgcgttagcgtaaaaaatcccgagctgcagtttaagagcagcggtaatatctcctcacacatagaacttgaccagcttgatttctggcattacgagatttaa

SEQ ID NO: 51108 - protein, 310 aa, Unknown
  Obtained from environmental sample
  misc_feature (1)..(310): Xaa is any amino acid
MEIENEIERVAAELLKGFQKKRDIAKQPVKTVIIDIIGKLQHLLFPGIFESVLSGGSAKNRLNVMLEEVSNDLAAQTRLALRYDLRYKDTDQDEIDKMAWEIMRQFIFKIPTIKDFLEKDIEAAYSGDPAAYSKAEIVISYPGIYAIMVYRIAHELYLLSVPLIPRIMSEYAHSVTGIDIHPGAVIGKYFFIDHGTGIVIGETTIIGDNVKLYQGVTLGALSTKGGQSIKGVKRHPSISDNVTIYSGATILGGDTIIGEGVVIGGNAFVIRSVPEKTRVSVKNPELQFKSSGNISSHIELDQLDFWHYEI

SEQ ID NO: 51109 - DNA, 1365 bp, Unknown
  Obtained from environmental sample
  misc_feature (1)..(1365): n is a, c, g, or t
ttgagtaacagtttcggcatcacgggcactacggctgcaggaaaccacaccttaacggtgacaggagatttgacgaatggcaactatacactatcggcacgaaacaacggtacgtggacagtcaataagaaaggtgtcacggtaacggcagtcagcggtagttctacttacggagatacgccgagcaatccgggactatctgctacagggttagccaacaatgaagcggtaactgtactgacaggattgagtaacagtttcaacatcactgccactacggctgcaggagaccataccttaacggtgacaggagatttgacgaatggcaactatacactatcggcacgaaacaacggtacatggacagtcaataagaaaggtgtcacggtaacggcagtcagcggtagttctatttacggagacacgccgaccaatccgggactatctgccacagggttagtcaacaatgaaacggtcagcgtattaacgggattgagtaatagtttcggcattaccgccactacacctgcaggagaccacaccttaacagttgcaggagatttgacgaatggcaactatacagtatcggcacgaaacaacggtacgtggacagtcaataagaaaggtgtcacggtaacggcagtcagcagtagttctacttacggagacacgccgaccaatccgggactatctgccacagggttagccaacaatgaaacggtcagcgtactgacgggattgagtaatagtttcggtattaccgccaccacacctgcaggaaaccacaccttaacggtggcaggagatttgacgaatggcaactacacggtgactagaattgacggcacatggataattctcggtatagtaacagtcaataacggcacgggcagcggcagttacgcactcggcgaaacggtcacgatcaccgccgatgctcctcccgcaggttacaagttcaaaacgtgggaaataacgccaagcgtcatcttcaccgacggcacaactgcggacagctcgacagcaaaattcaccatgtcagcctcctccgtgacagctacggctatctttgaacaagaagtcgggattgacccattacgaatgacgaattacgaattacgggtgtatccgaatccgacgcacggggagttgtacatttcgatatccgattgtccgacatgcgatatccgacatgcgatatctgacatcacgatttatgatatgttaggacgaatccaaaacatcggaaaaccagaaatcgataaatcggaaatcggaaaccaaacaatcgacatttctcatttaccgtcaggcgtttacttcttgcgggcagcaggacaaacggtgaaagtggtgaaggaataa

SEQ ID NO: 51110 - protein, 454 aa, Unknown
  Obtained from environmental sample
  misc_feature (1)..(454): Xaa is any amino acid
MSNSFGITGTTAAGNHTLTVTGDLTNGNYTLSARNNGTWTVNKKGVTVTAVSGSSTYGDTPSNPGLSATGLANNEAVTVLTGLSNSFNITATTAAGDHTLTVTGDLTNGNYTLSARNNGTWTVNKKGVTVTAVSGSSIYGDTPTNPGLSATGLVNNETVSVLTGLSNSFGITATTPAGDHTLTVAGDLTNGNYTVSARNNGTWTVNKKGVTVTAVSSSSTYGDTPTNPGLSATGLANNETVSVLTGLSNSFGITATTPAGNHTLTVAGDLTNGNYTVTRIDGTWIILGIVTVNNGTGSGSYALGETVTITADAPPAGYKFKTWEITPSVIFTDGTTADSSTAKFTMSASSVTATAIFEQEVGIDPLRMTNYELRVYPNPTHGELYISISDCPTCDIRHAISDITIYDMLGRIQNIGKPEIDKSEIGNQTIDISHLPSGVYFLRAAGQTVKVVKE

SEQ ID NO: 51111 - DNA, 1212 bp, Unknown
  Obtained from environmental sample
  misc_feature (1)..(1212): n is a, c, g, or t
atgagcccaaattataaaaggcgcgctctggacaagataaagttccccattggcgcaaagttagttatcattatttcgttcattgtaattgtttctcttggttccattaccgcgctggtttcatggctggttcaggcggatgttaaaataactgcggaagagaataattttgaaacaaaccgcaggtcggcggtagaagctgaaactttgctgacaaatacacgagctgattcaagagtattaattcaatctataagcgctttgggttcgcaaacagccgctgtaaaaggaatgacggattttttctggaaagagaatccgcagattgccgctgtttattttgttgttcccggcaagcaggaacggttattggttaacaggcagttttttgagtcgcgtcagattgacgagacgcttgtaccgtcattttttgacgcgcagaggtctgcgcttgggcgtgctgtccggggcgagaccgttcttaataacggcgcttctcatttttcaagagcagttttaggtttattttttccgtggcagggcggcggagtgggagcggttcttttttcgagtgaaagcttanacaacagttacggtcaaggtgtaaataaatcttatatgatcaataccgacggcgatattctttctcatgctgattttgacattataaaagacaatacaaatgtaaaaaatctgggttttatccgcgcaattattgacagtcacgaatatagcagacaacagcttatagaagcggattttggagttacgcagactatagccagtaacgtgaatctcggacttttagagtctgcgtggaaaaaaataagctccgccgtgaaatttaccattgatgaaacagtaacaatactggaaaaatacgatctcttaatcattaagaccaaagaaaagaaaatacgtcagtttgtagcgtataccaaattgaattccgcaaatgggattgtaattacaagtattgaatacaacaaagtctttgaaggaataaacgctactacaaggcggaatatttatctgacaatcgccgttttaagcatatctgttatttttatctggtttttctcaaaaacaatttccagacctataagagcgttagcctcagccgcaaggcagatagaatacggaaggtttgacgttgtcttgcattccaaagctaacgatgaacttggcgttttaacaaatgagcttcggtaa

SEQ ID NO: 51112 - protein, 403 aa, Unknown
  Obtained from environmental sample
  DOMAIN (342)...(403): HAMP domain
  misc_feature (1)..(403): Xaa is any amino acid
MSPNYKRRALDKIKFPIGAKLVIIISFIVIVSLGSITALVSWLVQADVKITAEENNFETNRRSAVEAETLLTNTRADSRVLIQSISALGSQTAAVKGMTDFFWKENPQIAAVYFVVPGKQERLLVNRQFFESRQIDETLVPSFFDAQRSALGRAVRGETVLNNGASHFSRAVLGLFFPWQGGGVGAVLFSSESLXNSYGQGVNKSYMINTDGDILSHADFDIIKDNTNVKNLGFIRAIIDSHEYSRQQLIEADFGVTQTIASNVNLGLLESAWKKISSAVKFTIDETVTILEKYDLLIIKTKEKKIRQFVAYTKLNSANGIVITSIEYNKVFEGINATTRRNIYLTIAVLSISVIFIWFFSKTISRPIRALASAARQIEYGRFDVVLHSKANDELGVLTNELR

SEQ ID NO: 51113 - DNA, 1119 bp, Unknown
  Obtained from environmental sample
  misc_feature (1)..(1119): n is a, c, g, or t
gtgaaagagaaaaataaaatttatcttattatcggttctcatgcccatgttccgtccggagcgccggaaagcgagtttgaatttgtttatgaaaataaaatccgtccctttgttacaaatttataccgttattcaaacattcaggcggtcttgcattactcaggcgtattgctttactgggtagaacgcacgcaccccgaattttttatgataatcgaggatatgataaatcgaaaacaaaccgaacttttgggcggcggcttttacgagccgagtttcccgttgatacccttgcaggacagaatcggacaagttgagttaatgacgacatatatccgcaaacatttcgggaaacgcccgcttggctgctggcttccgcaaatggcgtgggaacaacaccttgcgggggcgctttcctcaagcgaaatagactacacttttctttcacaggaacaatttgcgcaggcgggtataaaaggctccggtcttttttctccctgtatcagcgaagatcaaggtaaacttttaactatttttccggtttcattaacggtggaaaaagatttggcggaaaaaagtttttctctggtttttgtcgagttaaaaaataagtttgaggaaatatgcggaaagtgcgagtccgagaaaataatcagcgtctttccggaaaagattttatcgtctccggaagaagcgccggacacggcatggaatcgtttttttgaggaaatatctctttccgaagacattgtagaaaccacattgccttccaaaattttaaaaggtcataaaacatataaaaagggaagtttcccgaattcatctgccgcggaaaataatttttcgccgcgaaaattcataattgaacatgaggaagcgggcggtctttattcaaaaatgatatttaccaatgttttaataaatcagttaaaaggagataagtcccgtaagttaagcgcaagagaagagctttggcaggctcaggactcgaaccttttttcccccggtaacggataccttaggaatgagcttcgcaaatcggcgtacagttctcttttacgcgcggaaatgctgactcgtgaaacgcgggaaatttattccgtcgttaatacagtatga

SEQ ID NO: 51114 - protein, 372 aa, Unknown
  Obtained from environmental sample
  DOMAIN (10)...(344): Glycosyl hydrolase family 57
  misc_feature (1)..(372): Xaa is any amino acid
MKEKNKIYLIIGSHAHVPSGAPESEFEFVYENKIRPFVTNLYRYSNIQAVLHYSGVLLYWVERTHPEFFMIIEDMINRKQTELLGGGFYEPSFPLIPLQDRIGQVELMTTYIRKHFGKRPLGCWLPQMAWEQHLAGALSSSEIDYTFLSQEQFAQAGIKGSGLFSPCISEDQGKLLTIFPVSLTVEKDLAEKSFSLVFVELKNKFEEICGKCESEKIISVFPEKILSSPEEAPDTAWNRFFEEISLSEDIVETTLPSKILKGHKTYKKGSFPNSSAAENNFSPRKFIIEHEEAGGLYSKMIFTNVLINQLKGDKSRKLSAREELWQAQDSNLFSPGNGYLRNELRKSAYSSLLRAEMLTRETREIYSVVNTV

SEQ ID NO: 51115 - DNA, 1671 bp, Unknown
  Obtained from environmental sample
  misc_feature (1)..(1671): n is a, c, g, or t
gtgggcatagtctccattatccgcgacgtaaccaaacgcaaggaaatggaaagagacctttcgcttcaaacttcattgttcaagacgatgctcacctcccttcccgatgccgtattctgcaaaaatttgaatttcagatacacattatgcaacgactacatggcgtcgttattcggcaaacaggttgaggatatcctaggcaaggatgatatagccgcccttggactgccttctgaaaccgcggcgattgccgccgaaagcgacttgaaagtaatgaacgagcagaagcgcatagtgtatgaggaatgggttccctgcgccgacggagttaaaagaatttttgaaaccgtaaaatcgcctcttatactggacggcgacgtagtagggattatggcgatagggcgcgacataacgcggcgcaaagaaatggaagaggaagcgatggcggcaaaccgcgccaagtcgtctttccttgccaatatgagccatgaactcaggacgccgcttaacgttgttatcgggcttaccgatttaacgcttgaggaagacctacaggacaatgtaaaagataatttggcgaagataagcaatgcgggaacaactcttttgagcatcgtaaacgacattcttgacttctccaaaatcgagtcgggcaaacttacgctttcgcctgtcgaatattacatgtccagcatacttaacgacatcattacccttgttcttacccgtcttggcgagaaacccataacattcaaattgaatataaaagacgatctgcccaaccaattaaggggcgatgatctgcgcgtaaaacaaattcttacaaaccttcttaccaacgccattaaatactcccgcgagggaagcatagagcttatcgtgcgttcaacgcgcgaaggcgacagtgtatggctggatgtcgccgtaagcgacacgggcatgggtatcccaaaggaagacatcggtagtctgtttttggattattaccaggtttccgctaaatccaaccgcaatattgaaggcacaggattgggcttgcctattacaaaaagacttgtggaaatgatggatggggaaatcggcgtagagagcgagcacggcaaaggctctacattcagtttccgtataaagcagggttatgtaaacgacacggttctgggagcggaagtttcggaaaaactgcgtaaattcaatttctccgacgacaggcgcattgtttccagaaaaattgtaagggtcaatttgagctacgcaagagttcttgttgtagacgacatgcagaccaacctggatgtcgcctcaggcatactgcgcaaataccagatgaaggttgacgttttaaccaacggtcacgccgcgatagacaggataaaatcgggaaatcccgtatacgaccttgtgtttatggatcacatgatgccgggaatggacggcatagaaaccgttgataagattcgcgcgttaggaaccgagtacgcgaaaaagattccgattatcgctcttaccgccaacgccatacagggaacagacaaaatgttctacgaacacgattttcaggcgtttgtaaccaagcccatcgacgtaatggaaatggatacggtcttgaggaaatggctgtatgatcccaaacgcgaaggctctgtcttccggatcaggctcggccgattctga

SEQ ID NO: 51116 - protein, 556 aa, Unknown
  Obtained from environmental sample
  DOMAIN (31)...(142): PAS fold
  misc_feature (1)..(556): Xaa is any amino acid
MGIVSIIRDVTKRKEMERDLSLQTSLFKTMLTSLPDAVFCKNLNFRYTLCNDYMASLFGKQVEDILGKDDIAALGLPSETAAIAAESDLKVMNEQKRIVYEEWVPCADGVKRIFETVKSPLILDGDVVGIMAIGRDITRRKEMEEEAMAANRAKSSFLANMSHELRTPLNVVIGLTDLTLEEDLQDNVKDNLAKISNAGTTLLSIVNDILDFSKIESGKLTLSPVEYYMSSILNDIITLVLTRLGEKPITFKLNIKDDLPNQLRGDDLRVKQILTNLLTNAIKYSREGSIELIVRSTREGDSVWLDVAVSDTGMGIPKEDIGSLFLDYYQVSAKSNRNIEGTGLGLPITKRLVEMMDGEIGVESEHGKGSTFSFRIKQGYVNDTVLGAEVSEKLRKFNFSDDRRIVSRKIVRVNLSYARVLVVDDMQTNLDVASGILRKYQMKVDVLTNGHAAIDRIKSGNPVYDLVFMDHMMPGMDGIETVDKIRALGTEYAKKIPIIALTANAIQGTDKMFYEHDFQAFVTKPIDVMEMDTVLRKWLYDPKREGSVFRIRLGRF

SEQ ID NO: 51117 - DNA, 435 bp, Unknown
  Obtained from environmental sample
  misc_feature (1)..(435): n is a, c, g, or t
ttggctcaaaaaggactacctaaaataaatggcaaatactttgcacatattgaccccccacccataagcataactgaattctcgcaaaacacaaaataccgcggggcagtagagggttatctagctctttccatagaaacattccgcgaaattgaaaaggcaacggtcagcctgaataaagacaccaccgcaactgtcgaggtaaaactgcaccaatacaaagaattagagggagagcaaataaaagccattcaacttttggtcgcaagcgcagaaaatgaattaaaagcagaacaggtaagtattttagacgataaaggaaacgatctaatagcgaaatacgaagcgaaatacaaagcggaatacgaaacatacaaccccacaagaaaaaatgtgcgttcctgcggtagttcctgcggagacggaggatattag

SEQ ID NO: 51118 - protein, 144 aa, Unknown
  Obtained from environmental sample
  misc_feature (1)..(144): Xaa is any amino acid
MAQKGLPKINGKYFAHIDPPPISITEFSQNTKYRGAVEGYLALSIETFREIEKATVSLNKDTTATVEVKLHQYKELEGEQIKAIQLLVASAENELKAEQVSILDDKGNDLIAKYEAKYKAEYETYNPTRKNVRSCGSSCGDGGY

SEQ ID NO: 51119 - DNA, 510 bp, Unknown
  Obtained from environmental sample
  misc_feature (1)..(510): n is a, c, g, or t
ttgggttttgttgattggcggcaagacggcagggatacgtttggggtattcgccgtttttgacgatgtggctgccgaacattatagcaatctcggcaggttttattctttttgttattcggattcaaagataggggttcagataaggattgtatatatgatacttgatcgatacctgacaaagcagttcttgcccgtattcgcggtttcctcgtcaatgttcgttttattgcttgcaataatcgatctctttgtcaacctggcgcgttaccttaacaacgaggtagccgccagggacgttctccgcgtaacccttttttacctgccaaagggcttttcttacgccctgcccatttccttgatttttgccgccgcctttattctgggagagctatacgcgagaaacgagttgacctccgtttttgccgcaggcattcctttctggcgttttagcatagcccttttaataatcgggtttgcagcttccatttttcgttctcggccaatctga

SEQ ID NO: 51120 - protein, 169 aa, Unknown
  Obtained from environmental sample
  misc_feature (1)..(169): Xaa is any amino acid
MGFVDWRQDGRDTFGVFAVFDDVAAEHYSNLGRFYSFCYSDSKIGVQIRIVYMILDRYLTKQFLPVFAVSSSMFVLLLAIIDLFVNLARYLNNEVAARDVLRVTLFYLPKGFSYALPISLIFAAAFILGELYARNELTSVFAAGIPFWRFSIALLIIGFAASIFRSRPI

SEQ ID NO: 51121 - DNA, 1287 bp, Unknown
  Obtained from environmental sample
  misc_feature (1)..(1287): n is a, c, g, or t
gtgaatagtccagcaggagtgcagtcgctaaagggccgcatcatatcgcggactttatttatgtacctcgtccgggatatgttcttttcgttttttgtttccttcctttttttctttggcgttttttttgtaaaccaactgcttcttgtggcccaggatatactcgccaagcacgttccttttttgcaagtcatgatgcttgtgttttttgccctgccccagataatcgcgatgtcatctccttttgcttccttgatggggacgcttatgacaatcggaagaataagttccgataacgaggttttaattattctggcttcgggcctttcatacaaaatggtattcattcctgcggcaattgtgggcattataatttcggtagtttcgttctttaccaacgacgttctgcttccggcagggacaattcagtacgcgaagctttaccggagaattctggtttctaccccggcgctggagctggaggccaattccgtcaagcgctttaaggatacgacaattgtaaccgggcctgttgaagggatggcaatagggaacattcttattttggatagaacttacgacggcgaaaggcgcgttattatggcgaaggatgccgaactgaaagactcaggcagggaagggcttagcctggatctttcaaaagcgtttattcagtcttcaaaagaaatagtccgcaacgattacgattacgcttttatggattccctgcgttactgggttccgcaaagcgatcttatccaggcaatatcttcgatcagcccaaaccagatgagcactaccgatttgcgtaaagcgattgccgtcaaaggccaggaccttgacgacaggcttgataaacagtaccgcaaatgcctgacttctgccctggatcttgaggacagtttaagaaaaaacgaatcgggatggaaccgcagggagaatagcctggaaacgtttgcgaaggaataccagattgtcaacgcggtgaagagagacaggagttacgccctttacaggttcgagtacaaccaaaaatacgcggtgccgtttggcgcgttttcatttgtgtttctcgcagtgtcgttggggctttacgcgaaaaaaagcgggcaaacggtgggctttattttcggcatgataatatcctgcctgttttgggttttgttgattggcggcaagacggcagggatacgtttggggtattcgccgtttttgacgatgtggctgccgaacattatagcaatctcggcaggttttattctttttgttattcggattcaaagatag

SEQ ID NO: 51122 - protein, 428 aa, Unknown
  Obtained from environmental sample
  DOMAIN (21)...(424): Predicted permease YjgP/YjgQ family
  misc_feature (1)..(428): Xaa is any amino acid
MNSPAGVQSLKGRIISRTLFMYLVRDMFFSFFVSFLFFFGVFFVNQLLLVAQDILAKHVPFLQVMMLVFFALPQIIAMSSPFASLMGTLMTIGRISSDNEVLIILASGLSYKMVFIPAAIVGIIISVVSFFTNDVLLPAGTIQYAKLYRRILVSTPALELEANSVKRFKDTTIVTGPVEGMAIGNILILDRTYDGERRVIMAKDAELKDSGREGLSLDLSKAFIQSSKEIVRNDYDYAFMDSLRYWVPQSDLIQAISSISPNQMSTTDLRKAIAVKGQDLDDRLDKQYRKCLTSALDLEDSLRKNESGWNRRENSLETFAKEYQIVNAVKRDRSYALYRFEYNQKYAVPFGAFSFVFLAVSLGLYAKKSGQTVGFIFGMIISCLFWVLLIGGKTAGIRLGYSPFLTMWLPNIIAISAGFILFVIRIQR

SEQ ID NO: 51123 - DNA, 750 bp, Unknown
  Obtained from environmental sample
  misc_feature (1)..(750): n is a, c, g, or t
ttgttaaaagaattgcgtataactgttaattttccttatggcagtcataaaaaaacaggagcggacttctctgctccgcattcacataaaagtaaaattttaagtaataaagacggttcaatttccatagaaagagaacttgacagcacaatctacaatgttacagtcagcggtaaagggtttacagtttcatttaatgaaaatcagcatgctttacaattaattccgcatgatgaatgtataaatttctgtgtcaaatttgaaccggtaaacattccctcttttaaaaacaccggaattacactgaataaattaataaataaagatgcggactcatcagaagaagcaaaaacaaaatgcctttctttctgggaacattactggacttccggcggctttatcgactttaaaggatcaaccgattccagagctgctgaattggaacgtaggataatactttcgcattatcttacggcaattcaaagcagaggcaaacttccccctgcggagacaggtcttacatgcaacagctggtacggcaaatttcatcttgagatgcatttttggcatcacgcgcatttgccgttatggaacaggacagaggaacttttaaaatcacttgagtattacaaaaaaattctcgctgccgcaaaagatatagcggcttcgcagggatactcaggcgcgcgctggccaaaatgtgcgatccgacgggacgcaacacgccttcatccgttgccgttttgttga

SEQ ID NO: 51124 - protein, 249 aa, Unknown
  Obtained from environmental sample
  misc_feature (1)..(249): Xaa is any amino acid
MLKELRITVNFPYGSHKKTGADFSAPHSHKSKILSNKDGSISIERELDSTIYNVTVSGKGFTVSFNENQHALQLIPHDECINFCVKFEPVNIPSFKNTGITLNKLINKDADSSEEAKTKCLSFWEHYWTSGGFIDFKGSTDSRAAELERRIILSHYLTAIQSRGKLPPAETGLTCNSWYGKFHLEMHFWHHAHLPLWNRTEELLKSLEYYKKILAAAKDIAASQGYSGARWPKCAIRRDATRLHPLPFC

SEQ ID NO: 51125 - DNA, 837 bp, Unknown
  Obtained from environmental sample
  misc_feature (1)..(837): n is a, c, g, or t
atgtgcgatccgacgggacgcaacacgccttcatccgttgccgttttgttgatctggcagcagccccacccgataatgcttgccgaattgtgctggcgcgcgaaagaaagcgatgatttcctgcgcgaataccgcgatattgttgttgaaaccgccgaattcatgaaaagttttatccattatgatggctcccgttatgtgctggggcccccgtatattccggcgcaggagcgccacgatccaggaatagtattaaacgccgcatttgagcttgaatacttccgctgggggtttcgcatggcggatgaatggctgcgcaggctgggggagaaaactcgctacgcgaaaatcgcggaaaacttgagccttccggctgttaaagatggcgtttacctcgcgcatgaaaattgccccgacactttcagcaagcttcctttttataccgaccacccctcaatgcttgggatgtacggtgttttagacagcgacaaaattgataaaaatattatgtccgctactctggataaagtgctttccgtctgggacagaaaaactttttacggctgggacttttcaatgctggcaatgaccgcctgccgccttggcagatacaaggatgccattgatctgcttttaatggaaagcccgaaaaacacctggctggaaaacggtcataataaaatgacaggcgataacgcgcttcccctttaccttccgggtaacggcggccttctgcttgccgccgcgatgctcgcctccggttacggcgggaaaaaaggctcgtcttttcctgacggctttgtagtcaataccgaaggaattattccgtatatttaa

SEQ ID NO: 51126 - protein, 278 aa, Unknown
  Obtained from environmental sample
  misc_feature (1)..(278): Xaa is any amino acid
MCDPTGRNTPSSVAVLLIWQQPHPIMLAELCWRAKESDDFLREYRDIVVETAEFMKSFIHYDGSRYVLGPPYIPAQERHDPGIVLNAAFELEYFRWGFRMADEWLRRLGEKTRYAKIAENLSLPAVKDGVYLAHENCPDTFSKLPFYTDHPSMLGMYGVLDSDKIDKNIMSATLDKVLSVWDRKTFYGWDFSMLAMTACRLGRYKDAIDLLLMESPKNTWLENGHNKMTGDNALPLYLPGNGGLLLAAAMLASGYGGKKGSSFPDGFVVNTEGIIPYI

SEQ ID NO: 51127 - DNA, 1068 bp, Unknown
  Obtained from environmental sample
  misc_feature (1)..(1068): n is a, c, g, or t
gtggaatatccttatttaatttattgcgagggcaaacagtactggaatgtttttaaacccgtccttgacgaatttgaaaatcgaaaaaccgggattctgtaccttacatccgcgcaggatgatcctgtttttgatttttcatggagttttgtaaaaccggaatatatcggcgaagggaaccgcgctttcgcgcgtcttaatatgctccgcgcgggaatatgtcttatgactacccccggccttgatgtttaccagttaaagcgttctaaaatggttaaacattacgcgcatattcttcatgccccgagcgacgcgaccatgtaccgcctttttggaaccgattattttgattccgtgcttctaacaggcgattatcaggctgaagatataagaactcttgagcggcagcgtaatattcccgaaaagaaactcgtaaccgtaggttgttcttatctcgacgtgtacgccgaaaaaattaaaaatctgcccgcggaagaaaaccacccttttaccgtgcttgtctccccttcatgggggccttcggcgcttttgacccgttacggggaaaatttactcgatcctctggcggcatcgggctggcgcattattatccgcccccacccgcaatcaaagaaatccgaagccccgatgctggagcatctgcaaacacgttacaaaaataaaagtaatgttgaatgggattatgaacgggaaaatattttttccctcaataaggcggatataatgatctcagatttttcagggatcatttttgattatatgtttctgcgcgacaagccggtactgtatgtgagccagaattttgatcttcgcccttatgacgcggacgatattaatcatgagttgtggcaatctaaaacagtaaaagaggccggtattgaactgcgggaagatgattttccgcgaataaccgaagttatcaaaaacgcgggagacaacgaagctcttaaagcagcccgcagaaaagcccgtgaagcggcatggcagtatcctggcgaggcgggaaagcgcacttttgagtttatgaccggaattgtaaatggctga

SEQ ID NO: 51128 - protein, 355 aa, Unknown
  Obtained from environmental sample
  DOMAIN (158)...(351): CDP-Glycerol:Poly(glycerophosphate) glycerophosphotransferase
  misc_feature (1)..(355): Xaa is any amino acid
MEYPYLIYCEGKQYWNVFKPVLDEFENRKTGILYLTSAQDDPVFDFSWSFVKPEYIGEGNRAFARLNMLRAGICLMTTPGLDVYQLKRSKMVKHYAHILHAPSDATMYRLFGTDYFDSVLLTGDYQAEDIRTLERQRNIPEKKLVTVGCSYLDVYAEKIKNLPAEENHPFTVLVSPSWGPSALLTRYGENLLDPLAASGWRIIIRPHPQSKKSEAPMLEHLQTRYKNKSNVEWDYERENIFSLNKADIMISDFSGIIFDYMFLRDKPVLYVSQNFDLRPYDADDINHELWQSKTVKEAGIELREDDFPRITEVIKNAGDNEALKAARRKAREAAWQYPGEAGKRTFEFMTGIVNG

SEQ ID NO: 51129 - DNA, 729 bp, Unknown
  Obtained from environmental sample
  misc_feature (1)..(729): n is a, c, g, or t
atggctgacgtgctttatacaataattatatatcccattgttcaaataatagaggttgtatatcttttcttctttaaagtttccaaaaacgtggtgttttccgtttttggagtcagtttaaccgtttcttttttatcattgccgctgtatataatggcggaacgctggcagtctgtcgaacgcgatacaatcaaacggctaaaacccgccgtaaacaagataaagtccgttttttcaggcgacgagcaattcatgattctttcagctttttaccggcagaatcattatcatccgctttactcgctgcgcagttctatcggacttatagttcagattccgtttttcatcgcggcatatttattcctgtccaatcttggagtgctgcgcggggtaagctttttatccataaaagatatcagcgttcccgattccctgttccatgttggcaatatttccgtaaatgttcttcctgttgcaatgacgctgattaactgcgcggcgggagccgtttatacccacaggctttccgtccgcgataaaatacaggtatacggaatggcggctctttttttaatattgctttataattcacccgcggcgcttgttttttactggacgcttaataatgttttttcgcttgttaagaatattttttataagataaaaaatccgttaaaagttttatatattactctctgttttgttttcttactgttcattttttattga

SEQ ID NO: 51130 - protein, 242 aa, Unknown
  Obtained from environmental sample
  DOMAIN (29)...(226): 60Kd inner membrane protein
  misc_feature (1)..(242): Xaa is any amino acid
MADVLYTIIIYPIVQIIEVVYLFFFKVSKNVVFSVFGVSLTVSFLSLPLYIMAERWQSVERDTIKRLKPAVNKIKSVFSGDEQFMILSAFYRQNHYHPLYSLRSSIGLIVQIPFFIAAYLFLSNLGVLRGVSFLSIKDISVPDSLFHVGNISVNVLPVAMTLINCAAGAVYTHRLSVRDKIQVYGMAALFLILLYNSPAALVFYWTLNNVFSLVKNIFYKIKNPLKVLYITLCFVFLLFIFY

SEQ ID NO: 51131 - DNA, 810 bp, Unknown
  Obtained from environmental sample
  misc_feature (1)..(810): n is a, c, g, or t
atgaaaacccgccaaataaaattgaggcttcttattgtatttattgtatcacttttctatttaatgccgttatttcttaaaagttttgataatttgtataaacagcttttttctaaactgtttcacaacagaaaaaacatgattatacttttatttctttcatgtttcgcgctgttcctgcttgctggcatgtatattccttcctcagttatcgcgtcttcacctgatgaattctgctatatcgaaggtcacgattctccttttagctatattattcattcaaacttgttctttttcggttttttcgttatttggcctgtgagcatcttttttctgttttctgataaaataaaatcatgtctggtttttttgcttgcttctcttgcgttgatattttcaatctatactattgctttcagcggaaactacggcacaatcaatactctttttaattttaacactaccggcttgtttggtgtcagctttattcgggctgtcctttcattaattgctcctctttttatattatcaatcctgctttttttaattggcaaatacaggattacatatctaaactcatttttatcaatattgattatttttctagccgcaatttcattttccaatgttgtaaaaatcaaaagagcatatacgcttttgggtattaaggtggctgatactccggaaagaacttcacttgaaccaattttcagtctttcaagagaaaacaagaatgtaattgttattatggctgacggcgctattaacggatacctgcccccttatttttcacgatcatcccaaacttga

SEQ ID NO: 51132 - protein, 269 aa, Unknown
  Obtained from environmental sample
  SIGNAL (1)...(26)
  misc_feature (1)..(269): Xaa is any amino acid
MKTRQIKLRLLIVFIVSLFYLMPLFLKSFDNLYKQLFSKLFHNRKNMIILLFLSCFALFLLAGMYIPSSVIASSPDEFCYIEGHDSPFSYIIHSNLFFFGFFVIWPVSIFFLFSDKIKSCLVFLLASLALIFSIYTIAFSGNYGTINTLFNFNTTGLFGVSFIRAVLSLIAPLFILSILLFLIGKYRITYLNSFLSILIIFLAAISFSNVVKIKRAYTLLGIKVADTPERTSLEPIFSLSRENKNVIVIMADGAINGYLPPYFSRSSQT

SEQ ID NO: 51133 - DNA, 612 bp, Unknown
  Obtained from environmental sample
  misc_feature (1)..(612): n is a, c, g, or t
ttgaacaaacccgcgacagagcagatagcaaatgtcaaaaaacgctataagattgacaaagaatatatactattcataggattttccgaaccgagaaagaatcttgagcgattattgtcggcgtacgccatgattaaagataatatagaccatgatctggtaatagtaggcggacacggttggtggtatgagcaaacatatcttaaagtaaatgagttggggatttcggaaagggttatttttacgggttacgtggatgattcggaactgccgtctttttatcacggggccgcaatcttcgcgttcccgagtttatacgagggattcggaattgccgcgctcgagtcggttttttccgatacgcctgttttggcgtcaaacaacaccgcgttacccgaaatactggataacgccgccgaatatgtcgatccttacaacaccgatgaaatcgcgtcggtaatgttgcgcttactgcaatcaaaagaaacgctttcacttttaagaaaaaattgcggaaccgttaaaacaaaatataattggctgaaagcggcgcgagagacttcggaattgtttgacggtcttgccgcgcatacgccgcgaaaggggtcttag

SEQ ID NO: 51134 - protein, 203 aa, Unknown
  Obtained from environmental sample
  DOMAIN (9)...(178): Glycosyl transferases group 1
  misc_feature (1)..(203): Xaa is any amino acid
MNKPATEQIANVKKRYKIDKEYILFIGFSEPRKNLERLLSAYAMIKDNIDHDLVIVGGHGWWYEQTYLKVNELGISERVIFTGYVDDSELPSFYHGAAIFAFPSLYEGFGIAALESVFSDTPVLASNNTALPEILDNAAEYVDPYNTDEIASVMLRLLQSKETLSLLRKNCGTVKTKYNWLKAARETSELFDGLAAHTPRKGS

SEQ ID NO: 51135 - DNA, 810 bp, Unknown
  Obtained from environmental sample
  misc_feature (1)..(810): n is a, c, g, or t
atgaaagacgggtcacaagccgtaaatataccgaaaaccatccattactgctggttaagcggtgaaaagatgccaaacgatatgaaaatatgcgttgacagctggaaaaaacacatgccggaatatacgtttgttttgtgggatatgaataaattcgacatcaactcgcacgtgtttgtcaaagaggcctgtcaggtaaggaagtgggcgttcgcgtcggattatatacggctgtacgcgttatataccgaaggcggcatataccttgataccgatgtttatgtaaagaaaagctttaacgacttcttgggaaacggcttctttaccggggttgaatatcatgagggactcgttaaaaacggggctcatctgctgaatgaggatgggacgttaagaaataaaggcgagatattcacccacggcatacaaatacaagccgcgattttgggaggcgttaaaggacatccgtttttgagagactgtttggattggtacaacggcaaacatttcattttggaagacggcggccattatgacaatctgatatcgccgtatatttacgcgcacgtcgctacggaatacgggtttcgttataaaaatgagttgcagaaattgaggaataacatgaccgtttatccgacctccgtatttgccggaagtctggctcaatcgggagaagacacctacgccgtgcaccgctgtgacgggacatggcgaagcaagcggtataaaatactatggtggctgaaaaagaaccggtttttgagaatgctcttaggaaagaagaaacttgaaaaatacgcgctttag

SEQ ID NO: 51136 - protein, 269 aa, Unknown
  Obtained from environmental sample
  DOMAIN (33)...(121): Glycosyltransferase sugar-binding region containing DXD motif
  misc_feature (1)..(269): Xaa is any amino acid
MKDGSQAVNIPKTIHYCWLSGEKMPNDMKICVDSWKKHMPEYTFVLWDMNKFDINSHVFVKEACQVRKWAFASDYIRLYALYTEGGIYLDTDVYVKKSFNDFLGNGFFTGVEYHEGLVKNGAHLLNEDGTLRNKGEIFTHGIQIQAAILGGVKGHPFLRDCLDWYNGKHFILEDGGHYDNLISPYIYAHVATEYGFRYKNELQKLRNNMTVYPTSVFAGSLAQSGEDTYAVHRCDGTWRSKRYKILWWLKKNRFLRMLLGKKKLEKYAL

SEQ ID NO: 51137 - DNA, 351 bp, Unknown
  Obtained from environmental sample
  misc_feature (1)..(351): n is a, c, g, or t
atgattgaaaagagcggaaatgagcaaatggaaatgagcaatgagcattcagaaaaattaaaagatgttttttctttgctgttttctgatcctgagtgggaattgattaaaattattgcggcttattcagactcggttagggaggcggcggaaagtttgaatccgtcctgtattaccgcgtatctttatgaattgtcaaaggcgttcagccgcttttatcacgattgtcctattcttaacgctcaagatacatctctttccaaggcaaggcttgaattaagccgcgctgtgatgatggcgttaaaagcggcgtttcatcttgtttgtataccgtttttagaagtgatgtaa

SEQ ID NO: 51138 - protein, 116 aa, Unknown
  Obtained from environmental sample
  DOMAIN (2)...(116): DALR anticodon binding domain
  misc_feature (1)..(116): Xaa is any amino acid
MIEKSGNEQMEMSNEHSEKLKDVFSLLFSDPEWELIKIIAAYSDSVREAAESLNPSCITAYLYELSKAFSRFYHDCPILNAQDTSLSKARLELSRAVMMALKAAFHLVCIPFLEVM

SEQ ID NO: 51139 - DNA, 2307 bp, Unknown
  Obtained from environmental sample
  misc_feature (1)..(2307): n is a, c, g, or t
atgtcaacacaatatataaccggagacagcgacagtattgttgtttcagatctggttccagaagatttttcaggaaccgatgaggagatcaccgaactaaaaaggcgtatagcgtcatgggatttgttcaggggttccctggtttccgacgacctttcggcaacgcagattcttatcaccctggaggcggttacagcggattttacacgtccggaagtgatgcggagcgttgaaaaaatccgtaaagcggcgggggatatatttactggcgaagcggaggtgtattttaccggacagccgataatcaacgcgattatcaataattcaatgatttcggataacattttactgataccgttagttgtcattgtggtattgtcgatgctgttcttttcgttcaggcgttttgcctttgtcatcctgccgtttttgaccgttatcatagcggttgtctgggctatagggatagcggcgctgttcgggataaaactctcggttattacaaccatattgccggtgattcttgttgcggtaggcagcgcctacggtattcatatagttacacattatatggaagacatacgcggaaaaacactgactgtcacagatcaccgcgaattggttctgacactggtaagaaaattgattaagccggtatttctggcggcgcttaccacgctggcgggttttatatcattttgttttacgcctattgtcccaatgagggaattcggatattgcgcgggctttggagtgcttgcttcttttgccgtggcagtcctttttattccgtcaatgtttctgctccgcggtccccgcgttcttaatgagcaaaaaaaagaacaaaaaggcgaggaccgtttcagcaacgctatcgcgttaattttttcaggtatcgcggagaaaaagataccggtgcttatttgcgcggcgctggttatgattatttcgttttacgggctttcgaaagttatcgttgacaacgctatggttgaattttttcagaaagaaaccgacataagccgttccgaccgttttatacgcgagtatttcggcgggtcaaaagacataaatcttgtggttaaggccgatactacagaggaacttttgcaccccgacgtgttaaaggcaatagacgatctttccgtttaccttacggaatatgttcctgatgtgggcaaagtcgtggggtttgcggatattatcaaaaggatcaatcaggtgttcaacgcgggagaaagcccggagggactgcggaaagttgtatcatctgacacttccggcagttttggattttcggatatgggagatttcggtttcggcagttttggattcagcgataatactccggttaatgaaacgccgaaacatgatattgaatatcacgatatatccaaatacaacatggcggatctgctggcgtttctggatgcctccgcaggaaaatcttccaatctgaacgggaacgatcttgtccgggaattgaaacgcctcaccaattatgagggcatggcctattatgagattccctcaaatccccggcgttatggcaaggaaacaccggaggagcttcagcggctgatagcgaattatctggtcctgctttccggtgatgatgattccgggtactccaatgacccgcttgaacctaccgcgattagaacaatgatacaaatgcgcacgacaggaagcatagattcccaggctgttatcgacataattaaagaatatattgccgtaaactttcccaaaaatgtaaggataataatcggcggcggcgtaacctatgaaatggcaattaccgatctgatttttaactctcagctcatatccatttttatttccgtgcttatagtgtttctcattatagcgatttccaacaaatcgctgattgccggagtcataggcgccgttccgttgacgcttgcgatcctgtgcaatttcgctgtgatgggttttattggaataaaactcggccttgggaccgctcttatttcaagcctcgcagtcggcatcggcattgattataccattcactttattgaaattttcaagcatgaatatcaatcaggaaagcaaaattttcttcacctgacgttcattggctgcggaaaagccattatgattaacgccctggccgtgggcgcgggattcggggtgcttgcgttttcccagtttaaaattatcgcggaacttggcttgcttatcgctttaagcatgctgataaccgcttttgtcagccttacggtaataccggctctgcttatggtgattaagccgaaattcatttatggggtgagtaaatga

SEQ ID NO: 51140 - protein, 768 aa, Unknown
  Obtained from environmental sample
  DOMAIN (47)...(160): MMPL family
  misc_feature (1)..(768): Xaa is any amino acid
MSTQYITGDSDSIVVSDLVPEDFSGTDEEITELKRRIASWDLFRGSLVSDDLSATQILITLEAVTADFTRPEVMRSVEKIRKAAGDIFTGEAEVYFTGQPIINAIINNSMISDNILLIPLVVIVVLSMLFFSFRRFAFVILPFLTVIIAVVWAIGIAALFGIKLSVITTILPVILVAVGSAYGIHIVTHYMEDIRGKTLTVTDHRELVLTLVRKLIKPVFLAALTTLAGFISFCFTPIVPMREFGYCAGFGVLASFAVAVLFIPSMFLLRGPRVLNEQKKEQKGEDRFSNAIALIFSGIAEKKIPVLICAALVMIISFYGLSKVIVDNAMVEFFQKETDISRSDRFIREYFGGSKDINLVVKADTTEELLHPDVLKAIDDLSVYLTEYVPDVGKVVGFADIIKRINQVFNAGESPEGLRKVVSSDTSGSFGFSDMGDFGFGSFGFSDNTPVNETPKHDIEYHDISKYNMADLLAFLDASAGKSSNLNGNDLVRELKRLTNYEGMAYYEIPSNPRRYGKETPEELQRLIANYLVLLSGDDDSGYSNDPLEPTAIRTMIQMRTTGSIDSQAVIDIIKEYIAVNFPKNVRIIIGGGVTYEMAITDLIFNSQLISIFISVLIVFLIIAISNKSLIAGVIGAVPLTLAILCNFAVMGFIGIKLGLGTALISSLAVGIGIDYTIHFIEIFKHEYQSGKQNFLHLTFIGCGKAIMINALAVGAGFGVLAFSQFKIIAELGLLIALSMLITAFVSLTVIPALLMVIKPKFIYGVSK

SEQ ID NO: 51141 - DNA, 498 bp, Unknown
  Obtained from environmental sample
  misc_feature (1)..(498): n is a, c, g, or t
atgaaaaaaatcattatagcgtcaatcgtcattttggtatgtgccggtgccgggttcgccgccgatccggtggaagggttttggctgagcgtagacgataaaacaggggaaatcaagtccggttgggaaatatatgaaagtaacggttacatgtacggaaagatgctttccgcagttggctttacatcagctaccaaggcggcaagatgccgtgacagctatgccggctttcccatagacggaaaagtaaaccagcttcctcttctcggcacgccctggttattcggccttcgcagggaaagccccggaaaatggactaacggcaatatcgtcaaccctgaagacggcaatatgtataaatgttcgcttatacatcatccggcggacggcaaaaaatttcagcaggaagcgctggaaatacgcgggcagcttcttgttttttcgggcagccaatactggaaacgggcaacgcgcgaggaagccagcgcgctgaagtga

SEQ ID NO: 51142 - protein, 165 aa, Unknown
  Obtained from environmental sample
  SIGNAL (1)...(20)
  misc_feature (1)..(165): Xaa is any amino acid
MKKIIIASIVILVCAGAGFAADPVEGFWLSVDDKTGEIKSGWEIYESNGYMYGKMLSAVGFTSATKAARCRDSYAGFPIDGKVNQLPLLGTPWLFGLRRESPGKWTNGNIVNPEDGNMYKCSLIHHPADGKKFQQEALEIRGQLLVFSGSQYWKRATREEASALK

SEQ ID NO: 51143 - DNA, 1167 bp, Unknown
  Obtained from environmental sample
  misc_feature (1)..(1167): n is a, c, g, or t
atgaatcgcggagtatttaacccctatgctgtaagagaaccggaatttatcgaagtctcggaaactgaaatgggttatgaacactggagcgcgcgcgaaataaaagtccgtctgccggacggagccgtcagcggaaatcttgaagtaagaacgccgcacggtaaatcgcgcagtttcttttttgatgtcagcggaaaacccggatttaaaaacataaaagataaacgcggttacacggtaacatactcggtcgatatcagagtaacggacgcttcaagaccgaatatgctttatctgtggataccaaaaccggtaaattccccttcccaaagaaacgttacccttatctcgcgttctattgagccatttatggaaaattacaaaggggttagtctttataaattggacaatcttttagcggggacaagtcaatctatcaatctttcataccgcgttgaagtatactccgtaggatcgggaataaaaccgctttccataaaacaggaagctacggaactttccgcggcgcataccaaaagctccggtttaattcccagcgatactccgcaaataaaaacggcggctaatttaattgtaaacagagaacaaaatccgtatatcaaggcaaaagccatatatgactggataataaatagtatgcagatttcggattcggagacttcaaaaagtcttattgaagttctggaacaaagacgcggagacccgtactccgccgccctgctcttcaccgcgctagcccgcgccgccggcgttccgtgtattcccgttgcgggcgttttggtaaatcaaaacgggcatacattacgccattactgggctgaattctggatagatggtttcggctggctgccggttgatcccgctatgggcgcgggggcggttaaatttatagacagcgcaaatcaacgttttaatgatgaagcggaaaaagattcggtaaatttttactttggcaatttggacaatcagcgtatagcgttttcaagaggagagcttatcctttcgcaaattgaaaaccgcggcagacttgtctcgcatccgcaatcatattcattgcaaaatgtctgggaagaatccgcgggggggcttgaatcgtattccagcctttggggggatattattatcagcggaatatatgtacaataa

SEQ ID NO: 51144 - protein, 388 aa, Unknown
  Obtained from environmental sample
  DOMAIN (237)...(295): Transglutaminase-like superfamily
  misc_feature (1)..(388): Xaa is any amino acid
MNRGVFNPYAVREPEFIEVSETEMGYEHWSAREIKVRLPDGAVSGNLEVRTPHGKSRSFFFDVSGKPGFKNIKDKRGYTVTYSVDIRVTDASRPNMLYLWIPKPVNSPSQRNVTLISRSIEPFMENYKGVSLYKLDNLLAGTSQSINLSYRVEVYSVGSGIKPLSIKQEATELSAAHTKSSGLIPSDTPQIKTAANLIVNREQNPYIKAKAIYDWIINSMQISDSETSKSLIEVLEQRRGDPYSAALLFTALARAAGVPCIPVAGVLVNQNGHTLRHYWAEFWIDGFGWLPVDPAMGAGAVKFIDSANQRFNDEAEKDSVNFYFGNLDNQRIAFSRGELILSQIENRGRLVSHPQSYSLQNVWEESAGGLESYSSLWGDIIISGIYVQ

SEQ ID NO: 51145 - DNA, 1311 bp, Unknown
  Obtained from environmental sample
  misc_feature (1)..(1311): n is a, c, g, or t
atggacattgcttttggccataccaatatggactttgattgctttggttcgctcatactggtaaagagactgttccctacatacaggctggttcggagcagccggatacatccggcggcgcaggtcatgtatgatttttatgaggattactttaattttctttcttcaaaagacatctcaaaagaaaaaatcgacaacataataatcgtagatacctgtacatcaggcagggtaagcgaatattttagccatataaataattcctccccctccatacgtatatttgatcatcatatggaggaatgtgatattgcgggcgccaaaattgagggagggcggtttggggcgaatactaccatgcttgggaaaatggcgatggaaaggggaatcacgcttgaaagcgaagaagctaccattgcccttacggcaatttatgccgatacgggaaggcttatttacgagactgtaacgcgggatgactatgaagtttccgcctggcttttggatatgggagcttcccttggtctggtgaaatcgtttcttgaaactgtcagggaagatgaacaaattgcggttcttaaccggcttaagccggaagtacaatcgatacagggcaatgtgatcctccttagctatcttgagctggaagaaaatgtgtccggccttgcggcagttgtggagaagataatggatattcataatcctgacgcatatttcgcgatttttttcataccccgggatgagacaatactgctgattgccagaagccaaaagaaagctatcgatcttcacaccctgctttctgtttatggaggcggagggcaccaactggcggcttctgccaaaattacaggtaaagacgggcaggagttctttagggaattctgtaattatctgagttataacctggagcctgccgccgatgtcaaggatattatgacaaagaacgtgtttacaatccatgaaactaccagccttatggaagcgtcaatgtttttggagcgtgttgatcttacggcctgtccggttgttgataaagagggcagcgtttccgggtttatcagccttcgggatatcatgaaaggacgcaagcatggtaagatgcaggcgccggtaaaagcgtatatgtctacgccggttatttcagtcgggagcaaagtaacactgcgggaaatagaaaggatattccataaaaataaaatcggccatcttcctatattggaagacggcaaattactgggtattgtaacccgctgggactacctgcaattccataaacagaccctaaatgacttgaccagcggggagtaa

SEQ ID NO: 51146 - protein, 436 aa, Unknown
  Obtained from environmental sample
  DOMAIN (237)...(298): DHHA1 domain
  misc_feature (1)..(436): Xaa is any amino acid
MDIAFGHTNMDFDCFGSLILVKRLFPTYRLVRSSRIHPAAQVMYDFYEDYFNFLSSKDISKEKIDNIIIVDTCTSGRVSEYFSHINNSSPSIRIFDHHMEECDIAGAKIEGGRFGANTTMLGKMAMERGITLESEEATIALTAIYADTGRLIYETVTRDDYEVSAWLLDMGASLGLVKSFLETVREDEQIAVLNRLKPEVQSIQGNVILLSYLELEENVSGLAAVVEKIMDIHNPDAYFAIFFIPRDETILLIARSQKKAIDLHTLLSVYGGGGHQLAASAKITGKDGQEFFREFCNYLSYNLEPAADVKDIMTKNVFTIHETTSLMEASMFLERVDLTACPVVDKEGSVSGFISLRDIMKGRKHGKMQAPVKAYMSTPVISVGSKVTLREIERIFHKNKIGHLPILEDGKLLGIVTRWDYLQFHKQTLNDLTSGE

SEQ ID NO: 51147 - DNA, 1395 bp, Unknown
  Obtained from environmental sample
  misc_feature (1)..(1395): n is a, c, g, or t
atgcaagaagaactaaccgaatacaagggaaaagccacaatggaaaaaatcacgtcgctggcaaagcggcggggttttgtatttcaatcttcagagatttacggcggccaaaacggagcctgggattacgggcctttgggcattgaactaaaaaatcgcatcgctgcggcctggtggaaggaaatgacccagttaaacgacgacattgtcggtctggacgcggcaattctgatgcacccccgcacatgggaagcgtcaggacacgtggagaattttaccgacccgcttgtggactgcaaaaagtgtaagtcccgcttcagggccgatcagataccgccagaaaacctggcggccaaaaagtgccccgaatgtgagggcgaacttaccgacacgcggaagttcaatttaatgttcaaaacccatatcggccccgccgaagactcggccagcatcatctacctgcgcccggaaacggctcagggaatctacgtcaactataagaacatcattcagtcaaacagaatgaaaatcccattcggcattgcccagatcggcaaggccttccgcaacgaaattgttaccaagaactttatcttccgcacctgcgaatttgagcagatggagatgcagtactttgttaagcccggcaccgatgaggaatggtttgccgaatggcggaagcgccgctggaactactaccaaaagctgggcgtgaaaatggatcacctgcgctggcaccagcacggtcccggcgaattggcgcactacgccaaggacgcctacgacatcgagtacctcttcccgatgggctggcgggaacttgaaggtgtccacaaccgtaccgactacgatcttggccgccatacccaattctcaggcaaggacctccagtacatcgatcaggaagacagcaacgagcgctacattccctacatcatcgagacttcggccggccttacccgcaacttattgatgatcctctgtgacgcctacgatgaagaaaaagtcgcttccgataaagaaggggcaagcggaaccacaggttccgccgatgacacacggaccgtgctgcgcttccacccaagccttgccccgattaccgttgcagtattgcccttaatgaaaaaggacgggcttgcggagcttgcccaggacattcgaaaggagctgaaagaagacttctccaccgattacgatcaatcgggggccattggccgccgctaccgccgtcaggacgaagccgggacgcccttctgcgttaccattgactacgaatccaaagacaacggcactgtaaccctgcgtttccgcgactccatggaacaggttcgcgtaaaccgggctgaactggctcagcgtttgaggaaggaaattaaagagtacaagagggtatag

SEQ ID NO: 51148 - protein, 464 aa, Unknown
  Obtained from environmental sample
  DOMAIN (367)...(457): Anticodon binding domain
  misc_feature (1)..(464): Xaa is any amino acid
MQEELTEYKGKATMEKITSLAKRRGFVFQSSEIYGGQNGAWDYGPLGIELKNRIAAAWWKEMTQLNDDIVGLDAAILMHPRTWEASGHVENFTDPLVDCKKCKSRFRADQIPPENLAAKKCPECEGELTDTRKFNLMFKTHIGPAEDSASIIYLRPETAQGIYVNYKNIIQSNRMKIPFGIAQIGKAFRNEIVTKNFIFRTCEFEQMEMQYFVKPGTDEEWFAEWRKRRWNYYQKLGVKMDHLRWHQHGPGELAHYAKDAYDIEYLFPMGWRELEGVHNRTDYDLGRHTQFSGKDLQYIDQEDSNERYIPYIIETSAGLTRNLLMILCDAYDEEKVASDKEGASGTTGSADDTRTVLRFHPSLAPITVAVLPLMKKDGLAELAQDIRKELKEDFSTDYDQSGAIGRRYRRQDEAGTPFCVTIDYESKDNGTVTLRFRDSMEQVRVNRAELAQRLRKEIKEYKRV

SEQ ID NO: 51149 - DNA, 1227 bp, Unknown
  Obtained from environmental sample
  misc_feature (1)..(1227): n is a, c, g, or t
gtgtctttaacggcagcgttttgtgtcacccgcgggttattcgatctgttaaaagaagaaaccggcgacgattgtttatatcctgtaggctattaccgcggcgaacattcggcgaacggccagttggaaatcgcctttacgcataccaacaactacggcgaggaatatttttcctttgtaaacggccagttcacctcggacggcggaacgcacctgtccgcttttaaggaagggttcttaaaaggaattcaaacctactataaaaaagactacaaaagcgaagacgtgcgcgaaggcaccaccgccgcgattgcgataaaattaaaaaatcccgtcttcgaaagccagacgaaaaacaagctcggtaactcggacatccgcgcgtgggtagtgcaggaagtacgcaacgccgtagaagactggctgcacaaaaaccccgaagcaagcaaaaagctggaacagaaaataaacgccaacgaaagcctgcgcacggaattaaacgccgtcaaaaaagaagcgcgggaagcggcgaagaaaatcgcccttaaaatccccaagcttaaagattgcaagtaccatctggaagacggcgacgacggaaaaaactctaccatctttatcacggaaggcgattccgcctccggctcgatagtttccagccgcgacgtaatgacccaggcgattttctcccttcgcggcaaagtggaaaacgtctacggcaaaaaacgcgccgcaatttacaagaacgaagaactttttaacatgatgatggccctcggtattgacaacgacatagaaggcctgcgttacgcgaaaatagtaatcgccaccgacgcggactttgacggtttccacatccgcaacctgctgttaactttcttcctctcatattttgaggaacttgtaaccgccggtcatgttttcattcttgaaactccgctgttccgcgtccgcacaaaaaaagaaacccgttattgctattctgaaaaagagcgcgatgaagccgccatcgccttaggcgcgcaatgcgaaattacccgcttcaagggattaggagagattagccccaaagagttcgggcagtttatcggggaggatatgcgcatagtgccggtgtcggttaacactttgaagcaggttccgcaggtgctggatttttacatggggaagaacacgccggagagacgggagtatattatgaagaatttgatagaggatgcggggtga

SEQ ID NO: 51150 - protein, 408 aa, Unknown
  Obtained from environmental sample
  DOMAIN (12)...(172): DNA gyrase B
  misc_feature (1)..(408): Xaa is any amino acid
MSLTAAFCVTRGLFDLLKEETGDDCLYPVGYYRGEHSANGQLEIAFTHTNNYGEEYFSFVNGQFTSDGGTHLSAFKEGFLKGIQTYYKKDYKSEDVREGTTAAIAIKLKNPVFESQTKNKLGNSDIRAWVVQEVRNAVEDWLHKNPEASKKLEQKINANESLRTELNAVKKEAREAAKKIALKIPKLKDCKYHLEDGDDGKNSTIFITEGDSASGSIVSSRDVMTQAIFSLRGKVENVYGKKRAAIYKNEELFNMMMALGIDNDIEGLRYAKIVIATDADFDGFHIRNLLLTFFLSYFEELVTAGHVFILETPLFRVRTKKETRYCYSEKERDEAAIALGAQCEITRFKGLGEISPKEFGQFIGEDMRIVPVSVNTLKQVPQVLDFYMGKNTPERREYIMKNLIEDAG

SEQ ID NO: 51151 - DNA, 2310 bp, Unknown
  Obtained from environmental sample
  misc_feature (1)..(2310): n is a, c, g, or t
gtgacactactcagttcagttctgctgggaggcttcgcccttgctctggggctgtctttgcttggggccgtattcgggataaaaaaatttaacccgtttttaggttcgttctttgcccattcctacgggtttcttgctttctttgttccgtattatcttggctatgccgcttctgttctggccgatccccgctggcggccggatcgcattttttttctgtgcgcgtcgcctttcccctttcttacgcttggggcaggttatattataatccgtgattttgacgcgctctcacgggattacgcttttttggagtttatcgggaaaacaggatttagcgtgttcatcgttataatgacttttctggaagtggtcgcgatacaaatgttaaaaaacgccctgttccccattgtaaaagttgatgggaagagaaaaagaatctggcagagtaaaaaaggaacttttttgcttcctccgccgcctaaatccgaatctaaatccgaccctgaacctgaagctaaaaaagaggaaaaatatggcgtttatgtcaaagataattctgtcgaagatgattttgtttcatatgtttcggagcctgaggaaagtgacaccgttgaatatgaaaaaatagaaatcgaactgccccctgtgaggcccctgcgcagcccgcttgcccttgaatatcagaatgaagcgaacagggaggcggccaaaaagcacagggataagtccgccgcgactcaggggggagacaaactcgccggcagcatggaacgcgccattgaagaagcggaagtgatagccgcgatccacagcgagcagctccgtaaaaaatcgacagacaaggctgcaaatcatgctgccggtcatacggcgcgcgcaagcaaaagaaaatacagcatccctctggaaatcctgagcgagtatccggacggcgaatactggatcatagatcaggcgacgcgcgacgcggcaaatacacttaaggaaacccttgaggaatttaaaattcaggctgaggttaccggaataaaaaaaggcccggtaattacgatgtttgaactgctgccggcgccgggcgtcaagctctcccggattgtcaacctgcaggacaatatcgccctgcgccttgccgcctcgtccgtgcgtattgtcgcgccgattcccgggaagcacgccgtgggcattgagattcccaacgcaaagcggcacattgtttcattcagggaaattatcgaaagcgaacttcaacgagagggcaaacggctggagattcccgtggttatggggaaagacgtttcaggagatacggctttgtctatcgatctgacgcagatgccccatctgttgatcgcagggactaccggctcgggtaaatcagtctgtgtcaactcgctgatcctctcgatactgtaccagatgcccccttcggattgccgcctaattctcatcgaccccaagattgtggaactgaaactctacaatgatattgcacatttactgacgccggttatcaccgaaccgaaaaaagcgtttcaggctttgcagtactgcatgtatgaaatggatcggcgttatgcctgccttgattncatgggagtcagggacataaggagctataacaagcgcataaaggaaagggaaatcgcgacggaatatatgccatatatcgtggtggtaattgacgaattcgcggatctgatggcaaccaccggaaaggagctggaaagcaccgtagcgcggcttgcggcgatgagccgcgctgtcggcatacacctggtgctagccacccaacgcccttccattgacataattacagggctgataaaggcaaatataccaagccgcattgcctttatggtagccagcaaaatggacagcaggatcatcatcgatatggtgggggcggaaaaactccttggaaagggagatatgctctacgcaggcgcggtagatccattccctgtccgaatgcagggcgccttcgtctcggaagaagaagttgagagggttgtcgattatgttaagggtcttggcgaaccggattacatcgacgatgaaatattttatgatgaggaagaggaaaacgccgatccgtccctgttttcggaaggcgatgacccgctttatgaaaaagccctggaaatagtaatgcagcagggaagggccagcgccagttatatccagcggcggcttaaaatcggctataacagggcagcgcgcttggtcgaggttatggagcatcatggagttgtagggccggcgcaaggatccaagccaagggaacttctgcgcggtacagcaataaattag

SEQ ID NO: 51152 - protein, 769 aa, Unknown
  Obtained from environmental sample
  SIGNAL (1)...(22)
  DOMAIN (406)...(601): FtsK/SpoIIIE family
  misc_feature (1)..(769): Xaa is any amino acid
MTLLSSVLLGGFALALGLSLLGAVFGIKKFNPFLGSFFAHSYGFLAFFVPYYLGYAASVLADPRWRPDRIFFLCASPFPFLTLGAGYIIIRDFDALSRDYAFLEFIGKTGFSVFIVIMTFLEVVAIQMLKNALFPIVKVDGKRKRIWQSKKGTFLLPPPPKSESKSDPEPEAKKEEKYGVYVKDNSVEDDFVSYVSEPEESDTVEYEKIEIELPPVRPLRSPLALEYQNEANREAAKKHRDKSAATQGGDKLAGSMERAIEEAEVIAAIHSEQLRKKSTDKAANHAAGHTARASKRKYSIPLEILSEYPDGEYWIIDQATRDAANTLKETLEEFKIQAEVTGIKKGPVITMFELLPAPGVKLSRIVNLQDNIALRLAASSVRIVAPIPGKHAVGIEIPNAKRHIVSFREIIESELQREGKRLEIPVVMGKDVSGDTALSIDLTQMPHLLIAGTTGSGKSVCVNSLILSILYQMPPSDCRLILIDPKIVELKLYNDIAHLLTPVITEPKKAFQALQYCMYEMDRRYACLDXMGVRDIRSYNKRIKEREIATEYMPYIVVVIDEFADLMATTGKELESTVARLAAMSRAVGIHLVLATQRPSIDIITGLIKANIPSRIAFMVASKMDSRIIIDMVGAEKLLGKGDMLYAGAVDPFPVRMQGAFVSEEEVERVVDYVKGLGEPDYIDDEIFYDEEEENADPSLFSEGDDPLYEKALEIVMQQGRASASYIQRRLKIGYNRAARLVEVMEHHGVVGPAQGSKPRELLRGTAIN

SEQ ID NO: 51153 - DNA, 570 bp, Unknown
  Obtained from environmental sample
  misc_feature (1)..(570): n is a, c, g, or t
gtgaaaattatcggatttatcgcaagttcacgaaaagaaggcaataccgcttgggcggttaataaaatactggaaggcgcgaaaagacagggagccgaaacccaatcctggtgtttcagtgatatcgaacttaaaccctgccgtggctgttcaagctgtaaaaagggcgacaaggggtgtgttattgatgacgacatgcagaatatttatgccgcctttgcaaatgcagatgccatagtcctcggatcgccgatttacatggggcagatgagcgcccaggcgaagatatttaccgacaggctgtatgcttgtacttcccctcggttttccccctattttaagtttaaggagaatgccaggaaaaagaaaatgcttcttgtatttacccagggcaatcctgattcttctttattccaagcatattttgattatacgaaaaatatgtttcaggttcttgaatttgacgttaaaagcgtacaggtcattgccggtatgcggaaaaaccgggcgtgtgaaagaagcgatctgcgcgcgttactgaacgaagcgggctcgtcgctggttccttaa

SEQ ID NO: 51154 - protein, 189 aa, Unknown
  Obtained from environmental sample
  DOMAIN (1)...(171): NADPH-dependent FMN reductase
  misc_feature (1)..(189): Xaa is any amino acid
MKIIGFIASSRKEGNTAWAVNKILEGAKRQGAETQSWCFSDIELKPCRGCSSCKKGDKGCVIDDDMQNIYAAFANADAIVLGSPIYMGQMSAQAKIFTDRLYACTSPRFSPYFKFKENARKKKMLLVFTQGNPDSSLFQAYFDYTKNMFQVLEFDVKSVQVIAGMRKNRACERSDLRALLNEAGSSLVP

SEQ ID NO: 51155 - DNA, 576 bp, Unknown
  Obtained from environmental sample
  misc_feature (1)..(576): n is a, c, g, or t
gtgcttctatgcggccttgatgaagcgggtcggggacctttggcagggcctgtttgcgctgcggcggttattcttccttccggattccccgtgagcgtattgaacgattcaaaaaaacttaaagcagtcgaaagggaaagggccaggctggctatctgcgaaagcgatgcagaatggggcataggctgggcgtccgccgccgaaattgacgagatcaacatacacaaggcaagcctgttggcgatgaagcgcgcttttgaggcaatggtcaaaaatggtcgtaattttaatatccatgcgatagtcgacgggctttttgttccggatataaatgttccttgcgaagcactggtaaaggcagacagttccgtgccggaggttatggcggcttccattctggcaaaaacggcaagagacaggcttatggaatattacggccttttttatccccaatacggttatgcacagcacaaaggttatcccacaaaagcccacagggaggcggtcatgcgttttgggccgtctccgattcagcgaataagcttttctgtaaagttggacttactaaaaggataa

SEQ ID NO: 51156 - protein, 191 aa, Unknown
  Obtained from environmental sample
  DOMAIN (4)...(185): Ribonuclease HII
  misc_feature (1)..(191): Xaa is any amino acid
MLLCGLDEAGRGPLAGPVCAAAVILPSGFPVSVLNDSKKLKAVERERARLAICESDAEWGIGWASAAEIDEINIHKASLLAMKRAFEAMVKNGRNFNIHAIVDGLFVPDINVPCEALVKADSSVPEVMAASILAKTARDRLMEYYGLFYPQYGYAQHKGYPTKAHREAVMRFGPSPIQRISFSVKLDLLKG

SEQ ID NO: 51157 - DNA, 612 bp, Unknown
  Obtained from environmental sample
  misc_feature (1)..(612): n is a, c, g, or t
atgaggaaagaatttctcccttacgataccgttagaaataacggcattaaaatggcgtataagatttacaaggatggattttatcctgatgtaatctatgtgtcgctccgcggcggcgtttacctgggaaatattatcagcgagtactttaaaattttacagcgaagggcaaggccggtgtactatgccgccgtcgttgcccgttcctataccggcgtaaaggaatccgaagaagtgaaggtagagggctggacttacccgaccgaatccctaagaaccggcgacaaaatacttctgatagacgatatattcgacaccggcaggacaattaaccacctcgcgaatctcatcatggaaaaaggaattctccgtaaggatcttaaaattgtggttcacgattacaaatatttttacgacagggttgaacaactgccaattcagccggactattggtgcagaaggcacgacctttccgtaaaagaagaggatatgtggattcactattccagccacgaactaatcggcctttcccctgaggaattggagacgtattatttttcccgcgatcctgagttgcgggaagcactggcaataatgcacaaggaaaactaa

SEQ ID NO: 51158 - protein, 203 aa, Unknown
  Obtained from environmental sample
  DOMAIN (13)...(143): Phosphoribosyl transferase domain
  misc_feature (1)..(203): Xaa is any amino acid
MRKEFLPYDTVRNNGIKMAYKIYKDGFYPDVIYVSLRGGVYLGNIISEYFKILQRRARPVYYAAVVARSYTGVKESEEVKVEGWTYPTESLRTGDKILLIDDIFDTGRTINHLANLIMEKGILRKDLKIVVHDYKYFYDRVEQLPIQPDYWCRRHDLSVKEEDMWIHYSSHELIGLSPEELETYYFSRDPELREALAIMHKEN

SEQ ID NO: 51159 - DNA, 306 bp, Unknown
  Obtained from environmental sample
  misc_feature (1)..(306): n is a, c, g, or t
atgatttttatcactgctctggtaacaggtatacttaacgtccttttttttcccctgggacttttgggcgcgagcggagtagtttttatgatgatacttttggcctcattcaccaattttaacaagggggagattccccttacttttttacttgtggtgattctgtacctgggcagggagctgcttaattcctttggaagcagtccggaatcgaacgaaaatatttctcaattcgcccatgtgatgggaggtttcataggcagtctgttcgggttttttagaactacaaaccgggtgcgggtatag

SEQ ID NO: 51160 - protein, 101 aa, Unknown
  Obtained from environmental sample
  SIGNAL (1)...(23)
  misc_feature (1)..(101): Xaa is any amino acid
MIFITALVTGILNVLFFPLGLLGASGVVFMMILLASFTNFNKGEIPLTFLLVVILYLGRELLNSFGSSPESNENISQFAHVMGGFIGSLFGFFRTTNRVRV

SEQ ID NO: 51161 - DNA, 942 bp, Unknown
  Obtained from environmental sample
  misc_feature (1)..(942): n is a, c, g, or t
atggaaagaaaaatgatgggtttgcgaaaagcctatggagacgccctggtggaacttggcagggaaaaccagaatatcgttgcgctggaagccgacctcggcaaatcgaccatgtcctgcctatttaaggaagcgttcccggagcgctattttgagatggggatcgccgagcagaatatggcatcggttgccgcgggccttgcccttaccggaaaaattgccttttacagcacattcgcggtatttgcgtcgggccgcgcatacgatcaaatccgctgctcaattgcgatcccccgcgcgaacgtgcggatctgcggctccagttgcggcctttccgattttggcgacggcaagacccaccagtccgtcgaagatgcgaacatactgtgtgcgatgccgaacatgacagtcctcaaccccgtagatgccgtggaaacgcaaaaaatgatgcgggctttggtttcataccagggaccggcatatatcaggattaaccggaacgacctgccggtttttaccccggaatcagacgattaccaaatcgggaaaatctacccaataaccgaaggcgaagatgccgcgatttttgctaccggcgtcatggtaagcaaatccgttgaagcggcagaaaagcttaaagcggaaggcatcgccgtacaggtgctaaacgtcagcaccctcaagccgctttcaaaagaagaagtgctgaaattcgcccgtggtaaaaaggcgataatcacagcggaggaatcggtgaaatcaggcggcctgggcagcgcgattgcttcgttgctnttcggcgagcttaacgctgcctttgctcaggtcgccattaatgatcaattcggcgtttccgcgcattcgtacgaggaattgctggtgaaattcggtctttccgcaaaggatgtatacaatgcggtaaaaacgactttgggaaaataa

SEQ ID NO: 51162 - protein, 313 aa, Unknown
  Obtained from environmental sample
  DOMAIN (182)...(303): Transketolase, C-terminal domain
  misc_feature (1)..(313): Xaa is any amino acid
MERKMMGLRKAYGDALVELGRENQNIVALEADLGKSTMSCLFKEAFPERYFEMGIAEQNMASVAAGLALTGKIAFYSTFAVFASGRAYDQIRCSIAIPRANVRICGSSCGLSDFGDGKTHQSVEDANILCAMPNMTVLNPVDAVETQKMMRALVSYQGPAYIRINRNDLPVFTPESDDYQIGKIYPITEGEDAAIFATGVMVSKSVEAAEKLKAEGIAVQVLNVSTLKPLSKEEVLKFARGKKAIITAEESVKSGGLGSAIASLLFGELNAAFAQVAINDQFGVSAHSYEELLVKFGLSAKDVYNAVKTTLGK

SEQ ID NO: 51163 - DNA, 882 bp, Unknown
  Obtained from environmental sample
  misc_feature (1)..(882): n is a, c, g, or t
atgaatattggatttatcggtctaggcattatgggtcgcccgatggcgaaaaaccttatcaaagccggttacaagctaaccgtttatgacaagtttgccccgcttgacgatcttgtcgcccttggagccgccggcgcggattccaacaaagcggtcgcggaaaaaagcgatttagttatcacgatgctgcccaattcgccacatgtcaaagaggcggttctgggatcaggcggcgtgattgaagggtgcaggtcagggcagatcgtggtagacatgagttccatcgcgccggcagtctcgcaggatctggaagccgcgctcaaggcaaagggcgtagccttcctggacgcgcctgtttcaggcggcgagcccaaagcgattgacgggacgctggcaatcatggccggcggcgatcagaaaacttttgacacggtaaagccggttttggaaaagatgggggcttctgttgtgttaaccggaaacgtaggcgccggaaacgtaacaaagctcgccaatcaaattatcgtggcgcttaacatcgccgccgtttcggaggcctttgtgcttgcggcgaaatccggcgttgacccggtaaaagtatttgacgcgataaagggcgggcttgccggttcaaccgtgatgaacgcaaaagtaccgatgatccttgacggcaacttcaagcccggctttcgagtcgaacttcatgtaaaagatctgcagaacgccctggacaccgggcataaagtgaacgcgccgcttccacttacggcaaacgtaatggaaacgctgcaggcgctcactgttgacggcatgggaaaaaacgatcacagcgccattatccgtttctatgaaaagctcgcacaaatagaagtgcgtaagtag

SEQ ID NO: 51164 - protein, 293 aa, Unknown
  Obtained from environmental sample
  DOMAIN (1)...(161): NAD binding domain of 6-phosphogluconate dehydrogenase
  misc_feature (1)..(293): Xaa is any amino acid
MNIGFIGLGIMGRPMAKNLIKAGYKLTVYDKFAPLDDLVALGAAGADSNKAVAEKSDLVITMLPNSPHVKEAVLGSGGVIEGCRSGQIVVDMSSIAPAVSQDLEAALKAKGVAFLDAPVSGGEPKAIDGTLAIMAGGDQKTFDTVKPVLEKMGASVVLTGNVGAGNVTKLANQIIVALNIAAVSEAFVLAAKSGVDPVKVFDAIKGGLAGSTVMNAKVPMILDGNFKPGFRVELHVKDLQNALDTGHKVNAPLPLTANVMETLQALTVDGMGKNDHSAIIRFYEKLAQIEVRK

SEQ ID NO: 51165 - DNA, 513 bp, Unknown
  Obtained from environmental sample
  misc_feature (1)..(513): n is a, c, g, or t
atgtcaagccgcccggcctcctgccgcaccgccgccatcgcgtctacccagctctgttcattggtaacatccaggcttaaaaaggccgccttgccgcctttcccgcaaatttccgccacgactgcgtttcccgcttccgttttgaggtcgcctaagaaaacacgcgccccttcttccgcaaagcgccgcgccattgctgcgcccagcccctgtgccgccccgctgattaacgctgtttttccttcaagccgcatcagtgccctacttacgcacttctatttgtgcgagcttttcatagaaacggataatggcgctgtgatcgttttttcccatgccgtcaacagtgagcgcctgcagcgtttccattacgtttgccgtaagtggaagcggcgcgttcactttatgcccggtgtccagggcgttctgcagatcttttacatgaagttcgactcgaaagccgggcttgaagttgccgtcaaggatcatcggtacttttgcgttcatcacggttga

SEQ ID NO: 51166 - protein, 170 aa, Unknown
  Obtained from environmental sample
  misc_feature (1)..(170): Xaa is any amino acid
MSSRPASCRTAAIASTQLCSLVTSRLKKAALPPFPQISATTAFPASVLRSPKKTRAPSSAKRRAIAAPSPCAAPLINAVFPSSRISALLTHFYLCELFIETDNGAVIVFSHAVNSERLQRFHYVCRKWKRRVHFMPGVQGVLQIFYMKFDSKAGLEVAVKDHRYFCVHHG

SEQ ID NO: 51167 - DNA, 510 bp, Unknown
  Obtained from environmental sample
  misc_feature (1)..(510): n is a, c, g, or t
gtgcggaatgtcggagtagcaggcgagttccacttttttcggatcgatcattatcaaacgcaattcttccggtttcttcgtcatcagcatactgcaaacaagcgagtttatgcacacgctctttcctgcgcccgtctgtccggcgataagcacgtgcggcattttggcgatgtcggttacgtagggcgcgccggagatgttcgtcccgatgactactggtatatcggcggtgctcttcctgaaggcgtccgacagcaggacgtttttgaagtagaccgtttgccgcgtgggattcggcaactcgattccgatggccgacttgccgggaatcggggcctgtatgcgtatcttctgcccgctaaccgccatcgatatgtcgtcgtgcaggttcaccaccttgctgaccttcaccccgggggcgagctcgatctcgtagcgtgtaacaacggggccggggcttacgcagattaccttgccttccacgccgaagttcatgagcgtcttctctaa

SEQ ID NO: 51168 - protein, 169 aa, Unknown
  Obtained from environmental sample
  misc_feature (1)..(169): Xaa is any amino acid
MRNVGVAGEFHFFRIDHYQTQFFRFLRHQHTANKRVYAHALSCARLSGDKHVRHFGDVGYVGRAGDVRPDDYWYIGGALPEGVRQQDVFEVDRLPRGIRQLDSDGRLAGNRGLYAYLLPANRHRYVVVQVHHLADLHPGGELDLVACNNGAGAYADYLAFHAEVHERLL

SEQ ID NO: 51169 - DNA, 1362 bp, Unknown
  Obtained from environmental sample
  misc_feature (1)..(1362): n is a, c, g, or t
atgaacttcggcgtggaaggcaaggtaatctgcgtaagccccggccccgttgttacacgctacgagatcgagctcgcccccggggtgaaggtcagcaaggtggtgaacctgcacgacgacatatcgatggcggttagcgggcagaagatacgcatacaggccccgattcccggcaagtcggccatcggaatcgagttgccgaatcccacgcggcaaacggtctacttcaaaaacgtcctgctgtcggacgccttcaggaagagcaccgccgatataccagtagtcatcgggacgaacatctccggcgcgccctacgtaaccgacatcgccaaaatgccgcacgtgcttatcgccggacagacgggcgcaggaaagagcgtgtgcataaactcgcttgtttgcagtatgctgatgacgaagaaaccggaagaattgcgtttgataatgatcgatccgaaaaaagtggaactcgcctgctactccgacattccgcacctattggcgcctgtcgtcaccgaaccgaaagaggcggtcaaagcgcttcagtggggggtgcaagagatggaacggcgttacagggtcctcgccaaagtcggggcgaagaagttggagaccttcaacgaacggttcgacgccggaaaactcaacggcgttttggacgaggaggataacaagaggctgccgttcatagtgataatagttgacgaactagccgacttgatgatgaccgcctcgaaagacgtggagagccagatacagcgcatagcgcagctggcgcgcgcggtcggcatccacctgatagtggcgacgcagcgcccgtcggtggacatcataacgggaaaaatcaaggcgaatttagcgtcccgcatagcgttcagaacgatccaatcggtcgattccaagacgatacttggctacgtgggcgcggagaaattgttaggcatgggcgacatgctgtttcttcgtaacggcgcgacggacatagaacgcttccacggcacgtttatatcggaggaggacgtagagaagataacggacgctatcaaggcgcagcaggtaagcgttgacaagatagaaagtttcggagacattatcggcgacgacgagaacggcgacggcggcgacgacgggggaagttccgacggcggcaaacgagacgaactgttcgccgaggcggcgcagacagtggtatcaataggccaaggctcaacatcgctgctgcaacgccgaatgaacattggcttcgcccgcgccggccggttgatggatcaattggaacgcgcgggagtcgtcgggccgtctaaagggagcaaggtgagagaggtattgatgagaccggaggatttggcggatattatttga

SEQ ID NO: 51170 - protein, 453 aa, Unknown
  Obtained from environmental sample
  DOMAIN (75)...(275): FtsK/SpoIIIE family
  misc_feature (1)..(453): Xaa is any amino acid
MNFGVEGKVICVSPGPVVTRYEIELAPGVKVSKVVNLHDDISMAVSGQKIRIQAPIPGKSAIGIELPNPTRQTVYFKNVLLSDAFRKSTADIPVVIGTNISGAPYVTDIAKMPHVLIAGQTGAGKSVCINSLVCSMLMTKKPEELRLIMIDPKKVELACYSDIPHLLAPVVTEPKEAVKALQWGVQEMERRYRVLAKVGAKKLETFNERFDAGKLNGVLDEEDNKRLPFIVIIVDELADLMMTASKDVESQIQRIAQLARAVGIHLIVATQRPSVDIITGKIKANLASRIAFRTIQSVDSKTILGYVGAEKLLGMGDMLFLRNGATDIERFHGTFISEEDVEKITDAIKAQQVSVDKIESFGDIIGDDENGDGGDDGGSSDGGKRDELFAEAAQTVVSIGQGSTSLLQRRMNIGFARAGRLMDQLERAGVVGPSKGSKVREVLMRPEDLADII

SEQ ID NO: 51171 - DNA, 1251 bp, Unknown
  Obtained from environmental sample
  misc_feature (1)..(1251): n is a, c, g, or t
atgcctaagtacaagttaagtccagaagaacgagccgccgagaaagctcgtcgtgaacaactcactacattaatgtcccagtttaatatcaatggggtgagcgacttccgaggcctattcaaggagatggtaggggtcttcctagagaacggcctagaaggcgagttagaagacgaactgggctacagcaaatacgactaccgtaacaaagagacggagaacagccgcaacggccacaccagcaaaagccttaaaaccagcaacggcgagcttgagatcaaggttccgcgtgaccggaacggcgatttcgagccccaggtggtgaagaagcaccaaggcagcctcagcaacgagatcgaggataagatcctctcgatgtacgccaagggtatgacgcagagcgacatagaggggcatattcgcgagatttacggcttagaatgctctgagagcacgataagccgagtcacggacaaggttcttccggtgatacgggagtggcaagcacgtccgttggaagcggtctacgccgtggtgtttatggacgcgatccatttccacgtgcgttccgagggcagcgtggtcaagaaagccgtctatatcgccatcgggataagcgccgccggcaaaaaggatgttctgggtatgtgggtgggcgagaacgagagcgccaagttttgggccaccgtgctgaacagcctgaagaaccgcggcgtccaagacatcctgatcgcctgcgtggacgggctaaccggcttcacgaacgcgatagagagcgtatatccccaaacggtgattcagaattgcataatccaccagatccgcaattcgaccagatttgtttcgtacaaggacatcaaggcgctaatggccgatctgaagcgcatctacggcgcggtggatgagcagacggcgctttcggaacttgacgcgttcgcgggtatttgggataaaaagtaccctaaaatcgcggacagctggcgtgccaactgggcgaatctgtccacgtatttcaagtacccgcaggaagtcagaacgctgatttacaccacaaacgccatagaaggctttaaccggcagcttcggaaagtgaccaaaagcaagggcgttttcccgactgacgacagcctgctcaagatgctctacttggcgatgattgacatcaccaagaaatggaagggaacccgcaaagactggtatcaaatccgggcgcagcttgacatctttttcccggacagactgccggaatag

SEQ ID NO: 51172 - protein, 416 aa, Unknown
  Obtained from environmental sample
  DOMAIN (15)...(395): Transposase, Mutator family
  misc_feature (1)..(416): Xaa is any amino acid
MPKYKLSPEERAAEKARREQLTTLMSQFNINGVSDFRGLFKEMVGVFLENGLEGELEDELGYSKYDYRNKETENSRNGHTSKSLKTSNGELEIKVPRDRNGDFEPQVVKKHQGSLSNEIEDKILSMYAKGMTQSDIEGHIREIYGLECSESTISRVTDKVLPVIREWQARPLEAVYAVVFMDAIHFHVRSEGSVVKKAVYIAIGISAAGKKDVLGMWVGENESAKFWATVLNSLKNRGVQDILIACVDGLTGFTNAIESVYPQTVIQNCIIHQIRNSTRFVSYKDIKALMADLKRIYGAVDEQTALSELDAFAGIWDKKYPKIADSWRANWANLSTYFKYPQEVRTLIYTTNAIEGFNRQLRKVTKSKGVFPTDDSLLKMLYLAMIDITKKWKGTRKDWYQIRAQLDIFFPDRLPE

SEQ ID NO: 51173 - DNA, 408 bp, Unknown
  Obtained from environmental sample
  misc_feature (1)..(408): n is a, c, g, or t
gtggcaagcacgtccgttggaagcggtctacgccgtggtgtttatggacgcgatccatttccacgtgcgttccgagggcagcgtggtcaagaaagccgtctatatcgccatcgggataagcgccgccggcaaaaaggatgttctgggtatgtgggtgggcgagaacgagagcgccaagttttgggccaccgtgctgaacagcctgaagaaccgcggcgtccaagacatcctgatcgcctgcgtggacgggctaaccggcttcacgaacgcgatagagagcgtatatccccaaacggtgattcagaattgcataatccaccagatccgcaattcgaccagatttgtttcgtacaaggacatcaaggcgctaatggccgatctgaagcgcatctacggcgcggtggatga

SEQ ID NO: 51174 - protein, 135 aa, Unknown
  Obtained from environmental sample
  misc_feature (1)..(135): Xaa is any amino acid
MASTSVGSGLRRGVYGRDPFPRAFRGQRGQESRLYRHRDKRRRQKGCSGYVGGRERERQVLGHRAEQPEEPRRPRHPDRLRGRANRLHERDRERISPNGDSELHNPPDPQFDQICFVQGHQGANGRSEAHLRRGG

SEQ ID NO: 51175 - DNA, 921 bp, Unknown
  Obtained from environmental sample
  misc_feature (1)..(921): n is a, c, g, or t
ttgacgtccgcttcgaaggcgaaaaccgtctggcttacgcaaaaaggcatggcggagttgttccagaaggatgtccgcactgtcagcgagcatataaagtccattttcgatgaaggtgagcttctgcctgagtcaggtatccggaaattccggataactgcaagcgatggaaaaaactacgaaacacagcattacaatctggacgtcatcatttcggtcggctaccgggtacattcattgcgaggcacgcagttccgcatctgggccacgcggcagctccgggagttcatcgtcaaaggttttgtgctggacgacgagcgcctgaaaaatccggatcaaccctttgattattttgaagaactcctgcgccgcatccaggatatccgcacctcggagcggcgtttttaccaaaagatcaccgatatttacgctaccagcgtggactacgaccccaccacagaaatgagcctcgcctttttcaagaccgtgcagaacaaaatgcactgggccatcacgggacagacagcggcggagatcatccacagccgcgcggacagcgacaagccccacatgggcctgacatcctggcgcgggggcaaagtacgcaagcaggacgtgggcattgccaaaaactacctgaacgaggaggagcttttggccctcaacagtctggtggaacaatacctcctgttcgccgagcgccaggccggacgccgcgcccccatgcacatggccgactggatagccaagctggatgactttttacggctgaaccgggaaaacattctcacccatgccggcgctatctcgcacgaactggcgctggcccgcgccgagcaggaatacgaaacattccacgagcggcgccaacgcgccgcccgcagcctggagaacgattttgacaaacacatcaaggcgtga

SEQ ID NO: 51176 - protein, 306 aa, Unknown
  Obtained from environmental sample
  misc_feature (1)..(306): Xaa is any amino acid
MTSASKAKTVWLTQKGMAELFQKDVRTVSEHIKSIFDEGELLPESGIRKFRITASDGKNYETQHYNLDVIISVGYRVHSLRGTQFRIWATRQLREFIVKGFVLDDERLKNPDQPFDYFEELLRRIQDIRTSERRFYQKITDIYATSVDYDPTTEMSLAFFKTVQNKMHWAITGQTAAEIIHSRADSDKPHMGLTSWRGGKVRKQDVGIAKNYLNEEELLALNSLVEQYLLFAERQAGRRAPMHMADWIAKLDDFLRLNRENILTHAGAISHELALARAEQEYETFHERRQRAARSLENDFDKHIKA

SEQ ID NO: 51177 - DNA, 876 bp, Unknown
  Obtained from environmental sample
  misc_feature (1)..(876): n is a, c, g, or t
atgtcggaagacctaaacgccggcccaaaggtaaaccgtgagttcaaaaactccgtcttcacgctcctattcaacgacgtggaggctatccgcgacattgccggcgcggtcggcgctatgttaggtaaagaaatcaatcccaatacgcctataaagaagaccactctccaaaacgcgctgttaggcggcaagctcaacgacctgtcgtttgtactggacgataagctcatcgtcttaatcgaacaccaatcgacaatcaataaaaatatgccgctgcgtatgctgcactatatcagcgaaatatacaatcacctatacgacaagaaagatttgtacaagagagagaagatacctatccccaaaccggtattcattgtcctctacaacggtgaagaaaatataaaggattttgaagaatacctattatccgatttattcaaagacttcgacatatcgaaagaaccgctatacttggaattgagagtacaggtacgcaatatcaacaaaggccatagcgcggaaatcgtaaagcaaagcccgctgctccgtgattacgtggcgtttgtcgaagaggtacgcgaagccaacaaagaagagggggcaagccccgaactggcaatggaaaaggccatagaaaactgtatagaaaaaggaatattaacaatttttttaacccgccataaagaggaggttataaaaatgctcgtcgcagaatgggattacgatttagaccgggaagtcgcaaaagatgaagcccgggacgaagaacggcgcaaaatcattaaggacttttaccggataggcgttagcattgataccattgctaaagccgttgacctctcggagaggcaagtcaaagatattttgggcttgtag

SEQ ID NO: 51178 - protein, 291 aa, Unknown
  Obtained from environmental sample
  misc_feature (1)..(291): Xaa is any amino acid
MSEDLNAGPKVNREFKNSVFTLLFNDVEAIRDIAGAVGAMLGKEINPNTPIKKTTLQNALLGGKLNDLSFVLDDKLIVLIEHQSTINKNMPLRMLHYISEIYNHLYDKKDLYKREKIPIPKPVFIVLYNGEENIKDFEEYLLSDLFKDFDISKEPLYLELRVQVRNINKGHSAEIVKQSPLLRDYVAFVEEVREANKEEGASPELAMEKAIENCIEKGILTIFLTRHKEEVIKMLVAEWDYDLDREVAKDEARDEERRKIIKDFYRIGVSIDTIAKAVDLSERQVKDILGL

SEQ ID NO: 51179 - DNA, 1659 bp, Unknown
  Obtained from environmental sample
  misc_feature (1)..(1659): n is a, c, g, or t
atggaacttgaaacggctttgcgaaacgccctgggggacaaaattcccccttcttacctgtaccagcttttaaagcagctccagcagggcgacaatataaatccggcggtattcaccaccgcctgggacgatgaagcctacaacaccgtatcgggccagtcgtcaaataacagcgtaaggcttaccgatgattttatgaaggcggttctggacggcagggaatggaagctcacaagcagggtgaaaggagaaaccgaaaagatcgtcaatgccgggaaaatctgggaagacattgcccgctctacctgggcttgcgccgacccggggcttcagttccacacaacgattaacgactggcatacctgcccctctggcggcgagattagggcgtcaaacccatgctcggaatatatgttcctcgacgatacggcctgcaaccttgcctcgattaacctgtcccgcttttacgataaagccgccggaacttttaatacagagaaataccttcatgcaataaggatttggacaaccgttcttgaaatttcagttgtaatggcccaatttccttccccggaaatagccgaactgtcttataaataccgaaccctgggactgggctatgccagccttgggagccttttaatgatcatgggcctggcctacgactcccccgaaggccgcgcagttgccggtaccctttcggcgatccttacaggtgaagcctacgcccagtccgccaggatggcggcggaactcgggcctttcgcgcaatacgcggaaaactccgccgccatgctccgcgttatacgcaaccaccgcagggcgacttacaacgccccaccttctcagtacgaagggctccacacgattccccagggaatagatcccgccaaatgcatggcatcaaaatgccaggcaggcttcgatttgtcctgcctcctggacgcggcaaagaagagctgggacgatgccatgacattgggggaaaagcacggcttccgcaacgcccaggtgagcgcgattgcccccaccggaaccataggccttttgatggactgcgacactaccggggtcgagccggattttgcccttgtaaaattcaagaagctcgccggcggcggaagcttcaagatcattaaccagtccgtccccccggctctggcggccctgggctacagcgaagctgaaatcgaagccattactgcctatgcaacggggcgaaaaaccctaaagggctgtccggtcatcaacgccgaaagcctcgcggaaaaaggttttactccggaagctgttgccctggcggaagaagcgctaaaaagctcccacagcctggaagccgtatttagcccctgggttcttggcaaggattttgtcgaaaagaaactgaaaatcccccattcatctttttcgcagaacggttttagcctattaaagcacctcggcttttcatccgcagaaatcgaagaggcagaagcatacgcctgcggaaccatgggccttgaaggagcgccgggactcaagaaagagcattatcctgtttttgacaccgccacccccttcgggaaagcacggcaagcgctcaatcccctggacagcccatgtggaaatgatggccgcctgccagccttttgtttccggcgcaatttccaagacgattaa

SEQ ID NO: 51180 - protein, 552 aa, Unknown
  Obtained from environmental sample
  DOMAIN (1)...(414): Ribonucleotide reductase, barrel domain
  misc_feature (1)..(552): Xaa is any amino acid
MELETALRNALGDKIPPSYLYQLLKQLQQGDNINPAVFTTAWDDEAYNTVSGQSSNNSVRLTDDFMKAVLDGREWKLTSRVKGETEKIVNAGKIWEDIARSTWACADPGLQFHTTINDWHTCPSGGEIRASNPCSEYMFLDDTACNLASINLSRFYDKAAGTFNTEKYLHAIRIWTTVLEISVVMAQFPSPEIAELSYKYRTLGLGYASLGSLLMIMGLAYDSPEGRAVAGTLSAILTGEAYAQSARMAAELGPFAQYAENSAAMLRVIRNHRRATYNAPPSQYEGLHTIPQGIDPAKCMASKCQAGFDLSCLLDAAKKSWDDAMTLGEKHGFRNAQVSAIAPTGTIGLLMDCDTTGVEPDFALVKFKKLAGGGSFKIINQSVPPALAALGYSEAEIEAITAYATGRKTLKGCPVINAESLAEKGFTPEAVALAEEALKSSHSLEAVFSPWVLGKDFVEKKLKIPHSSFSQNGFSLLKHLGFSSAEIEEAEAYACGTMGLEGAPGLKKEHYPVFDTATPFGKARQALNPLDSPCGNDGRLPAFCFRRNFQDD

SEQ ID NO: 51181 - DNA, 918 bp, Unknown
  Obtained from environmental sample
  misc_feature (1)..(918): n is a, c, g, or t
ttgacagtatcggccgagccttcgttttggagccagatagccacggacattatagcgcaaaaatacttccgcaaagcgggcgttaagctcgacaaaatctacgaatggaaaaaatacatcgccccgcagagcgggactgaggcggaaagagccgctcggtttgatttttcgctgccggaagacggcgcggagcacgatgcccgccaggtttttcacaggctggcctatacctggacggactgggggcgaaaaaacaagtacttcgacagcgcggacgatgaaaaggcattttacgatgaaacctgctacatgctcgctcatcaaatagcggcacccaacagcccccagtggtttaacaccggcctttacgcggcttatggcatagaagggcctgctcaggggcactattactttgatccttcaagcagcacggttaagaagtcggaaaacgcctacaagcgcccgcagccgcacgcgtgtttcatcctctccgtcaacgacgatctggtaaattccggcgggataatggaccttattacgcgggaagcgaggctttttaagtacggctccgggacgggatcaaacttttcacagatcagggcgcagaacgaaaaactctccgggggcggcgtgtcgtccgggctgctttcgtttttaaagataggcgaccgctccgcttcggcaataaaaagcggaggtaccacaaggcgggcggcaaaaatggttaccctggatgtggatcatcccgatatagaagactacatcgcgtggaaagccagggaagagcacaaggtagcttcgatggttaccggttcccaaattattaataaaaaccttctggaaataaaaaaagccctggattcattcagaggcccggacggggacaggttcagcgccacaaaaaaccatggaacttga

SEQ ID NO: 51182 - protein, 305 aa, Unknown
  Obtained from environmental sample
  DOMAIN (2)...(108): Class II vitamin B12-dependent ribonucleotide reductase
  misc_feature (1)..(305): Xaa is any amino acid
MTVSAEPSFWSQIATDIIAQKYFRKAGVKLDKIYEWKKYIAPQSGTEAERAARFDFSLPEDGAEHDARQVFHRLAYTWTDWGRKNKYFDSADDEKAFYDETCYMLAHQIAAPNSPQWFNTGLYAAYGIEGPAQGHYYFDPSSSTVKKSENAYKRPQPHACFILSVNDDLVNSGGIMDLITREARLFKYGSGTGSNFSQIRAQNEKLSGGGVSSGLLSFLKIGDRSASAIKSGGTTRRAAKMVTLDVDHPDIEDYIAWKAREEHKVASMVTGSQIINKNLLEIKKALDSFRGPDGDRFSATKNHGT

SEQ ID NO: 51183 - DNA, 417 bp, Unknown
  Obtained from environmental sample
  misc_feature (1)..(417): n is a, c, g, or t
atgttatttttgcttaaaattatctatattatatatatattgtataatgtatatagtgaggttcgtatgaaagtccttgtgttggcatttctgctgttggctactcaggcattagccggtccagttagtcattttggggcacttaagcgctgtggcaaaaagatatgcggttcaaagaacggaaccgaatcaacggaaattttctttaaaggtccaagcctcttttggagcgatggtgctggaactcctttttacaattcagaaaccgtggattggtttgttgacaatatgcaaataggtattattcgtgcagcaatggctataaaattttacgataacggtagcgagccggtgaacaaacctaatggagttgctggatatttgcaaggcaacaaatcgggccaaaagaattggtaa

SEQ ID NO: 51184 - protein, 138 aa, Unknown
  Obtained from environmental sample
  misc_feature (1)..(138): Xaa is any amino acid
MLFLLKIIYIIYILYNVYSEVRMKVLVLAFLLLATQALAGPVSHFGALKRCGKKICGSKNGTESTEIFFKGPSLFWSDGAGTPFYNSETVDWFVDNMQIGIIRAAMAIKFYDNGSEPVNKPNGVAGYLQGNKSGQKNW

SEQ ID NO: 51185 - DNA, 993 bp, Unknown
  Obtained from environmental sample
  misc_feature (1)..(993): n is a, c, g, or t
atggaaaaaatactcacattttcggatttagaaacacaaaacaagaaaaagcggactcgccgcgatgaatttttgagcaagatggaatccatcgttccatggtcagacatagtctcgctagtcaagccttactattattccaaccataaaggtcgtcccgctacacggcttgaagttatccttcggatgtattttctccagatatggttttccatgagcgatgaaggccttgaagattccatctacgacagcaaggcattcagctcattcatgggagttgatttatccagtgtccccgatgcgaccgttctgtgcaatttccgcaagatagtgaacgaaaacggccttggcggcaagatgctttcccttttgaacgcgaagatggagaagaacggtctgataatgcatggcgggacgataatggatgccaccatccacgctgcgcccaaatccacgcgcaatgcggagcagtctcgcgaccccgagatggcaagcacgaagaagcacggcaactggcatttcggagccaagtcccacataggcgttgatgccggcaccggccttgttcacagcgtggaggtcactcccgccaatgtgcatgacgtggtgatggcttgccagcttatacgacccgatgatgatttcgtctccggcgacagtgccttcgttggtttggagaatcgcgcggagatagtgaacactcccgtgttggcatcaaaggaatacaggattgtcaagcgtccatcgttctggaggaagcggagtcaaagcgatgtggcgttggagtttgacaggaatgatgagcggcggctcataagcagaaggcagaaggttgaatatgtgttccacgtgctgaaggatattttcaggttcaggaaattgccatacaaaggcattgccaagaatgcggagcggcttatggctacctacgccaatgccaacctctatatgcttgcggtagccgggcggcggttctgtccgctgctgggctga

SEQ ID NO: 51186 - protein, 330 aa, Unknown
  Obtained from environmental sample
  DOMAIN (138)...(317): Transposase DDE domain
  misc_feature (1)..(330): Xaa is any amino acid
MEKILTFSDLETQNKKKRTRRDEFLSKMESIVPWSDIVSLVKPYYYSNHKGRPATRLEVILRMYFLQIWFSMSDEGLEDSIYDSKAFSSFMGVDLSSVPDATVLCNFRKIVNENGLGGKMLSLLNAKMEKNGLIMHGGTIMDATIHAAPKSTRNAEQSRDPEMASTKKHGNWHFGAKSHIGVDAGTGLVHSVEVTPANVHDVVMACQLIRPDDDFVSGDSAFVGLENRAEIVNTPVLASKEYRIVKRPSFWRKRSQSDVALEFDRNDERRLISRRQKVEYVFHVLKDIFRFRKLPYKGIAKNAERLMATYANANLYMLAVAGRRFCPLLG

SEQ ID NO: 51187 - DNA, 609 bp, Unknown
  Obtained from environmental sample
  misc_feature (1)..(609): n is a, c, g, or t
ttgcctacatttgatgtaaattggtatgatgcgatagtattttgcaacaaatttagtatgatgatgggactaactccggcataccgcattccggcatttaacaacagcgccgaccctgcagactggggaaaaataccaagcaaaaaaaaggaccagaacataccgctgtgggatactgttgaaatagtccccggttcaaacgggtatcgtctgccgactgaagcgcaatgggaatacgcgtgccgcgccggaacaacaaccgcgtataatacgggagataccatcagtaacaatacagggtggtatcaagagtggctcggatcaaaaaatatgatactgcataaggtgggaatgttaccggcgaatgcctggggattgtatgacatgcacgggaacgtgaaagaatggtgctgggactggtacgacgaaaattattatttgcatagtccggcgaataatccaacgggcccgtcttcagggacatactgtgtgatacgcggaggatcgtatcaggattttcatatacctaaattacgttctgccgatcgttcagactattataaagaaacgaggtggcatactattggtattcgtcttgttcgtccctaa

SEQ ID NO: 51188 - protein, 202 aa, Unknown
  Obtained from environmental sample
  DOMAIN (18)...(201): Domain of unknown function (DUF323)
  misc_feature (1)..(202): Xaa is any amino acid
MPTFDVNWYDAIVFCNKFSMMMGLTPAYRIPAFNNSADPADWGKIPSKKKDQNIPLWDTVEIVPGSNGYRLPTEAQWEYACRAGTTTAYNTGDTISNNTGWYQEWLGSKNMILHKVGMLPANAWGLYDMHGNVKEWCWDWYDENYYLHSPANNPTGPSSGTYCVIRGGSYQDFHIPKLRSADRSDYYKETRWHTIGIRLVRP

SEQ ID NO: 51189 - DNA, 438 bp, Unknown
  Obtained from environmental sample
  misc_feature (1)..(438): n is a, c, g, or t
atgccaaaggtaaaggtttatttggataattgcgcttttaaccgtccctatgatgatcaatctttattaagaaactatctggaagcagaagcaaaaacatatatacaaaaagaaatcctacaaaataattttgaacttgcttggtcttatgtaatggattatgaaatttcttttaaccctttttttgatagaagaaatcaaatactaaagtggaaagatatcgccgtaacagatatttcagaatcaaaaaaagttattgccgcggcaaatgatataattaaaaaaaatataaaacctaaagattcattacatttagcttgtgcaatagaagcaaaatgcgattattttataacaactgataataaaattttaagtaaaacaatagataatattatcattattgatccggtaaattttataagaaagtatgaggtataa

SEQ ID NO: 51190 - protein, 145 aa, Unknown
  Obtained from environmental sample
  misc_feature (1)..(145): Xaa is any amino acid
MPKVKVYLDNCAFNRPYDDQSLLRNYLEAEAKTYIQKEILQNNFELAWSYVMDYEISFNPFFDRRNQILKWKDIAVTDISESKKVIAAANDIIKKNIKPKDSLHLACAIEAKCDYFITTDNKILSKTIDNIIIIDPVNFIRKYEV

SEQ ID NO: 51191 - DNA, 867 bp, Unknown
  Obtained from environmental sample
  misc_feature (1)..(867): n is a, c, g, or t
atgctccgcgtaatacgcaaccacagacgggccgtgtacaacagccctgaagcggagtatgaggacctacacaccataccctgcggaattaaccaggaaagctgcccggcatatctgctggacgcggcaaaggccgcctgggatcgagcgctggaacttggcaagacccacggctaccgtaacgcccaagttactgccatcgccccaaccggcactataggcctgttgatggactgcgacaccaccggtgtcgagccggattacgcccttgtaaaattcaagaagctcgccggcggcgggtacttcaaaattatcaaccagtcggttccccttgctctggaagcgctgggctattcgccgcaattaatagaagaaattatcgcgtatgccaccggctataaaacgcttaacggcgcgccctatatcaatcccgatacgcttaaggcaaaatcttttaccccggaagcgattgccgccgccgaagacgcggtcaaaacagcactgaacctggaaggtgtttttaccacctggacccttggcagggattttgttgagaagatcctccgcatcccggaatctacatggtcgctgccgggctttagtctgcttaagcacattggctttagcgcggaggatattgctgacgcggaactctacgcctgcggaaccatggggctcgaaaacgccccgggcctgaaacaagagcattacgcggtttttgacaccgcgacgccgtccggcaaaaacggcaaacgctcgatttcatggacagcccacatcggaatgatgtctgcggtgcagccttttatttccggggctatttccaagacaatcaatatgccccactcgcaaactacgaagacgtaa

SEQ ID NO: 51192 - protein, 288 aa, Unknown
  Obtained from environmental sample
  misc_feature (1)..(288): Xaa is any amino acid
MLRVIRNHRRAVYNSPEAEYEDLHTIPCGINQESCPAYLLDAAKAAWDRALELGKTHGYRNAQVTAIAPTGTIGLLMDCDTTGVEPDYALVKFKKLAGGGYFKIINQSVPLALEALGYSPQLIEEIIAYATGYKTLNGAPYINPDTLKAKSFTPEAIAAAEDAVKTALNLEGVFTTWTLGRDFVEKILRIPESTWSLPGFSLLKHIGFSAEDIADAELYACGTMGLENAPGLKQEHYAVFDTATPSGKNGKRSISWTAHIGMMSAVQPFISGAISKTINMPHSQTTKT

SEQ ID NO: 51193 - DNA, 1044 bp, Unknown
  Obtained from environmental sample
  misc_feature (1)..(1044): n is a, c, g, or t
atggacagcccacatcggaatgatgtctgcggtgcagccttttatttccggggctatttccaagacaatcaatatgccccactcgcaaactacgaagacgtaaagggcgcgtatatgctttcgtggaagcacggccttaaagcagtggccctgtaccgagacggatcaaagctttcacagccgctttcatcgttcgcacccggaaccgatcagttagccgacaccatacttaaagttgaacggggccttgatatgccgccgccgcagattgtcgaccggagagcccccgcccgcggactgcgaaggctcctgccaagccgcagaatgggttacacgcagaaggcgaaaataaacacccacacaatttacatccgtaccggcgagtacgaagacggcagtctcggcgaaatctttcttgatatgcaccgcgagggcgcggccttccgcagcctgctgaacagtttcgccattaccgtctcgcttggattgcagtacggcgtaccgctggaagaatatgttgacgctttaaccttcagcaaatttgagccgaacggcccggtacagggtcatgattatgtaaagatgacaaccagcgtgattgattacattttccgcgacctggcgataagctatcttaaacgctacgatctcggccaggtgaagcccgaggatctcatccccaccgctaccaagagcgatatagcggactcaggcgaaacaaaacaacgcgtcagtgacaaacaaagcgccgggttcaggccggccggatcctctggatctgcaggtctgctgtcggagcaaaaaacgctcccggcctcccccggcctttccggcagggctgaaggcctcaaggaaactacaaaaggattggcaggaagcgccgaggcatatcgccaggcaatttccacgcagaccgtccagccgcccgttcaggtgcttgctcagtcccaccaggagcagagtgaattggcaaaaatcgctcaagcccggattaagggttatgagggagaccccgtgcccctcctgcggtttctttcactttga

SEQ ID NO: 51194 - protein, 347 aa, Unknown
  Obtained from environmental sample
  misc_feature (1)..(347): Xaa is any amino acid
MDSPHRNDVCGAAFYFRGYFQDNQYAPLANYEDVKGAYMLSWKHGLKAVALYRDGSKLSQPLSSFAPGTDQLADTILKVERGLDMPPPQIVDRRAPARGLRRLLPSRRMGYTQKAKINTHTIYIRTGEYEDGSLGEIFLDMHREGAAFRSLLNSFAITVSLGLQYGVPLEEYVDALTFSKFEPNGPVQGHDYVKMTTSVIDYIFRDLAISYLKRYDLGQVKPEDLIPTATKSDIADSGETKQRVSDKQSAGFRPAGSSGSAGLLSEQKTLPASPGLSGRAEGLKETTKGLAGSAEAYRQAISTQTVQPPVQVLAQSHQEQSELAKIAQARIKGYEGDPVPLLRFLSL

SEQ ID NO: 51195 - DNA, 1296 bp, Unknown
  Obtained from environmental sample
  misc_feature (1)..(1296): n is a, c, g, or t
ttgctcatcaccgtgctgggtctcgtgttaattcttctggcaagaagccgcaccgcgagcaagcatttggaaaaactggtaaacttaaggactagcgccctttcacttgagacatccaaacttaaaacggtaattggttcaattcccgatcttatgttctgcaaggatacaaagttaaaatacacgcagtgtaacaaatactttgaagaatttatgggcgtttctgaagaagagcttttgaatatgacggacgcagaaggcacatggctcaccccggaagaggtggagaggattcataatatagaaaagaatgtaatagaaaataaaaagatagaactctttgaagagaaagtacgctccgctaaaaccggaaatgaatgttattttgaaacggtcaaagcccccattttgcaaaacggcaaagtcgtagggttaatcgccattatacgtgacattacccagcgcaaaaaaacagaaagggaactttccttcaagacttcacagcttgaaatgattattgattcaattcccgacggcatgttttgcaaggatatagaattaaaatacatacaatgtaacaaggtatttgaaagttttacgggtgtcagtgaagaatatattcttggcaagtccgacaaagaggaaggcagctggttatcaaaagatgttgttgaaaaaattaatcgtatagaacggactatacttgatgaaggccggagctttacctttgaagaaacagtcccccttgttaacggaaaagaaatcatttttgaaacgactaaagccccgattaaacaggacggcaacatcgtagggttaatagccattgtacgcgacataacccagcgcaaaaaaacggaaaaggaactttccttcaagacttcacagcttaaaatgattgttaattcagttcccgacagcatgttttgcaaggatatagatttaaaatacatacagtgtaacaaggtctttgaaagttttatgggcgtcagtgaagaacatattctgggcaagtccgatgaggacggcgactggttatctccggatgatattaaaagaatttatgatatagaacgggctgtaattgatgaaggtcggagcattaccattgaagaaacagtccattcgcccgttaccggaaaagaaagcgtttttgaaacgattaaatccccgattatgcaggacggcgtcgttgttgggttaatcgccgttatacgcgacatttcccggcgcaaggaaatggaagaagaaattcttgccgcttcaaagccaagtccgccttccttgccaatatga

SEQ ID NO: 51196 - protein, 431 aa, Unknown
  Obtained from environmental sample
  SIGNAL (1)...(19)
  DOMAIN (189)...(283): PAS fold
  misc_feature (1)..(431): Xaa is any amino acid
MLITVLGLVLILLARSRTASKHLEKLVNLRTSALSLETSKLKTVIGSIPDLMFCKDTKLKYTQCNKYFEEFMGVSEEELLNMTDAEGTWLTPEEVERIHNIEKNVIENKKIELFEEKVRSAKTGNECYFETVKAPILQNGKVVGLIAIIRDITQRKKTERELSFKTSQLEMIIDSIPDGMFCKDIELKYIQCNKVFESFTGVSEEYILGKSDKEEGSWLSKDVVEKINRIERTILDEGRSFTFEETVPLVNGKEIIFETTKAPIKQDGNIVGLIAIVRDITQRKKTEKELSFKTSQLKMIVNSVPDSMFCKDIDLKYIQCNKVFESFMGVSEEHILGKSDEDGDWLSPDDIKRIYDIERAVIDEGRSITIEETVHSPVTGKESVFETIKSPIMQDGVVVGLIAVIRDISRRKEMEEEILAASKPSPPSLPI

SEQ ID NO: 51197 - DNA, 1287 bp, Unknown
  Obtained from environmental sample
  misc_feature (1)..(1287): n is a, c, g, or t
gtgctatcagtaatgacatcatattcccaaaaagagggcgttatgaaggttcataatgattttaccttgtattttcgggttatcccttcggggaaacgggtcgtgtatttctatgcctatgacgaaaacggcaagaggacacagggaaggtccaccgggcagaccaacaaaactgcggcaagggttgtggtgaacaggcttttgaaagaaggggcattgctgccgaaaaaagacaatgtgcctaccttcggcgaatacgccgcgaactggtgggattgggaaaaatgcgaatacctgaaaaagaggcggaagcgggctaacctgacccaaagctactccgaccatatgaagcggaatttggataaggtcgtgctgccgtatttcaaaaatatgaaaatggacgcgattaccccagcggcgattgaagcgtttctggacagccttataaagcaaaaatacaagaataccacgatcaacggctactacggcactttcaaaaccatgatgattgaagccgtcgagcgcggggttatagccacagacccaaccgccaaagtcgagaggctgataaacgaccgcgatgaaatcaagattattaccccccttgaattcaaaaagctgtttgtcggggattggagcaaagtctgggaaggaaaccgcatcgcctgtaccgtgaacaagctggcggctctgtcgggcatgagggtatcggagattttggggcttaaagggagctgcctgttcgacgaccatatttacgtctgtatgcagcatgacatttacggctacaggccgaccaaaacaaaagacaggcataacataccgcttcccgcttccctgattgccgatttgaagctgcttaaagaaacaagcggggacggctacctgttttccactaacggcgggggcagccccatttgcaggaaaactgttttgatgtatctgcgaaaagcgctggtaaatatcgggattaccgccgccgagattaaagagcgcaatttgcatatccacgcatggcggcattttttcaatacggaaatgctcaagggcgggatgactaccgaacaggcgcaggctataaccacgcataaaagcgaaaggatgacggaacggtacacgcattttgacccgcttgaatttgtaaaggcgaaggaaattcaggaagccttgttgcagcctgtcggcgaaaaggcgcaagggatggaagcggaaaaaaaggaaatgccgcttaatgtgttttccttccctgtgtccggaactccgcaaggggaacggaaacaggcttag

SEQ ID NO: 51198 - protein, 428 aa, Unknown
  Obtained from environmental sample
  DOMAIN (209)...(382): Phage integrase family
  misc_feature (1)..(428): Xaa is any amino acid
MLSVMTSYSQKEGVMKVHNDFTLYFRVIPSGKRVVYFYAYDENGKRTQGRSTGQTNKTAARVVVNRLLKEGALLPKKDNVPTFGEYAANWWDWEKCEYLKKRRKRANLTQSYSDHMKRNLDKVVLPYFKNMKMDAITPAAIEAFLDSLIKQKYKNTTINGYYGTFKTMMIEAVERGVIATDPTAKVERLINDRDEIKIITPLEFKKLFVGDWSKVWEGNRIACTVNKLAALSGMRVSEILGLKGSCLFDDHIYVCMQHDIYGYRPTKTKDRHNIPLPASLIADLKLLKETSGDGYLFSTNGGGSPICRKTVLMYLRKALVNIGITAAEIKERNLHIHAWRHFFNTEMLKGGMTTEQAQAITTHKSERMTERYTHFDPLEFVKAKEIQEALLQPVGEKAQGMEAEKKEMPLNVFSFPVSGTPQGERKQA

SEQ ID NO: 51199 - DNA, 735 bp, Unknown
  Obtained from environmental sample
  misc_feature (1)..(735): n is a, c, g, or t
atgacgtatttaaccggctttcatgccattgaagaacgaatcaaatccgccaagaactcatcctcggcttgcggccccttgctgttggcaaaggcaggtccccgcgcgcgggaactggttacgctggccggcaactgcaaagtccgcgtagaccgggtgggaacttttgagcttgaccggcttgcgccggataaccggggcattgccctgcaggttgaggaagttgaagaaaacggttccgtcattgaccttgaagaatttttaggcgaactgggggatcgcgtggatgttctggcgcttatccttgacgagattaccgatccccacaattacggagcgatactccgttcctgcgatcagttcggcgttgatctggtgataagccgtaaccgccgcaacgccaaacacgccgatgtccttgccaaaacatcggcgggaacaatagcatgggttccccaggcggaaacggcaaatctggtgcgggctgcgcagcagcttaaaacagcgggcttctggctctacggcgcggatatgcagggagaaccggcatacaccaaagacctgcggggaagggtggcgcttattctcggcagtgagggaacgggcatatcccgtctgctgaaagaaacctgcgacggcatggtgggaattccttcttatggcagaattgattcgctgaatgtgtcggtagccgccggggtgctgttgtatgaagtacggcggcagcgggagtag

SEQ ID NO: 51200 - protein, 244 aa, Unknown
  Obtained from environmental sample
  DOMAIN (3)...(78): RNA 2'-O ribose methyltransferase substrate binding
  misc_feature (1)..(244): Xaa is any amino acid
MTYLTGFHAIEERIKSAKNSSSACGPLLLAKAGPRARELVTLAGNCKVRVDRVGTFELDRLAPDNRGIALQVEEVEENGSVIDLEEFLGELGDRVDVLALILDEITDPHNYGAILRSCDQFGVDLVISRNRRNAKHADVLAKTSAGTIAWVPQAETANLVRAAQQLKTAGFWLYGADMQGEPAYTKDLRGRVALILGSEGTGISRLLKETCDGMVGIPSYGRIDSLNVSVAAGVLLYEVRRQRE

SEQ ID NO: 51201 - DNA, 594 bp, Unknown
  Obtained from environmental sample
  misc_feature (1)..(594): n is a, c, g, or t
atggggttaggtccacttgttcgtgtagaaaaacgggactacccggaggatgccttacgggaggctctgcttaacgctctggttcacagggattattctttttcaagcagtacccttatcagcatatttgatgaccgaattgagtttgtttccataggcggtttgccaaagggtgtttcacttgacgatatactgttaggtctttctgtacctcgcaatgagaatcttgccaatgttttttaccggctccgtttgatagaagcctacggcaccggcataccaaaaatcatgcgtagttatgctgactttatgagaaaaccggaactacaagctacaggcaatgcgttcaagataaccctcccaaatagaaatacaggcagccgcaagaaaatcaataacaaagtttcccttaatgagaatgaggaaaaagtcatcgccttatttaaaaagcaaactgaaattgtaaggaaggacgttgaggctaaccttggaatttcccaagctatggcggtacggattttacgtggattgctagataagggaaatatccgggcaataggagggggaaagaagacacgttatgggctcttgtga

SEQ ID NO: 51202 - protein, 197 aa, Unknown
  Obtained from environmental sample
  misc_feature (1)..(197): Xaa is any amino acid
MGLGPLVRVEKRDYPEDALREALLNALVHRDYSFSSSTLISIFDDRIEFVSIGGLPKGVSLDDILLGLSVPRNENLANVFYRLRLIEAYGTGIPKIMRSYADFMRKPELQATGNAFKITLPNRNTGSRKKINNKVSLNENEEKVIALFKKQTEIVRKDVEANLGISQAMAVRILRGLLDKGNIRAIGGGKKTRYGLL

SEQ ID NO: 51203 - DNA, 330 bp, Unknown
  Obtained from environmental sample
  misc_feature (1)..(330): n is a, c, g, or t
atgcaaggagaggaaaagatgagaaagaaaagtttagaaaggcgtgtttacacgaaggaattcaaagccgaagcagtagtattggccgagaagcgagaaaagccaataagccagattgcaaaggatctgggggtcagggagaaactgctgtaccgctggatgcaggtgtcacgggagacggcaggaagcggtatacaaacgtttccaggccacgggcggccgcgggacgcggaactcgcccgcttgcggaaagagaacaaggctctgcgggaagcgaatgaaatcctaaaaaaagcggcggtcatcttcgcgcaaggggaaccccagtaa

SEQ ID NO: 51204 - protein, 109 aa, Unknown
  Obtained from environmental sample
  DOMAIN (14)...(96): Transposase
  misc_feature (1)..(109): Xaa is any amino acid
MQGEEKMRKKSLERRVYTKEFKAEAVVLAEKREKPISQIAKDLGVREKLLYRWMQVSRETAGSGIQTFPGHGRPRDAELARLRKENKALREANEILKKAAVIFAQGEPQ

SEQ ID NO: 51205 - DNA, 663 bp, Unknown
  Obtained from environmental sample
  misc_feature (1)..(663): n is a, c, g, or t
atggcatatcaattcatacaagcaaacaagggtcgatataccgttaaggagatggccgggcttttgggggttagccgcagcgcctattaccaatgggcgcgcaacggggtgtcgcagcagcgcgagacagccgatgacgaactgctgcgccttatccgggaaatagtggcgaagcaccaccgccggtacggcagcccccggatacgccgggaactgcgcgatgtctacgggaaacgggtcagcgcgaagaaagtggcccgtttgatgcgggaaaacggcctgaacgcccgctggcgcagggcgtttatcaggacgaccgactcaaaacatacccttgcggtctgtgaaaacatactcaaccgtgagtttcatgctgaaaaaggcgggcaaaaatgggtttcagacattacgtacctgcgtacggtaaacggctgggtgtacctgaccgtggtgcttgacctgtacgaccggaaggtcatcggatgggcgctcagcgccggtatggaagccgctgataccactgtcgccgccttgagaatggcggtaaaaaaccgtacgcctggggatgggctgatattccattcggacaggggcgtccagtattgcgcccaatctttccgcgccgtgtacgcgaaatctgtccttcggtccgccagagcatga

SEQ ID NO: 51206 - protein, 220 aa, Unknown
  Obtained from environmental sample
  misc_feature (1)..(220): Xaa is any amino acid
MAYQFIQANKGRYTVKEMAGLLGVSRSAYYQWARNGVSQQRETADDELLRLIREIVAKHHRRYGSPRIRRELRDVYGKRVSAKKVARLMRENGLNARWRRAFIRTTDSKHTLAVCENILNREFHAEKGGQKWVSDITYLRTVNGWVYLTVVLDLYDRKVIGWALSAGMEAADTTVAALRMAVKNRTPGDGLIFHSDRGVQYCAQSFRAVYAKSVLRSARA

SEQ ID NO: 51207 - DNA, 1461 bp, Unknown
  Obtained from environmental sample
  misc_feature (1)..(1461): n is a, c, g, or t
ttgggagcagactacggcagaggcttatataagcaactgcaagagacgatagaaaaagtagaaagactgacggcggaaatccgcgaaataaaatcagcgcatcaaatagaaattgcaggcctgaaagcagagaatgaaagcctgcggaaagaaaacgccgccctaagaaccgaaaaccaaaagctgaaagccatcatcaacaaagacagcagcaactcaagcaagcccccatcttctgacgggttcaagaagatattcaacagccgcgaaaaatcaggcagaaaacccggcgggcaaacgggccatccgggcagcgtcccggttctctttgagaaccctgaaaacattataaaccacaagcgggaaagatgctgttgcggcggcacagtcgcatatggagaagagtatcaggcgaagcagacagtggaactggaaatcagggcgaaggtaaccgagcaccgcagttatacgggcgtttgcgagcgctgcaacgcaacggtacaaaacgatatgccgttacacggtacaatcacctacggcgaaacggtaaaagcgtttgtggctatgctcagcagcgaagggctggtctcaataagccgcatacaggcgatgctttttgaaataaccggcggggcaatcgatctgtccgagggcactattgcgaagtggaacaaggaattaagcggcaaattagcgccatttatcgagaaaatgaaggaaaagctgctgacgcagcctgttttacggaaagacgagacagggatcagaatagccggtagcctgcaatggctgcacgtgctgagcaatgaggcgtatacgctgtatttttcacataaaaagcggggaaatgaagcggacaaggaagccggcatactgcccgcgtacagcggggttcttgtacacgatcacctcaaaggactgtacagtttcacctgcggacatgcggaatgtaacgcccatattctgcggtatttgaaatccgctgcggaaataaataaatgcgcgtgggcggttgccatgatagcgtttttggttgaggccaacaatatcgtgaaagagcataaggcaaagaatattccggcgcttgacaatgcgcttctggccgaatgctacgccggttacgataagattcttgaacaggggcgccttgagttttttcaaggcgggaagaaggattacaacagcgaagacatgaagcttttacggcgtctaaaggaatataaacgcgaacacttgaggttcctgtcagatttccaggttccttttgacaacaaccttgcggagcgtgatctgaggatgataaagagcaaaacaaaagtgtccggctgtttcaggggcaatgagggaggcaccgttttcgctaatatcaaaagctacacctcaactttgagaaagaattccaggaatattttcaacggcttaaaaaatgccttcttgggtctgcctttttcctgggcttga

SEQ ID NO: 51208 - protein, 486 aa, Unknown
  Obtained from environmental sample
  DOMAIN (129)...(321): Transposase IS66 family
  misc_feature (1)..(486): Xaa is any amino acid
MGADYGRGLYKQLQETIEKVERLTAEIREIKSAHQIEIAGLKAENESLRKENAALRTENQKLKAIINKDSSNSSKPPSSDGFKKIFNSREKSGRKPGGQTGHPGSVPVLFENPENIINHKRERCCCGGTVAYGEEYQAKQTVELEIRAKVTEHRSYTGVCERCNATVQNDMPLHGTITYGETVKAFVAMLSSEGLVSISRIQAMLFEITGGAIDLSEGTIAKWNKELSGKLAPFIEKMKEKLLTQPVLRKDETGIRIAGSLQWLHVLSNEAYTLYFSHKKRGNEADKEAGILPAYSGVLVHDHLKGLYSFTCGHAECNAHILRYLKSAAEINKCAWAVAMIAFLVEANNIVKEHKAKNIPALDNALLAECYAGYDKILEQGRLEFFQGGKKDYNSEDMKLLRRLKEYKREHLRFLSDFQVPFDNNLAERDLRMIKSKTKVSGCFRGNEGGTVFANIKSYTSTLRKNSRNIFNGLKNAFLGLPFSWA

SEQ ID NO: 51209 - DNA, 777 bp, Unknown
  Obtained from environmental sample
  misc_feature (1)..(777): n is a, c, g, or t
gtgcggacaagctccgccaagatgggcacggcttcaaaaaaaaagcatacaaagggaggcggcgtagtccgtaccgtccactggaatatcctggtagggcccgacgccgtggaaaccccggagcgggaaaattttgccgccgaaagggaatcgatagaaaccaccatgaggaaatttaccgccacctgcgcaaggcttagtatggcccaaatcattaactattttaccggagtaagagcgcctacgtacgaagaagaatttgtggtttgcaagggaagaagatgcgccaacctgatccacgctgcgggaatccagtcgccggggcttaccgctgcgcctgcaatcgctattgacgtggcgcgatgggcagtagaactgcttgaggcagcgggaaaaacggtgtcgcctaacgtgctgtttaaccctgtccgtaaacgcattccccatatcgccgccatgggcgacaaagaacgcattgaaatgataaggcaaaatcccgattacgggatcatcctctgccgctgcgaagaggtaagcaagggcgaaattatggacagcctcagaagggctgtgccatgcgacaccatagacggggtaaaacgccgcgtccgccccggcatgggccgctgccagggcggtttctgcgggccccttgtcttgcggatcatcgccgaggaaaaaggagtcccgcttgaaatggtgaccaaaaacggcgggcagggaaatatcctctgcgggtctactaaaattggttcaacagagggacacgcatggtga

SEQ ID NO: 51210 - protein, 258 aa, Unknown
  Obtained from environmental sample
  DOMAIN (170)...(227): BFD-like [2Fe-2S] binding domain
  misc_feature (1)..(258): Xaa is any amino acid
MRTSSAKMGTASKKKHTKGGGVVRTVHWNILVGPDAVETPERENFAAERESIETTMRKFTATCARLSMAQIINYFTGVRAPTYEEEFVVCKGRRCANLIHAAGIQSPGLTAAPAIAIDVARWAVELLEAAGKTVSPNVLFNPVRKRIPHIAAMGDKERIEMIRQNPDYGIILCRCEEVSKGEIMDSLRRAVPCDTIDGVKRRVRPGMGRCQGGFCGPLVLRIIAEEKGVPLEMVTKNGGQGNILCGSTKIGSTEGHAW

SEQ ID NO: 51211 - DNA, 507 bp, Unknown
  Obtained from environmental sample
  misc_feature (1)..(507): n is a, c, g, or t
atggtgagtgaagttgacgtggcggtcattggcggcggtcctgctggtttggcggcagcaattgcggcagagcagtccggggcaaagacggcactcatcgaacgggaggaccaccttggcggcatattgaaacagtgtatccacgacggctttggccttatccgttttggcgaaaaactcagcggccccgaatactctcaccgatatattgccgaactaaaaaaaaccggagtgtcggttcatttgcagaaatttgttatacgaataaacaatttaggagccggatttgaactaacactaagcggatcaggcggcattgaaaatttttctgcaaaaaccctcgtcctctccaccggctgccgggaaagaaccgccaggcaagccggcatctacggtacgcggcccgcagggggtattaccgccggggcagcgcatattacaccaacatcctgggacagctcccctgccgccgctgcgtggttctcggctcgggggacatcgggctga

SEQ ID NO: 51212 - protein, 168 aa, Unknown
  Obtained from environmental sample
  SIGNAL (1)...(22)
  DOMAIN (6)...(162): Pyridine nucleotide-disulphide oxidoreductase
  misc_feature (1)..(168): Xaa is any amino acid
MVSEVDVAVIGGGPAGLAAAIAAEQSGAKTALIEREDHLGGILKQCIHDGFGLIRFGEKLSGPEYSHRYIAELKKTGVSVHLQKFVIRINNLGAGFELTLSGSGGIENFSAKTLVLSTGCRERTARQAGIYGTRPAGGITAGAAHITPTSWDSSPAAAAWFSARGTSG

SEQ ID NO: 51213 - DNA, 795 bp, Unknown
  Obtained from environmental sample
  misc_feature (1)..(795): n is a, c, g, or t
gtggttctcggctcgggggacatcgggctgatcatggcgcggcgcttaacactggaaggcgcggaagtgttgggggtttatgaggccaaacctaccccgtctggcctttcgcggaacatcgcccagtgcctggatgattttaacatccccttttacaccagccggacggtcagtcgggtctttggccgcgagcggcttacgggcgtagagatcgccgccacagacgaagcgatgcggcccattcccggtacggaggaacctgttgcctgcgacgggctaatcctttcggtagggttgattccggaaaacgaattggccgaaagcctggaaattcccatcgacccgaggactaagggcccggtatgcgatcaacactgcatgacggaaattcccggcgtgtttagctgcggcaacgctctactggtaaacgacctggtggactatgtttccgaaagcggggaagaggccggagaaagcgcagcccgctttgcttactctgatattgaacaaagcacgcgaaatacgacaagtttagagttcgatagcgccttcctctgcatgagtcctcaacggctggatctggacagcctggaagaagaaacgactattttcttccgctccagagaagaaagggacgataccctggttacgtttactgtgaacggcagggagcttttcaccaaacaatattccaagctaaggccgcctgagatggaaaggatcagcttgcgtctgaaagatgctgagctgcaatccggcaacacgatcagtgcggtcatggagaactgccaatga

SEQ ID NO: 51214 - protein, 264 aa, Unknown
  Obtained from environmental sample
  misc_feature (1)..(264): Xaa is any amino acid
MVLGSGDIGLIMARRLTLEGAEVLGVYEAKPTPSGLSRNIAQCLDDFNIPFYTSRTVSRVFGRERLTGVEIAATDEAMRPIPGTEEPVACDGLILSVGLIPENELAESLEIPIDPRTKGPVCDQHCMTEIPGVFSCGNALLVNDLVDYVSESGEEAGESAARFAYSDIEQSTRNTTSLEFDSAFLCMSPQRLDLDSLEEETTIFFRSREERDDTLVTFTVNGRELFTKQYSKLRPPEMERISLRLKDAELQSGNTISAVMENCQ

SEQ ID NO: 51215 - DNA, 1074 bp, Unknown
  Obtained from environmental sample
  misc_feature (1)..(1074): n is a, c, g, or t
atgctgacggctgtctccccgcctttcctgaagagcgaatacggcgatcttgactatgcccgtaaagcgtacggcctcatggttaagcatctgaaaagaggtccgaacacgaggatcgttttctttgccacgatccatgttcccgcgacaatgctccttatggatctgctggaagagtcgggacttataagcatggtaggcaaggtaaacatggacaggaacagccccgaaaacttaagggaagaaaacgcggacgcttcccttaacgcaacaagggaatggctgaaaaaatatgccgagggcaattaccgcagcacaaaaccgatcctcaccccgcgctttatcccctcgtgcagcgacgatctgatgcggggcctttgcgcggtgcggaaggaattcaatttgccggtacagtcccatttgtcggaaaaccgcggtgagattgaatgggtcagaaaactttgcccctcaagttcgggttacggcgcggcatacaatgatttcgggctttttggttctgatccgggaacggaagcggtctcaccgacggtaatggcgcactgcgtctggtcggagcaaaatgaaattgatttgatggcaaggcagggggtttttgtggcccactgtccccagtcaaacgccaatctttcatcgggcatagccccgatgcgccgtatccttgaagcgggagtccccgccggccttggcagcgatgtcgcgggcggttcaaacagttcgattttaagggcaatctcggacgcgatacaggtttcaaaactccgccacccgctgttaggcgttaacgaaaaacccctgacaacggaagaggcttttttcctcggcacaaaaggcggcggcgaatttttcgggaaaagcggcatgggcctctgcggctcctttgagccgggttttgaatttgacgcaatagtgataaacgataaagcgccggaggcgcgcgccctcgctgcgccgtttgctctgtcagtccgtgagagactggaacgggcgatatacatctgcgacagcaaacatatcagggcaaaatatgtcagggggaaacaatgcgcgctttag

SEQ ID NO: 51216 - protein, 357 aa, Unknown
  Obtained from environmental sample
  DOMAIN (4)...(312): Amidohydrolase family
  misc_feature (1)..(357): Xaa is any amino acid
MLTAVSPPFLKSEYGDLDYARKAYGLMVKHLKRGPNTRIVFFATIHVPATMLLMDLLEESGLISMVGKVNMDRNSPENLREENADASLNATREWLKKYAEGNYRSTKPILTPRFIPSCSDDLMRGLCAVRKEFNLPVQSHLSENRGEIEWVRKLCPSSSGYGAAYNDFGLFGSDPGTEAVSPTVMAHCVWSEQNEIDLMARQGVFVAHCPQSNANLSSGIAPMRRILEAGVPAGLGSDVAGGSNSSILRAISDAIQVSKLRHPLLGVNEKPLTTEEAFFLGTKGGGEFFGKSGMGLCGSFEPGFEFDAIVINDKAPEARALAAPFALSVRERLERAIYICDSKHIRAKYVRGKQCAL

SEQ ID NO: 51217 - DNA, 1008 bp, Unknown
  Obtained from environmental sample
  misc_feature (1)..(1008): n is a, c, g, or t
atgcgcgctttagttaccattcaaagggttaaatctatcagcgggatacccgattccgattttcttgaactggcccatattatgggctggcagtgtgttgttaaaaaaggcgaattcaaacctgaagatttaggcgtttattacgaggtggacagttttcttccggtggaagaacgttacgagtttttacgcagtacttcctcgtaccgtgaaagcgcttataacgggcaaggattccgtatccgcacggtaaaattgcgcggccagctttcacagggcctgtttttaccgctagataaattccccgaactggcggggtataacgaaggcgacgacgttacggaaatactcaatgttaaaaaatggtttatgcctgaaaccgcggtatcgggcggcaccattatcggcgacaagccgggcggcgttccaacctccgatgaaatccgcctgcaatcggcgcttgagctgctggatcaactaaggggtaaaccctattacatcaccaccaaaatggacggcacctccggcacggtttattatatcgacggaaaggtcggctgctgcagccgcaacaaggagatcaaggacgaagagacctcgctctactggacgccgacctataggcacggccttaaagaaaagttggccgcgcacggtaagaacatcgtgctgaccggagagatatgcggccccggaatacaaaagaacaagctgaaactgcaacgcgttgaatggtacgtattcgacgcgatagacgtggactccggcaagtatcttccctacgacgatatgtgcaagctctgcaacgacttaggcgtttccaccgtccccttggaagagcgtggggagagcttcgcgtacacattggaaacgcttttggaaaaagccaaaggcaagtatcctagcggacaggagaaggaggggatcgtcgtcagagacgtaaacagccctaagtcggtgtcatttaaggttttaaacaatgacgcgctgctgaaagaaaaggattaa

SEQ ID NO: 51218 - protein, 335 aa, Unknown
  Obtained from environmental sample
  DOMAIN (150)...(325): ATP dependent DNA ligase domain
  misc_feature (1)..(335): Xaa is any amino acid
MRALVTIQRVKSISGIPDSDFLELAHIMGWQCVVKKGEFKPEDLGVYYEVDSFLPVEERYEFLRSTSSYRESAYNGQGFRIRTVKLRGQLSQGLFLPLDKFPELAGYNEGDDVTEILNVKKWFMPETAVSGGTIIGDKPGGVPTSDEIRLQSALELLDQLRGKPYYITTKMDGTSGTVYYIDGKVGCCSRNKEIKDEETSLYWTPTYRHGLKEKLAAHGKNIVLTGEICGPGIQKNKLKLQRVEWYVFDAIDVDSGKYLPYDDMCKLCNDLGVSTVPLEERGESFAYTLETLLEKAKGKYPSGQEKEGIVVRDVNSPKSVSFKVLNNDALLKEKD

SEQ ID NO: 51219 - DNA, 660 bp, Unknown
  Obtained from environmental sample
  misc_feature (1)..(660): n is a, c, g, or t
ttgattttcgagaagataaggaggggccgaacaatgatgaaggtaatcgcctttaacggaagcccgcactacgacggcgtagtagccaaaggaatctccataatccagcgagaactggaaaaatcgggcacgatctcggtcgagattgtccacatcggcaacaaacacatccgcggctgtatagactgccgccaatgcggagaaacccatcgctgcataatcgacgacggcgtttgtaacgaggccctcgacaaattgcagtcggcggacggaataatcctcggaagccccgtctactacggcggcgtcgccggaacgttcaaatgcttcctcgaccgcctcttcttcgccggcctcaaaatgcccttcaaagtcggcgcaaccgtcgtctccctaagacgaagcggcggcatagccgtcttccaccaactcaacaactacttcaacctcgccgaaatcataatcacccccggcatctattggaacatcatgcacggaaacagcgcccacgaaacgctggaagaccaagagggccagcaaatcatggagatccaaggccgaaatatggcgtggctgatcaaaacgctcgacgccggaaagacgatgattaaccttccaccgccgatggacgagcggaagaggactaattttatacattga

SEQ ID NO: 51220 - protein, 219 aa, Unknown
  Obtained from environmental sample
  DOMAIN (13)...(191): NADPH-dependent FMN reductase
  misc_feature (1)..(219): Xaa is any amino acid
MIFEKIRRGRTMMKVIAFNGSPHYDGVVAKGISIIQRELEKSGTISVEIVHIGNKHIRGCIDCRQCGETHRCIIDDGVCNEALDKLQSADGIILGSPVYYGGVAGTFKCFLDRLFFAGLKMPFKVGATVVSLRRSGGIAVFHQLNNYFNLAEIIITPGIYWNIMHGNSAHETLEDQEGQQIMEIQGRNMAWLIKTLDAGKTMINLPPPMDERKRTNFIH

SEQ ID NO: 51221 - DNA, 837 bp, Unknown
  Obtained from environmental sample
  misc_feature (1)..(837): n is a, c, g, or t
atgattcttgaaagacgctatgcggaacatcctgtcgacgtaaaatgctacgaaacaagggaattgcgtgagcattttctttttgacaaggtttttatcgatgatgaaataagcctttgttacacccacagcgaccgcgtggtttttggcggggcctttccaattaaaaagaaactgcgccttgaaggcggtaaggactttgggagcgatgtctttcttgacaggcgggaaattgggattatctgcatttcaggcgagggcgttatctccgccgacaaaaccgaattcaaaatgaaaaagggagatggtctttacatcggtaaggggacaaaggatgtaattttttccgccgctgataaaaaaaatccgcccaagttttaccttgccagcgccccggcccatgttacatttcccgcggttcatattcccattgaaaaggctaacccgcgtaagcttggggaagcttcgactgtgaatgtacgcacaatttatcagtatgtgcatcctgcggtctgccaaagctgccagcttgtgatgggcatgaccgtactggaagaaggctccgtgtggaacaccatgccctgccacacacatgaacgccgcatggaagtgtacctttacttcgacatgaggcctaacgccgcggtgttccacctccacggtcatccggatgaaacccgtcatattgtaatgaacaatgaacaggcggtgatttctccatcatggtcaattcattccggcgttgggacatccgcttatacgttcatttgggccatggccggggaaaaccaaacctttgacgatatggacatcctgcntacggcggaattaaggtag

SEQ ID NO: 51222 - protein, 278 aa, Unknown
  Obtained from environmental sample
  DOMAIN (1)...(278): 5-keto 4-deoxyuronate isomerase
  misc_feature (1)..(278): Xaa is any amino acid
MILERRYAEHPVDVKCYETRELREHFLFDKVFIDDEISLCYTHSDRVVFGGAFPIKKKLRLEGGKDFGSDVFLDRREIGIICISGEGVISADKTEFKMKKGDGLYIGKGTKDVIFSAADKKNPPKFYLASAPAHVTFPAVHIPIEKANPRKLGEASTVNVRTIYQYVHPAVCQSCQLVMGMTVLEEGSVWNTMPCHTHERRMEVYLYFDMRPNAAVFHLHGHPDETRHIVMNNEQAVISPSWSIHSGVGTSAYTFIWAMAGENQTFDDMDILXTAELR

SEQ ID NO: 51223 - DNA, 2319 bp, Unknown
  Obtained from environmental sample
  misc_feature (1)..(2319): n is a, c, g, or t
atggcgagactacgcctgcgacattacctacggaaccacaacgaattcggctttgattacctgcgcgacaatatgtgccgcgacatgcgaagccgtgtccagcggggacacaactactgcataatcgacgagatagattccatccttattgacgaagccagaaccccgcttattatatccggcgcggcggaggacgacacctttaagtttgcggaggtgaaccggcttgtcggatccctcgaggaaataaagaaaaaagaaaacggcgactaccctgacgaaacccagggcgaggaagtgatcggcgattacaagcttaacgaaaaaaacaagaacgtgtctttttcaaacaacgggctcgcaaaaatagaggaccttcttaaaaagcgcggcttaataaaaggctcggtggtggatgaggaaaactttgaatatatccattactttacgcaggctttaagggcgcacaagctttttcacattgacgttgattacgttgtccaggaagggcaagtgcagatagttgacgaattcaccgggcgcatactgcacggcaggcgctactcggacgggctgcaccaggccatcgaagcgaaagagcggataaaaatcgcccagaggaaccggactctggcaacgattactttccaaaactttttcaggctctattcaaagatttcaggcggcaccggaacggcggatacggaagcctccgagttcggcaagatatacaatcttgaagtggttgtcattcctacaaacctgcctgttgcccgcaacgacgaagacgacgttatctaccttaacgaanaggaaaagttcagcgccctttgcgacgaaattgaggaggcgcacaaaaaggggcagccaattctggtagggacagtttccatcgagaaatctgaaataatggatacccttcttacccgccggggaatacgccacgaggtgcttaacgcgaaaaaccacgccagggaagccgttattatagccgaggcgggcgctaaaggcgcggtaaccattgcaactaacatggccgggcgcggcacggatatcaagcttggcggcaaccctgaacaccgcgcccgcaggagagcaggcacggaggccgcacagagcgacagcgcttcgtctgcgacagcagacgcggccgcccaaaaatacgcggccatttacaaggaagaatacgaaaagtggaaaaaggattacgccgaagttaaagccgctggcggcctttacgtaattggcacagaaagacacgagagccgccgcattgacaaccagctccgcgggcgctcaggccgccagggcgatccaggcaaatcaaaattctttatctcccttgacgacgacttaatgaggctctttggcggagagaacataaagggatttatgtcaaaagtagggatgagcgacggagagcccatttaccacccctggctgaacaaaagcattgaaaaggcgcaaaccaaagttgaagaaagaaactttgaaatccgcaaacatctccttgaatacgacgatgtgctaaaccagcagaggaagtttatatacgagcaaagggacgctattcttgaagacacgaaccttaaagaaagggttaataccgcgaccaatgacatggtaggttcttatttggatatttgcagcgaaaccagccgaaaagatccgtcaggcgctttaaaggagctgtctgaaacgctcaagaacaaattcaactacatcctcaaaacaaacgcggaagaagtaaaaaatatcgaggctctggaaaaacgcatttgcgaggaactcagggaggatattgaaaacaaagaagggattataggtcacaattaccttaacttctttatccgtgatcagtatttaataatggtggacagaaaatggctggatcaccttgaaaacatggaagctcttagagaggctgtgtatttgaggagctacgcgcagaagaatccccttaccgaatacaaggttgaaggtttccagatttttgaatccatgatcgatgatattcggcaggtaattgcgtcgcgcctccacttgatccggattcagacagcggaaaatcgtggggaaagcaaagcgcctgtccgttcacaggcgacggtacagacagcatcccatagcagcatgggttcctttggctcgtcggcctttggctcaaaaaacgaagcctccgcttcatcggcaattaattccgcaagaagccagggaggctccgtaaccgttattcgcaatcaccccaaagtaggccgaaacgatccctgtccctgcggctccggcaagaagtataaacattgccatgggcagacctaa

SEQ ID NO: 51224 - protein, 772 aa, Unknown
  Obtained from environmental sample
  DOMAIN (753)...(772): SEC-C motif
  misc_feature (1)..(772): Xaa is any amino acid
MARLRLRHYLRNHNEFGFDYLRDNMCRDMRSRVQRGHNYCIIDEIDSILIDEARTPLIISGAAEDDTFKFAEVNRLVGSLEEIKKKENGDYPDETQGEEVIGDYKLNEKNKNVSFSNNGLAKIEDLLKKRGLIKGSVVDEENFEYIHYFTQALRAHKLFHIDVDYVVQEGQVQIVDEFTGRILHGRRYSDGLHQAIEAKERIKIAQRNRTLATITFQNFFRLYSKISGGTGTADTEASEFGKIYNLEVVVIPTNLPVARNDEDDVIYLNEXEKFSALCDEIEEAHKKGQPILVGTVSIEKSEIMDTLLTRRGIRHEVLNAKNHAREAVIIAEAGAKGAVTIATNMAGRGTDIKLGGNPEHRARRRAGTEAAQSDSASSATADAAAQKYAAIYKEEYEKWKKDYAEVKAAGGLYVIGTERHESRRIDNQLRGRSGRQGDPGKSKFFISLDDDLMRLFGGENIKGFMSKVGMSDGEPIYHPWLNKSIEKAQTKVEERNFEIRKHLLEYDDVLNQQRKFIYEQRDAILEDTNLKERVNTATNDMVGSYLDICSETSRKDPSGALKELSETLKNKFNYILKTNAEEVKNIEALEKRICEELREDIENKEGIIGHNYLNFFIRDQYLIMVDRKWLDHLENMEALREAVYLRSYAQKNPLTEYKVEGFQIFESMIDDIRQVIASRLHLIRIQTAENRGESKAPVRSQATVQTASHSSMGSFGSSAFGSKNEASASSAINSARSQGGSVTVIRNHPKVGRNDPCPCGSGKKYKHCHGQT

SEQ ID NO: 51225 - DNA, 582 bp, Unknown
  Obtained from environmental sample
  misc_feature (1)..(582): n is a, c, g, or t
gtgtctttctgtgccaattacgtaaaggccgccagcggctttaacttcggcgtaatcctttttccacttttcgtattcttccttgtaaatggccgcgtatttttgggcggccgcgtctgctgtcgcagacgaagcgctgtcgctctgtgcggcctccgtgcctgctctcctgcgggcgcggtgttcagggttgccgccaagcttgatatccgtgccgcgcccggccatgttagttgcaatggttaccgcgcctttagcgcccgcctcggctataataacggcttccctggcgtggtttttcgcgttaagcacctcgtggcgtattccccggcgggtaagaagggtatccattatttcagatttctcgatggaaactgtccctaccagaattggctgcccctttttgtgcgcctcctcaatttcgtcgcaaagggcgctgaacttttcctnttcgttaaggtagataacgtcgtcttcgtcgttgcgggcaacaggcaggtttgtaggaatgacaaccacttcaagattgtatatcttgccgaactcggaggcttccgtatccgccgttccggtgccgcctga

SEQ ID NO: 51226 - protein, 193 aa, Unknown
  Obtained from environmental sample
  misc_feature (1)..(193): Xaa is any amino acid
MSFCANYVKAASGFNFGVILFPLFVFFLVNGRVFLGGRVCCRRRSAVALCGLRACSPAGAVFRVAAKLDIRAAPGHVSCNGYRAFSARLGYNNGFPGVVFRVKHLVAYSPAGKKGIHYFRFLDGNCPYQNWLPLFVRLLNFVAKGAELFLFVKVDNVVFVVAGNRQVCRNDNHFKIVYLAELGGFRIRRSGAA

SEQ ID NO: 51227 - DNA, 837 bp, Unknown
  Obtained from environmental sample
  misc_feature (1)..(837): n is a, c, g, or t
atgttgcactttaccaaaatgcacggttgcggcaatgattatatctatatcaattgttttgacatagaaataaatttgtcgcaatcgttggtagtgcaattatccaatagacatacaggcataggcggtgatggggttgtgctaattttgcgctctaacattgccgatgcaaaaatgagaatgttcaatttagacggcagcgaaggcaatatgtgcggaaacgccattagatgcgtggcaaaatatctctacgataatggaatagtgaaaaaagaagaaatgcgaatagaaacgaaaagcggcgtgaaagaacttcaattatttataaaaaatgattatgtatattctgtgaaagtaaatatgggaaaagcagaacttgcccctgaaaaaataccagtaaaactgaaaggcgaaagtataatatcaaaaccgataaccattggcgaagtggaatactcaataacttgtgtttccatgggaaatccccacgccgtgaactttgttgaaaacgtagcaaatttagatttgcaaaaaataggaccaacgtttgaaaacaatcctctttttccagaaaaagtaaacaccgaatttgttgagctctcaggcagaaacaacttgaaaatgcgagtatgggagcgcggcagcggagaaactcaggcatgtggcacaggtgcttgcgcttctgctgtggcagcggttttaaacgggcattgcgacaaagacacagacataaaagttcagctccctggtggcgagttgattattaaatatacagaagaagccgtttttatgacgggcaactgcgagaaggtttttgagggagtgattgaggtgtaa

SEQ ID NO: 51228 - protein, 278 aa, Unknown
  Obtained from environmental sample
  DOMAIN (4)...(127): Diaminopimelate epimerase
  misc_feature (1)..(278): Xaa is any amino acid
MLHFTKMHGCGNDYIYINCFDIEINLSQSLVVQLSNRHTGIGGDGVVLILRSNIADAKMRMFNLDGSEGNMCGNAIRCVAKYLYDNGIVKKEEMRIETKSGVKELQLFIKNDYVYSVKVNMGKAELAPEKIPVKLKGESIISKPITIGEVEYSITCVSMGNPHAVNFVENVANLDLQKIGPTFENNPLFPEKVNTEFVELSGRNNLKMRVWERGSGETQACGTGACASAVAAVLNGHCDKDTDIKVQLPGGELIIKYTEEAVFMTGNCEKVFEGVIEV

SEQ ID NO: 51229 - DNA, 495 bp, Unknown
  Obtained from environmental sample
  misc_feature (1)..(495): n is a, c, g, or t
atgtacatcgggcggctcggcgacggctccaatccggacgacgagatatatgtgctgctcaaagaaattattgataacggcattgacgaatttatcatgggcaacggcaaaaatattgaggtggggataaaagacggcgagaagcccggctccgcttctgtaaaggtgcgagactatggccgcggcataccgctgggaaaacttgtagactgcgtttcgataatcaataccggcggaaaattcaacgacgacgtgttccagttttcagtggggcttaacggcgtgggaaccaaggcggtaaacgccctgtcaatttatttcagggtggtcgccataagaaacggcgaatttgccgaggcgatattcgagcgcggcaaattaaaaagcgaccgcaagggcaaactgaaggacaagcagaaagacgggacctatgtcgaattcaccccggatcccgaaattttcaaagattatctttttaactctggaatattatag

SEQ ID NO: 51230 - protein, 164 aa, Unknown
  Obtained from environmental sample
  DOMAIN (11)...(152): Histidine kinase-, DNA gyrase B-, and HSP90-like ATPase
  misc_feature (1)..(164): Xaa is any amino acid
MYIGRLGDGSNPDDEIYVLLKEIIDNGIDEFIMGNGKNIEVGIKDGEKPGSASVKVRDYGRGIPLGKLVDCVSIINTGGKFNDDVFQFSVGLNGVGTKAVNALSIYFRVVAIRNGEFAEAIFERGKLKSDRKGKLKDKQKDGTYVEFTPDPEIFKDYLFNSGIL

SEQ ID NO: 51231 - DNA, 1554 bp, Unknown
  Obtained from environmental sample
  misc_feature (1)..(1554): n is a, c, g, or t
atggggacaatttacgacggcattcaaaggccgttgaacgttctctatgaacaggacggcgcgtttatgaaacccggcgacaggggcaaccccttagacccggataaaaaatggcgctttattcccgaccggcaattagccgcgaaaatcgccgccggggatgcagtccccgccgccgccggaatgatacttggttcagtaaaagaaacggaaagcattacctgtaaaattatggttccgcctaatacaagcggcggaaatattaccgaattaaaaggcgaaggcgactacacggtttcgcagataatagcgaaaacaagcatgggagaggaaatcactatcgcgcaatggtggcctgtgcggacaagccgccccgtttccacgcgcctgccgccggacaaaccgcttatcacgggcgagcgcgtcatagacattttctttccgctttccaagggcggaaccgcggcgattcccggcggcttcggcacgggcaagaccatgacccagcacgcggtggcgaaatggtgcgacgcggacgtaattatctacataggctgcggagagcgcggcaacgaaatgacggacgtgcttacggaatttccggagcttcaggacccgcgctcggggcgcagtttaatggaaagaaccctgcttatcgccaacacgtcgaatatgcccgtggcggcgcgtgaggtgtcaatttacacgggggtaacgcttgcggagtactaccgcgacatgggctaccatgtggcgattatggcggactccactagccgctgggcggaagcgttacgcgaactttccggccgcatggaagaaatgcccgccgaggagggattccccgcctatcttcccacgcggcttgcggaattttacgaacgcgcaggcagagtgcgcacactctgcggaatggaaggctcggtttcgataataggggcggtctcccctccgggcggcgacttctctgagcctgttacacaacatacaaaacgttttatccgctgtttctgggcattggacaaagacttggccaacgcccggcattaccccgcgataagctggatagacagctattcggaatacgcggaggaagttcagcattggtgggaaggcgttaacccgctgtggccgcaggtgcggaaaaaatgcatggatcttcttaaacaggaacaaaagttagctgaaattgtaaggctcataggacaggataccctgcccgacgaacagaagctgattttatacacggctcaaataatcaaggacggctttttgcagcaaaattcatttgatcaggttgacatgtactgcgttcccgaaaaacaggtaaggcttctggaaataataatggaattttacgatcgcgcccatacatgtattcagcttggcgcgccaatgacaaaaatatcggcgacgggtttaaaggagggaatgtcccgccttaaaagcaccgtaaagaatgactctcttggcgattttaacgagtttgacggaaaaatgcgctatacattggaagaactggagaggacttaccggacaaggggtgcggcgtga

SEQ ID NO: 51232 - protein, 517 aa, Unknown
  Obtained from environmental sample
  DOMAIN (378)...(516): ATP synthase alpha/beta chain, C terminal domain
  misc_feature (1)..(517): Xaa is any amino acid
MGTIYDGIQRPLNVLYEQDGAFMKPGDRGNPLDPDKKWRFIPDRQLAAKIAAGDAVPAAAGMILGSVKETESITCKIMVPPNTSGGNITELKGEGDYTVSQIIAKTSMGEEITIAQWWPVRTSRPVSTRLPPDKPLITGERVIDIFFPLSKGGTAAIPGGFGTGKTMTQHAVAKWCDADVIIYIGCGERGNEMTDVLTEFPELQDPRSGRSLMERTLLIANTSNMPVAAREVSIYTGVTLAEYYRDMGYHVAIMADSTSRWAEALRELSGRMEEMPAEEGFPAYLPTRLAEFYERAGRVRTLCGMEGSVSIIGAVSPPGGDFSEPVTQHTKRFIRCFWALDKDLANARHYPAISWIDSYSEYAEEVQHWWEGVNPLWPQVRKKCMDLLKQEQKLAEIVRLIGQDTLPDEQKLILYTAQIIKDGFLQQNSFDQVDMYCVPEKQVRLLEIIMEFYDRAHTCIQLGAPMTKISATGLKEGMSRLKSTVKNDSLGDFNEFDGKMRYTLEELERTYRTRGAA

SEQ ID NO: 51233 - DNA, 606 bp, Unknown
  Obtained from environmental sample
  misc_feature (1)..(606): n is a, c, g, or t
atggcaaaaatcaggctcactaaaaacgagctgaaaaaacaaaaagactcgcttaaaatgtacaagcgttaccttcctacgctgatgttaaagaaacaacagcttcagggcgagattcgcataacggaactccgtcttaaagaattgaaaaccgccaaggataatcttgatgaatcattcaagacatggataggggttttcggcgagaagggatattttaccgcgaacatattgaagatcacaagcctgcgtacggggcatgggaacgtcgccggcgttgaaatcccgatttttgaaggcgcggattttgagacaacgccttacgatctggcgcgcactcccgcgtggcttgacaaagcagttgaggcgatgaagcaggccctgcttctcgaccttgaatcgcagattgtcgaggaacagcgtaaaaggctggagaaggagctacggacaaccacccagagggttaacctttttgaaaaagtaaaaatcccgcagactataggtaatattaaaaagattcaggtttatctgggcgatcagcagactgccgccgttgtgcgcggcaagatagcaaagagcggaaccgaaaaggcggcggctatatga

SEQ ID NO: 51234 - protein, 201 aa, Unknown
  Obtained from environmental sample
  DOMAIN (2)...(196): ATP synthase subunit D
  misc_feature (1)..(201): Xaa is any amino acid
MAKIRLTKNELKKQKDSLKMYKRYLPTLMLKKQQLQGEIRITELRLKELKTAKDNLDESFKTWIGVFGEKGYFTANILKITSLRTGHGNVAGVEIPIFEGADFETTPYDLARTPAWLDKAVEAMKQALLLDLESQIVEEQRKRLEKELRTTTQRVNLFEKVKIPQTIGNIKKIQVYLGDQQTAAVVRGKIAKSGTEKAAAI

SEQ ID NO: 51235 - DNA, 1296 bp, Unknown
  Obtained from environmental sample
  misc_feature (1)..(1296): n is a, c, g, or t
atgaataaggtatatagcaagattgaatcaataacgggaagcgttattaccgtcaaggcggaagacgtccgttacggagacctcgcggaggtcgataccgtgttcggcacgtctcttgcggaagtaaaccgcttgcagggcgacattgtctcattacaggtattcgccggcggtcgcggtatttccacaggagacacagtccgctttctgggacgccccatgcaggttccgttctccgagaatcttatgggcagggtgttttcaggttccggcaagccgcgcgataacggaccggcgttacacgaaaacttaatcccgattggcggaccttcggtaaatccgtcacagcgcattatcccgcgcaagatgatccgcacgggtatccccatgatcgacctctttaacactctggtcgtgtctcagaagcttcctattttctccgtatcgggcgaaccttacaacgaactgctcgcgcgtatcgcgatgcaggcggaagttgacgttatcgttctgggcggcatgggtcttaagtacgacgactatctttactttaaggacactcttgaaaacggaggcgctttggcgcgtaccgtaatgttcatacataccgcaagcgaccccacggtcgaatgtcttatgataccggatatgtcactcgcggttgccgaaaagttcgcccttcagggcaaggacgttcttgtgctccttaccgatatgacaaacttcgcggacgccatgaaggaaatctcgattattcaggaacaggtaccaagtaaccgcggttatcccggcgatctttacagccagcttgccagccgctacgaaaaagccgtagactttgaaaccgcaggttccatcaccgtcctgggtgttactacaatgccgggcgacgacgtaacgcaccccgtaccggacaataccggatacattacggaaggccagtactatcttaagaacggccgcatcgagccgttcggctcgctctcccgtcttaaacagcaggttaacggcaagacacgcgaagaccaccgcgccctcatggacggcatgatcaaactttattccgctttccgcgacacaatggaaaagaaagcgatgggctttatcatgaccaactgggacgagaagctcttgaaatacggcgatcagtttgaaaagaggatgatgtccctttccgtaaatattcccctggaaaaagcgctggatcttgggtgggagattttatcttcctgctttaaccctgaagagacaggattaagaaccgaacttattaataagttctggccgaaaaattag

SEQ ID NO: 51236 - protein, 431 aa, Unknown; identical to SEQ ID NO: 44998
  Obtained from environmental sample
  DOMAIN (8)...(71): ATP synthase alpha/beta family, beta-barrel domain
  misc_feature (1)..(431): Xaa is any amino acid

SEQ ID NO: 51237 - DNA, 1095 bp, Unknown
  Obtained from environmental sample
  misc_feature (1)..(1095): n is a, c, g, or t
atggacagaatcggccgagccttatggtgcttgccgacgccgccgcgctggagggaaaagacaaggacaggcgcgcgctttcttgaaaaagtaataaggatcaatccccagcatacgagggctcttaatgatttggccaatatcactctcggaagccagaatctgcacgccgcgtcgaattattttgacagggttcttgccgttgagcccaataacggggacgccctgataggccgcgccaccgtataccgttacaacaaagagccgagaaaagcggaacagcttttaaaccgcgcggcaaacctttacccggactgggcaaggccgcttcaggaaagggcgcgcctatacaaaggggccggtttttacaatgacgcccttgaggatcttgacgcggcgaaaaaagttgagccggacaattattgggtgctcgtggaccgcggtcttgttttaatggatatgaaccgcaggcaggaagcgctggaagaatttaaacgcgctacggcaatcgatcccaatgtttttatcgcgtatgtgtacagcgccggtcttaaggatgatatgggcgattacgccggcgcggaacaggattacgcaagattaacaaaaataaggccggattattatttcgcttttgaggggcttggcattcttaaaatgaaaaataagcaatggactcaggcaagggacgcgtttctggaagcgtacaagcgcgcgcctaaagattacacctacgcgctgttggcggctgttaactggatgcgcgccggcaagatgaccgatcccaaacaatttctggcgcaggtgctgcgtaccgcgcccagagattcgcttgaatacgctatgctcaaactgtttcatgatctttcaggcgatctggacgctgccgtaaaagcggagaacgaaaaaaatgtttatacaaaggcgcgtatggttttttatcttgcctgttattatgatatcaggggaaacacagcattggcgaataaatattatacgctcgtgcaggagttaaatgccatgtctacggttgaatggcggataaacgaatggatactggctgaacgcggtctgggcgtaaggacggaaaaatga

SEQ ID NO: 51238 - protein, 364 aa, Unknown
  Obtained from environmental sample
  DOMAIN (141)...(174): Tetratricopeptide repeat
  misc_feature (1)..(364): Xaa is any amino acid
MDRIGRALWCLPTPPRWREKTRTGARFLEKVIRINPQHTRALNDLANITLGSQNLHAASNYFDRVLAVEPNNGDALIGRATVYRYNKEPRKAEQLLNRAANLYPDWARPLQERARLYKGAGFYNDALEDLDAAKKVEPDNYWVLVDRGLVLMDMNRRQEALEEFKRATAIDPNVFIAYVYSAGLKDDMGDYAGAEQDYARLTKIRPDYYFAFEGLGILKMKNKQWTQARDAFLEAYKRAPKDYTYALLAAVNWMRAGKMTDPKQFLAQVLRTAPRDSLEYAMLKLFHDLSGDLDAAVKAENEKNVYTKARMVFYLACYYDIRGNTALANKYYTLVQELNAMSTVEWRINEWILAERGLGVRTEK

SEQ ID NO: 51239 - DNA, 1203 bp, Unknown
  Obtained from environmental sample
  misc_feature (1)..(1203): n is a, c, g, or t
atgagcggcaacagcatgacagttacattgggcgcaaaggaatttaaacttatagggaccgcccatgtttcaagagaaagcatagaagaagtaaaaaatattattaacgatgaaaaaccggacatggtctgcgtggaacttgacgaaggcagatataacgctataacgcagggcaaccaatgggaaaaattaaatttgtcccaagttttcaaagaaggcaaaggttttttggttattgccaatttggttctggcgagttttcaaaggcggcttggcagcgagctgggggtaaagcccggcgaagagatgaaagtcgcgattgagacggcgaaagagcagggaataccgcacagcctttgcgaccgtgaggtgcataccactttacgcagggcgtgggcgcgctgcggtttgtggagcaaggcgaaattgcttgcgtcgcttatggcgagcgcttttacaaccgaaaaactcagcgaacaggaaatagaaaatctaaaaaacagcaacgaacttgacggaatgatgggcgagcttgcgaattatctgcccagcgttaaggaaacattaattgacgaaagggaccgctatcttgcctccaaaatctggacatcttcgccctccgccgagacgggaaacaaaaaaattgccgcggtaatcggcgccgggcacatgaaaggaattgccgctcatcttgaaaaactttccgccggcgaagaaagcgccgacatcagcgagttaaatgtaattcccccttcgtccgtcttttccaaaatagccaaatttattattcccgccgccgttgtcgctcttgtcgccgccggctttctccgcgccggaacagcgaccggcttttctatggttttaaagtgggtattattgaacggcacccttgcggcgattggggcatgtatcgcgcttgcccatcctctggcgattctggtttcatttataggagcgcctattacctctcttagcccttttatcggggtagggattctatccggtcttgttcaggtaacgctgttaaaaccgcgagtgtcggacgttcagaatattatggaagacgccaacggtcttaagggctggtaccgcaacaggatcacaagggcgctgcgggtgtttttcctttccagtcttgaaagctcaataggaaacatttgtttcaattcccgcgttagcgggactgctcgcgggttagaatag

SEQ ID NO: 51240 - protein, 400 aa, Unknown
  Obtained from environmental sample
  DOMAIN (10)...(240): TraB family
  misc_feature (1)..(400): Xaa is any amino acid
MSGNSMTVTLGAKEFKLIGTAHVSRESIEEVKNIINDEKPDMVCVELDEGRYNAITQGNQWEKLNLSQVFKEGKGFLVIANLVLASFQRRLGSELGVKPGEEMKVAIETAKEQGIPHSLCDREVHTTLRRAWARCGLWSKAKLLASLMASAFTTEKLSEQEIENLKNSNELDGMMGELANYLPSVKETLIDERDRYLASKIWTSSPSAETGNKKIAAVIGAGHMKGIAAHLEKLSAGEESADISELNVIPPSSVFSKIAKFIIPAAVVALVAAGFLRAGTATGFSMVLKWVLLNGTLAAIGACIALAHPLAILVSFIGAPITSLSPFIGVGILSGLVQVTLLKPRVSDVQNIMEDANGLKGWYRNRITRALRVFFLSSLESSIGNICFNSRVSGTARGLE

SEQ ID NO: 51241 - DNA, 435 bp, Unknown
  Obtained from environmental sample
  misc_feature (1)..(435): n is a, c, g, or t
ttgacgagaccgcgccaatacattaatccggccgagggcacttttgaattcgcgatgatgtacatccctgcggaaaatattttttacgaagtaataataaacgacgactatacaaacaaggaatacgagcttatgaactacgccatgaacaaacgcgtaatacctgtttcacctaacagtttttacgcgtaccttatggcgcttgtattgggtttgaaaggattgaaaatcgagcaggaagccaaaaccattctaggcgaactatcccacattcaggacaggttcacaaaattcttcgccgactacggccttgtaggaaaacacatttccttcgccgccaacaaatacgccgactccgaaaaaagcgccggaaaactaaacgaccagattaacaaaatcaccgggaacaagacggagttgattacggaagtttaa

SEQ ID NO: 51242 - protein, 144 aa, Unknown
  Obtained from environmental sample
  misc_feature (1)..(144): Xaa is any amino acid
MTRPRQYINPAEGTFEFAMMYIPAENIFYEVIINDDYTNKEYELMNYAMNKRVIPVSPNSFYAYLMALVLGLKGLKIEQEAKTILGELSHIQDRFTKFFADYGLVGKHISFAANKYADSEKSAGKLNDQINKITGNKTELITEV

SEQ ID NO: 51243 - DNA, 384 bp, Unknown
  Obtained from environmental sample
  misc_feature (1)..(384): n is a, c, g, or t
atgacaacaggtacccgtgcgggcataaccgtctttttgaacgaaagttaccattacgatttgtctctggaacaacggtccgacggcctctatgtggtggtaaaccgccgtgtccatgattttgaggcgctttcattccaggcgcttctgccttcaggcgaagttgaactacggattacctcggatgtggactggtactatttcagttatcgtatcggcaagggtgagtggcagagcgcgggtaaaggcatgagcgccggtctctgtgccgaaggtacatacagcggctgttttaccggtgtctttatcggactgtacagttcaggcggcgaagcctgtttcagcggtttttcattgcggaacgatggggaaaatactctatga

SEQ ID NO: 51244 - protein, 127 aa, Unknown
  Obtained from environmental sample
  misc_feature (1)..(127): Xaa is any amino acid
MTTGTRAGITVFLNESYHYDLSLEQRSDGLYVVVNRRVHDFEALSFQALLPSGEVELRITSDVDWYYFSYRIGKGEWQSAGKGMSAGLCAEGTYSGCFTGVFIGLYSSGGEACFSGFSLRNDGENTL

SEQ ID NO: 51245 - DNA, 1299 bp, Unknown
  Obtained from environmental sample
  misc_feature (1)..(1299): n is a, c, g, or t
ttgatggaatacacagccctatatcccgtttccgctaccaaatatatctctaaaaagatgacgaatatacgcaaaatacagttttcccctgtgctgccgggtaacgaaaagatgagcagtttgccagtaaatgcgactgtttttgaattggaaaaccccacaaacaaaacccgcgagataaccattgttcagatgcaggaaaatctctgcgggtacaatgttttaaaagataggcacggagttcaagactcttcttttgttttgcagccaaatgcgaaatttccccaagcggagtcctttgggcaggttcaatccgatagccgctataccataggcatagaattttacacaaaaaaatttctcacggaatccgactgcgcgggcaaaatggcgattgcggcaacttggaaccccggcgttatcgctcaggcaagcacaaagcctatgttctacaagcaagacgaagctaccgtgttaaatggagccttgctctctggcagggttagcaaaagctgggtgaaaaatgtttacagcggcagggaaacaatggctggcgttctatgcgtgaccgttgaacttcctccaaacacaagcgcaagggttcagttctcattagcccttgatttccccttgataaggatgaacggtttgaactccgttaaaaggtacacggaattttaccccgacccagacaagcgtgtaaagccgctgctttttgaatttatagaagccataccacgcattgagtctgctattcccgtaaactataaccgccttgttccagaacacgccagcaaaaatttccgcacccttgccataaacaccttgagctttttggcagaggcaactatttgggacaaagaggataaatttttggttcgcgaatgtgcagattatcctttcttcaacagcttggatgtttatttttacggctctttcagcctgctcgcccttttgccacgcttggacggttgcgttatgcgcaattttgcggatgcggttttggcgacaaacccgcaaattcgcaggcaccattcctatgtgggtttgccctacgcggatttgccagatccaaagttggagggcatgagaggggttaggggagcagttatacacgatttgggtagcccttttgacgctgcccccgatgcctacgattggcataatgtaaaagagtggaaagacctcgctccaaaatttgttctgatggtgataaggcattaccagatgacaggcgatatttccgtgctcacctattgcagagatgcggttatgctcgctcggccatctgatccatga

SEQ ID NO: 51246 - protein, 432 aa, Unknown
  Obtained from environmental sample
  misc_feature (1)..(432): Xaa is any amino acid
MMEYTALYPVSATKYISKKMTNIRKIQFSPVLPGNEKMSSLPVNATVFELENPTNKTREITIVQMQENLCGYNVLKDRHGVQDSSFVLQPNAKFPQAESFGQVQSDSRYTIGIEFYTKKFLTESDCAGKMAIAATWNPGVIAQASTKPMFYKQDEATVLNGALLSGRVSKSWVKNVYSGRETMAGVLCVTVELPPNTSARVQFSLALDFPLIRMNGLNSVKRYTEFYPDPDKRVKPLLFEFIEAIPRIESAIPVNYNRLVPEHASKNFRTLAINTLSFLAEATIWDKEDKFLVRECADYPFFNSLDVYFYGSFSLLALLPRLDGCVMRNFADAVLATNPQIRRHHSYVGLPYADLPDPKLEGMRGVRGAVIHDLGSPFDAAPDAYDWHNVKEWKDLAPKFVLMVIRHYQMTGDISVLTYCRDAVMLARPSDP

SEQ ID NO: 51247 - DNA, 630 bp, Unknown
  Obtained from environmental sample
  misc_feature (1)..(630): n is a, c, g, or t
atgaacgaaaaaagactatacatagtagacggctacgcgttcgcctaccgcgcctactacgcccttatccgcagcccgctcatcagttccaaggggtttccgaccggcgctatttacggtttcgccaattatctgctgcgtctgatagagacctacggttgcccgtatttggctgtggcgatggacagctccgttcccaccttccgccatgaggcctacgccttgtacaaggccaaccgcgaggctatgcctgaagatttaagacagcagatgccgcgcatattcgaactgcttgaggcgttcaacatccccgtcgtcaaaaaagacggctttgaggcggacgacattgtagcctcgctcacaaagagggcgctcgcggaggggttcgaggtgtttttggtgaccaaggacaaagacctcatgcagctcataggcccgaacgttacgatgctcgctccggacgggtcgggggtcttttcgcctattgggcctaaggacgtgcttaacaagatgggagtgccgccggagaagattttggacttcctggcgctcgtgggcgacacctccgacaacattcccggagtggcgggaatcggcgtcaagggcgcggccaagatttggagacgctga

SEQ ID NO: 51248 - protein, 209 aa, Unknown
  Obtained from environmental sample
  DOMAIN (4)...(171): 5'-3' exonuclease, N-terminal resolvase-like domain
  misc_feature (1)..(209): Xaa is any amino acid
MNEKRLYIVDGYAFAYRAYYALIRSPLISSKGFPTGAIYGFANYLLRLIETYGCPYLAVAMDSSVPTFRHEAYALYKANREAMPEDLRQQMPRIFELLEAFNIPVVKKDGFEADDIVASLTKRALAEGFEVFLVTKDKDLMQLIGPNVTMLAPDGSGVFSPIGPKDVLNKMGVPPEKILDFLALVGDTSDNIPGVAGIGVKGAAKIWRR

SEQ ID NO: 51249 - DNA, 543 bp, Unknown
  Obtained from environmental sample
  misc_feature (1)..(543): n is a, c, g, or t
ttgtcaacacttcccaaataccaaaaggtaaaatgcgcccgttgcggcgactgttgccgtattcccgtcgtccccgtcacgcataaagatgtggcgaggctcatcaaacacaccggcttatcaataagcgcgttggtacgcttttgcccgtcctccgaaatggcctacgacgaagactccggattgtggataaagttcaaatctgtccggcgcgctatgatattgcgcaaacgcggcgagcggtgcatctttcagacgccggagagggcctgctccgcgtacgaggccaggccgcagacctgccggacattcccgtacagcgtggatttcgacgggaaaaacgtcacggaaatcgcgctgaaccaagtgatgaagtgcaacgccgtaaaatgctccaagggatgcatcgacatcgatacgcttatagcgaacgtaaagaaggagaatcgggaagacggcgagtatcataaactagtggaacggtggaatttgtcgaacggcggcgggaatgtaaaagattttttgaaattcgccgggctttaa

SEQ ID NO: 51250 - protein, 180 aa, Unknown
  Obtained from environmental sample
  DOMAIN (10)...(136): Uncharacterised protein family (UPF0153)
  misc_feature (1)..(180): Xaa is any amino acid
MSTLPKYQKVKCARCGDCCRIPVVPVTHKDVARLIKHTGLSISALVRFCPSSEMAYDEDSGLWIKFKSVRRAMILRKRGERCIFQTPERACSAYEARPQTCRTFPYSVDFDGKNVTEIALNQVMKCNAVKCSKGCIDIDTLIANVKKENREDGEYHKLVERWNLSNGGGNVKDFLKFAGL

SEQ ID NO: 51251 - DNA, 495 bp, Unknown
  Obtained from environmental sample
  misc_feature (1)..(495): n is a, c, g, or t
atgcggatctccccgttcgactcgaacgcccgacgccacacgtcgttctcgtccgtctacgcctacccgatcatggacgagatgagggattacgaattggatgagaaggaaatacgggttgatacgtatagatcgagcggcgccggcgggcagcacatcaacaagacggacagcgctgtgcggatgacgcacatccccaccggaatagtggtggcttgccagaacgagcggtcgcagataaagaacagatcgacggcgctgaagatactgaaagcgcgggtgcgccaacactacaaagagatagaggagcgagagcgggagtctaagcaggcggagaagaaaaagatagagtggggcagtcagatacgctcttatgttctacacccgtataatatggtaaaggaccatcggacggaggcggagacaagcaatacttcggcggtgttggatggggatattgatatgttcattgaggcttatttgctgttgaattag

SEQ ID NO: 51252 - protein, 164 aa, Unknown
  Obtained from environmental sample
  DOMAIN (23)...(137): Peptidyl-tRNA hydrolase domain
  misc_feature (1)..(164): Xaa is any amino acid
MRISPFDSNARRHTSFSSVYAYPIMDEMRDYELDEKEIRVDTYRSSGAGGQHINKTDSAVRMTHIPTGIVVACQNERSQIKNRSTALKILKARVRQHYKEIEERERESKQAEKKKIEWGSQIRSYVLHPYNMVKDHRTEAETSNTSAVLDGDIDMFIEAYLLLN

SEQ ID NO: 51253 - DNA, 348 bp, Unknown
  Obtained from environmental sample
  misc_feature (1)..(348): n is a, c, g, or t
gtgttggcgcacccgcgctttcagtatcttcagcgccgtcgatctgttctttatctgcgaccgctcgttctggcaagccaccactattccggtggggatgtgcgtcatccgcacagcgctgtccgtcttgttgatgtgctgcccgccggcgccgctcgatctatacgtatcaacccgtatttccttctcatccaattcgtaatccctcatctcgtccatgatcgggtaggcgtagacggacgagaacgacgtgtggcgtcgggcgttcgagtcgaacggggagatccgcatcagcctgtggacgcccgtctcggccttgaggtgtccgtaggcgtactcgccctttga

SEQ ID NO: 51254 - protein, 115 aa, Unknown
  Obtained from environmental sample
  misc_feature (1)..(115): Xaa is any amino acid
MLAHPRFQYLQRRRSVLYLRPLVLASHHYSGGDVRHPHSAVRLVDVLPAGAARSIRINPYFLLIQFVIPHLVHDRVGVDGRERRVASGVRVERGDPHQPVDARLGLEVSVGVLAL

SEQ ID NO: 51255 - DNA, 810 bp, Unknown
  Obtained from environmental sample
  misc_feature (1)..(810): n is a, c, g, or t
ttggcagcgtatcccggcctgggctgtacgggcggcccctacatggttgaagaccgtttcggcattttcgaggacgtgctttgcgctggcaatgacggtattttccacctggcagaagctgtcttcgaaacccttaccgagctttttccttccagatatgtacacataggcggggacgaggtgctattcaaccgctggtcagattgcccgaagtgccgaaagcggatggcagaacttgaccttggcaaagccgcacagctgcaaagctggatcacatcgcgccttgcccaaatgctccataagcatggcaagatcgccatcggttgggacgaagtactggaaaacaccgagaaattcccattacctgacgatgtgattgtccagtcatggcgcggcaaggaaggcggtaacaaagcgaccgccctagggcaccgcgtcatcatgtcgccggtaactaacggctgttacctggattccaaagctataaaccagccggaagaaataggcaggcttagtattggcaccataacccagggctttaattttgatccagtaacgaaagaaatggacaatgacgccgcctcgctggttttaggcggacaaggtaacctctggtcggaagttatctatgcgggaaaaattgccgagtacatgatcttcccgaggatctgcgccatagcagaagccctctggtctcaaaggaaatcaaagacagcaactgatctggtggaatttgccgggcggctggctgttcatcaaagccggcttgacaaactgggactactgcaataccgcggaccgcttgggtaa

SEQ ID NO: 51256 - protein, 269 aa, Unknown
  Obtained from environmental sample
  DOMAIN (2)...(234): Glycosyl hydrolase family 20, catalytic domain
  misc_feature (1)..(269): Xaa is any amino acid
MAAYPGLGCTGGPYMVEDRFGIFEDVLCAGNDGIFHLAEAVFETLTELFPSRYVHIGGDEVLFNRWSDCPKCRKRMAELDLGKAAQLQSWITSRLAQMLHKHGKIAIGWDEVLENTEKFPLPDDVIVQSWRGKEGGNKATALGHRVIMSPVTNGCYLDSKAINQPEEIGRLSIGTITQGFNFDPVTKEMDNDAASLVLGGQGNLWSEVIYAGKIAEYMIFPRICAIAEALWSQRKSKTATDLVEFAGRLAVHQSRLDKLGLLQYRGPLG

SEQ ID NO: 51257 - DNA, 876 bp, Unknown
  Obtained from environmental sample
  misc_feature (1)..(876): n is a, c, g, or t
gtggagagcctttccgcttatgcccgccagttcttggggcgcatggacaagcccgacctggattatatcgaggggctttcccctgccatttccattgagcagaaaacaacccaccgcaatccgcgttctatcgtgggaaccgttacggaaatttacgactactaccgcctgcttttcgcgaggataggcgttccccattgcccggtttgcggtaaggagatacgggaacagcccatcgatcaaattattgaaaccattttgcagatgaaggaaggaagccggattcagcttctagcgccggtgatccgcggcaagaaaggagagcaccagaagataatcgaggacgcgaaaaaagccgggtttgcgcgggccaggattgacggagtgcctgtgaacctggacgaaaagataagcctggacaagcagaaaaagcacaccattgaaatcgttgtggatcgcctggtcatgggagccggcataaggcagcgcctggccgagtcgtgcgaggcggctttgcaggcggcggacggggtgatgcttgttttatgccaaagccaggaaggcccggtcaccgagcattttttcagccagaagaacgcctgcccggactgcggtgtatcaataccggagctgcagcccaggcttttctcgtttaacaatccttttggcgcttgtcccgcctgtacgggtcttggaatcaaaatggaattcgatccttcccttataattccaaatccctccctttcgtttaacgaaggaggggtggtaccatataacccggattccgcctggtaccgcagccgctttgaaagcatagcgcggcattttaagttcagcctggatacgcctctaagcgacattcccaaaaaagcgtga

SEQ ID NO: 51258 - protein, 291 aa, Unknown
  Obtained from environmental sample
  misc_feature (1)..(291): Xaa is any amino acid
MESLSAYARQFLGRMDKPDLDYIEGLSPAISIEQKTTHRNPRSIVGTVTEIYDYYRLLFARIGVPHCPVCGKEIREQPIDQIIETILQMKEGSRIQLLAPVIRGKKGEHQKIIEDAKKAGFARARIDGVPVNLDEKISLDKQKKHTIEIVVDRLVMGAGIRQRLAESCEAALQAADGVMLVLCQSQEGPVTEHFFSQKNACPDCGVSIPELQPRLFSFNNPFGACPACTGLGIKMEFDPSLIIPNPSLSFNEGGVVPYNPDSAWYRSRFESIARHFKFSLDTPLSDIPKKA

SEQ ID NO: 51259 - DNA, 441 bp, Unknown
  Obtained from environmental sample
  misc_feature (1)..(441): n is a, c, g, or t
ttgatcgatgggctgttcccgtatctccttaccgcaaaccgggcaatggggaacgcctatcctcgcgaaaagcaggcggtagtagtcgtaaatttccgtaacggttcccacgatagaacgcggattgcggtgggttgttttctgctcaatggaaatggcaggggaaagcccctcgatataatccaggtcgggcttgtccatgcgccccaagaactggcgggcataagcggaaaggctctccacatagcgccgctggccctcggcaaaatggtatcaaacgccagtgagctttttcccgaaccggaaagcccggaaattacgattaatttgtcacggggaagttccaggtcgatgtttttaaggttatgctcgcgcgctcccttgatgattaatttgtccatgtattgtaagaatagcggttttttagaaggtagggaatag

SEQ ID NO: 51260 - protein, 146 aa, Unknown
  Obtained from environmental sample
  misc_feature (1)..(146): Xaa is any amino acid
MIDGLFPYLLTANRAMGNAYPREKQAVVVVNFRNGSHDRTRIAVGCFLLNGNGRGKPLDIIQVGLVHAPQELAGISGKALHIAPLALGKMVSNASELFPEPESPEITINLSRGSSRSMFLRLCSRAPLMINLSMYCKNSGFLEGRE

SEQ ID NO: 51261 - DNA, 444 bp, Unknown
  Obtained from environmental sample
  misc_feature (1)..(444): n is a, c, g, or t
ttgtcagaaatacaaggcggaaaacaatcgtttttgtcaaaaatacaaggcaaaacactctattccctaccttctaaaaaaccgctattcttacaatacatggacaaattaatcatcaagggagcgcgcgagcataaccttaaaaacatcgacctggaacttccccgtgacaaattaatcgtaatttccgggctttccggttcgggaaaaagctcactggcgtttgataccattttgccgagggccagcggcgctatgtggagagcctttccgcttatgcccgccagttcttggggcgcatggacaagcccgacctggattatatcgaggggctttcccctgccatttccattgagcagaaaacaacccaccgcaatccgcgttctatcgtgggaaccgttacggaaatttacgactactaccgcctgcttttcgcgaggatag

SEQ ID NO: 51262 - protein, 147 aa, Unknown
  Obtained from environmental sample
  misc_feature (1)..(147): Xaa is any amino acid
MSEIQGGKQSFLSKIQGKTLYSLPSKKPLFLQYMDKLIIKGAREHNLKNIDLELPRDKLIVISGLSGSGKSSLAFDTILPRASGAMWRAFPLMPASSWGAWTSPTWIISRGFPLPFPLSRKQPTAIRVLSWEPLRKFTTTTACFSRG

SEQ ID NO: 51263 - DNA, 816 bp, Unknown
  Obtained from environmental sample
  misc_feature (1)..(816): n is a, c, g, or t
ttgaaggatggaaataaagtagacgccctctgcgacggagcgaacgtgtttattcccggcattatggaacacattgagcgcaccggcatccattccggcgacagcatagccgtatatcccgccataaacatagacgacgcgttagctgaaaaaatttttgatgttacaaaaagactctgcatggcgctgaacgtcaaaggccttgtcaatattcaatatgtcctatatgagaacgacatatatgtcattgaggttaacccaagggcgtcccgcaccgtcccctatctcagcaaggttacgagcatccccatgtgcgagcttgccaccaaattaagcgtgggccacaaactttcagatttgggctacgcgccgggcatcggaaaaatcccgccctatgtcgccgttaaagtgcctgttttctcctttgaaaaacttgcaggcgtggatacgcatctggggcctgaaatgaagtccaccggagaggttttgggcctggggaagaaccttgaggaagcgttgtacaagggacttgtcgccgccggatacaaaattaaaaagaaaggcggcgtgcttattaccgtcaggaacagtgacaaggcggaaattacccttgtcgccaaaaaaatggcgcaggccggattttccctgtacgcgacacgcggcaccgcgcgattccttgcggaaagaggttttgaggttcaaagcgtggcaaaaataaaggatggcgcggccaacaacacggagacgctgcttgaaagcggcaaaatcagttacatcatctccacgtcaaaaaaaggcagagacccccgcccttga

SEQ ID NO: 51264 - protein, 271 aa, Unknown
  Obtained from environmental sample
  DOMAIN (3)...(142): Carbamoyl-phosphate synthase L chain, ATP binding domain
  misc_feature (1)..(271): Xaa is any amino acid
MKDGNKVDALCDGANVFIPGIMEHIERTGIHSGDSIAVYPAINIDDALAEKIFDVTKRLCMALNVKGLVNIQYVLYENDIYVIEVNPRASRTVPYLSKVTSIPMCELATKLSVGHKLSDLGYAPGIGKIPPYVAVKVPVFSFEKLAGVDTHLGPEMKSTGEVLGLGKNLEEALYKGLVAAGYKIKKKGGVLITVRNSDKAEITLVAKKMAQAGFSLYATRGTARFLAERGFEVQSVAKIKDGAANNTETLLESGKISYIISTSKKGRDPRP

SEQ ID NO: 51265 - DNA, 357 bp, Unknown
  Obtained from environmental sample
  misc_feature (1)..(357): n is a, c, g, or t
atgacgaagcctgactacggcgacaaagacccgatagccgctcttgcgaccgcgttaggtgaaagcgcccttgccattgtcagaacatccggctcatacggcggcggcaagagtgctatcgatctgcttgcggaaattttctcaaggccgcaggccctgctctccgctccaggaaacacgatagtccacggctggatagttgaaccgcccgattcaaacagtaaaacaataaagaaactggatgaagtccttgtctccgtataccgtgcgccgcatagctacacaggcgaggacagcgcggatatttcctgccatggaggcattgcggcggtaaaagccgtgttggcggccccttaa

SEQ ID NO: 51266 - protein, 118 aa, Unknown
  Obtained from environmental sample
  misc_feature (1)..(118): Xaa is any amino acid
MTKPDYGDKDPIAALATALGESALAIVRTSGSYGGGKSAIDLLAEIFSRPQALLSAPGNTIVHGWIVEPPDSNSKTIKKLDEVLVSVYRAPHSYTGEDSADISCHGGIAAVKAVLAAP

SEQ ID NO: 51267 - DNA, 1005 bp, Unknown
  Obtained from environmental sample
  misc_feature (1)..(1005): n is a, c, g, or t
atgaacggcaagcttgaccttacccgcgccgagtcagtaatggaacttgtcagtgccagaacggacaggggtcacagtaacgcgattaaccggctttccggcgtattggaaaaagagatcggcgcgattaagaaaacgcttgtggaagtcctgtccggcgcggaaatttttcttgactattccgatgatgaaataagcgcagatgccgaagagatcgccggccggctccccggcgaaaagcttgcccgtgaggcgcttgcccgtctgcaaaaactcgcgcaatcctggcaattggaacgtatctatcaggaagggattctagcggtgatcgcgggacgacccaattccggcaagtccagtctgttcaatttgttgctaaaagaagaacgttccattgtcacagagattcccggcacgacccgtgattggattgaggcgtgggtttcccttgaaggcataccagtgcgccttaccgacacggccggtctcagggattcttccgatcaggttgagaaaatcggcgttgaacgcagccgtgatttactggaggccgccgacattgttctgtacctcattgacggcgaaacgggcattacagacgaagatgccgcattaatcgacggcttgactgtatcccgccttgtcatttggaacaagaccgacatagcgcccgcgccaaagggggttcttgcgatcagcgcgaaaaccggcgaaggcattacggagctgacagcggcaatcgccgcggcgatacgggctgcaaacgcggaaaaccccgatgcggcggcatctccggcgcttggcactgtccggcagaaaaaccttgttgaggcggcgattgccgggctggaagaggcgctggatctggctgaaagggaggaaccgcttgaccttgtttcccccatgataagagaagcggtgaattcactgggcgaaattaccggcgaggtttccacctctgatattctggaagaaatgttcggtaaattctgcgttggaaaatag

SEQ ID NO: 51268 - protein, 334 aa, Unknown
  Obtained from environmental sample
  DOMAIN (106)...(221): GTPase of unknown function
  misc_feature (1)..(334): Xaa is any amino acid
MNGKLDLTRAESVMELVSARTDRGHSNAINRLSGVLEKEIGAIKKTLVEVLSGAEIFLDYSDDEISADAEEIAGRLPGEKLAREALARLQKLAQSWQLERIYQEGILAVIAGRPNSGKSSLFNLLLKEERSIVTEIPGTTRDWIEAWVSLEGIPVRLTDTAGLRDSSDQVEKIGVERSRDLLEAADIVLYLIDGETGITDEDAALIDGLTVSRLVIWNKTDIAPAPKGVLAISAKTGEGITELTAAIAAAIRAANAENPDAAASPALGTVRQKNLVEAAIAGLEEALDLAEREEPLDLVSPMIREAVNSLGEITGEVSTSDILEEMFGKFCVGK

SEQ ID NO: 51269 - DNA, 1236 bp, Unknown
  Obtained from environmental sample
  misc_feature (1)..(1236): n is a, c, g, or t
ttgattaccgtccgtgacagcgacaaagctgaaattatcgatgtagctgaaaaatttgtgcgggcgggattttccctgcacgcgacgcggggaacagcccgctaccttgcgggaaaaggttttgaagttcaagccacggataaaatcagcgataacaaagacaacaacacggcgacgctccttgaaagcggaaaaatcagttatatcatctccacttcggagaaaggcagggatccggccaatgacagcgtgaagatacgtatgcgggcctgcatgctgggcgttccctgccttacgtcggttgacaccgcaaacgcgctggcggacggtctgctttcaggatacagcgagatcaatacggaactggttgacattaaccgcctcagaaacgagcgcaccaaacttgccttcacaaaaatgcatacttgcggaaacgattatatttactttaactgcttcgaaatggaaatcaattcgcccgaatcgctgtcggtattcctttccgacaggcataccggcgtgggcggcgacggcgttgtgctgatactgccttcgagcgttgccgacgcgaaaatgcgaatgttcaaccttgacggcagcgagggcagcataagcggaaacgcaatccgctgcgtcgcgaaatttctatacgacaacgggattgtaaaaaagcgcgatatgcggattgagacaaagagcggcgtanaagagctatccctctcaacgcggaacgggacggtatcatccgtcaaagtagacatgggactcgccaaactgcacccacgggatatacctgttaacttgacgggagaaagcgtgatcgcgcgaaaggttacaatcggcggtgttgagtacgggcttacctgtgtttccatgggcaatccccacgccgtgatgtttagtaaccatttggatgatcttgatttgaatgaaacaggccccctgtttgaaaacgatccgctgtttccagaccgggttaacgcggaatttgtcaatgttattgccagaaattatctggaaatacgcgtatgggaacgcggaagcggtgaaacgcaggccagcggcaccagcgcctgcgcttcggcggtggcagcggttttaaacggtttctgcgacaagaacacggatataagggtacgcttacccggcggagagctcattgtctgttacactgacgaggtggtatggctgacaggcgattgcgtaaaagtgtttgacgggacggtggagatatag

SEQ ID NO: 51270 - protein, 411 aa, Unknown
  Obtained from environmental sample
  DOMAIN (11)...(99): MGS-like domain
  misc_feature (1)..(411): Xaa is any amino acid
MITVRDSDKAEIIDVAEKFVRAGFSLHATRGTARYLAGKGFEVQATDKISDNKDNNTATLLESGKISYIISTSEKGRDPANDSVKIRMRACMLGVPCLTSVDTANALADGLLSGYSEINTELVDINRLRNERTKLAFTKMHTCGNDYIYFNCFEMEINSPESLSVFLSDRHTGVGGDGVVLILPSSVADAKMRMFNLDGSEGSISGNAIRCVAKFLYDNGIVKKRDMRIETKSGVXELSLSTRNGTVSSVKVDMGLAKLHPRDIPVNLTGESVIARKVTIGGVEYGLTCVSMGNPHAVMFSNHLDDLDLNETGPLFENDPLFPDRVNAEFVNVIARNYLEIRVWERGSGETQASGTSACASAVAAVLNGFCDKNTDIRVRLPGGELIVCYTDEVVWLTGDCVKVFDGTVEI

SEQ ID NO: 51271 - DNA, 438 bp, Unknown
  Obtained from environmental sample
  misc_feature (1)..(438): n is a, c, g, or t
atgatgaatttaggtttattaggcccgggtcttgtaatgggcatcgcggctgtcggatcagccattggtattggttttgccggttcggctacaataggcgcgtggaaaaagtgttatatagccaataaaccggctcccatgatgctgctggcttttgccggcgcgccgttaacgcagactttttacggttttatccttatgggtcagatggcaactgccgcccaggccgcgactgaaaacgcttggctttatattggctatggcgtcgcttccggtctcgcgatggcgttttcggccattgttcagggcaaagtaggcgccgccgccgcagacgcacagggtgaaacaggcaaaggcttcgcacagtacatcgccgtagtaggtatcgccgagacaatcgcccttttcgcgatggtcttaacgatgatcagcctctaa

SEQ ID NO: 51272 - protein, 145 aa, Unknown
  Obtained from environmental sample
  SIGNAL (1)...(27)
  misc_feature (1)..(145): Xaa is any amino acid
MMNLGLLGPGLVMGIAAVGSAIGIGFAGSATIGAWKKCYIANKPAPMMLLAFAGAPLTQTFYGFILMGQMATAAQAATENAWLYIGYGVASGLAMAFSAIVQGKVGAAAADAQGETGKGFAQYIAVVGIAETIALFAMVLTMISL

SEQ ID NO: 51273 - DNA, 711 bp, Unknown
  Obtained from environmental sample
  misc_feature (1)..(711): n is a, c, g, or t
atgaatatgagaaacagaaaaaccaaaattgtttgttctttggggccatcatcatcagaggattctgtcatacgcgaccttatacttgccggaatgaatgtggcgcgtcttaatttttctcatggggataacaatacgcaccgcgcttccgtggaaaaggtcaggcgtatttccggcgaactgggaattcccgtcgcgcttttgctggacacaaaaggtcctgaaatacggacaggtattgtacaaaatgacggcaagattactataaataaaggagaccatgttattgtttctactgatgattgttttacaacggcggcggagaacgggtctcctgcgcatatttcattgtcatggaaagaagcgggcgcgaggctgcaatgcggacaccgcattcttatcgcggacgggcttcttgaacttgaagtgattgataccgcagggggcatcaagtgctgtgcaaataataccgcggttatcggcagcaagaaaaatgtcaacttaatcggcgttcatgccaatcttccaattatcggcgataaggacaaacaagacatagaattcggcattgaaatggatattgattatatcgcggcaagtttcctaagttttccgcatgaagtaaccgaaataaaaaaattccttgaaagccattcatcccgtattaaaataattgctaaaattgaaagcggcgaaggtctggaaacatag

SEQ ID NO: 51274 - protein, 236 aa, Unknown
  Obtained from environmental sample
  DOMAIN (5)...(236): Pyruvate kinase, barrel domain
  misc_feature (1)..(236): Xaa is any amino acid
MNMRNRKTKIVCSLGPSSSEDSVIRDLILAGMNVARLNFSHGDNNTHRASVEKVRRISGELGIPVALLLDTKGPEIRTGIVQNDGKITINKGDHVIVSTDDCFTTAAENGSPAHISLSWKEAGARLQCGHRILIADGLLELEVIDTAGGIKCCANNTAVIGSKKNVNLIGVHANLPIIGDKDKQDIEFGIEMDIDYIAASFLSFPHEVTEIKKFLESHSSRIKIIAKIESGEGLET

SEQ ID NO: 51275 - DNA, 1137 bp, Unknown
  Obtained from environmental sample
  misc_feature (1)..(1137): n is a, c, g, or t
atgaaaaataacccgccgcctccggttccggctcaggaaacacagccggtctttgtcagaaaaacaagaagcggcggagtttctgtcggtatttccggcaaaaaaacgaataataacgataatgtcggcgtacctgagtccaagtacaggcgcgtggcgaaattcctcattcttataggcagtgagcaggcatcggaaattcttgcggagcttgatccggatcaggttgagaaaatatcaaaagaaatcgcgtttataaaaacaatcaaaccggaagaaggtgaaaaaatccttgaagagtttcatagccttctttccaaaccgtatattttttcgggaaagacaagaggcggcgtggaagcggcgcgcagaattctttatgccgcaaagggaccggaaaaaggcgaggaaattttaaatcgggcgattcccgcttccaaagaaaaccttttcagttttttggaagaattttccgcggaacagcttgttatgctcttaaaaccggaatcgccgcagacggtggctatgatcctttcgcgccttacgcccaaactttcggcggaaaccataagcaaacttccgtccgacattaagcctgaagttctcagacgcatcgcgtatcaaaaagaagtttcgcccgaagtgctggaacaagtaacggcggggttaagagaaaaagcgcgtaatatttcgggcggcgcgggagacatcgaaattgacggaatgcaagccctggcggctattttaaaacagggagactatgatttcggcgacaagattatcaacgaactggagcagagcagtcccgatataggaaaaacccttaaagaaaaaatctacactcttgacgatgttgtccttaccgttgacaggcctatacaggaaaaaactttcgctgatgtcggatcaggagatagcgattttattgaagggcaggnggaaagccngttttgcgaaaaaattctttcctgtgtttcggcgggacgcaggaaaataatccgcgaagaatttgaagtgctcggcgcggttccgaagcgcgactgcgacgccgccgcgggggaatttctttcatggttcaggaaagcccgtgaaaacggggaaattatactttacagcgataaggatgtttatttatga

SEQ ID NO: 51276 - protein, 378 aa, Unknown
  Obtained from environmental sample
  DOMAIN (261)...(371): FliG C-terminal domain
  misc_feature (1)..(378): Xaa is any amino acid
MKNNPPPPVPAQETQPVFVRKTRSGGVSVGISGKKTNNNDNVGVPESKYRRVAKFLILIGSEQASEILAELDPDQVEKISKEIAFIKTIKPEEGEKILEEFHSLLSKPYIFSGKTRGGVEAARRILYAAKGPEKGEEILNRAIPASKENLFSFLEEFSAEQLVMLLKPESPQTVAMILSRLTPKLSAETISKLPSDIKPEVLRRIAYQKEVSPEVLEQVTAGLREKARNISGGAGDIEIDGMQALAAILKQGDYDFGDKIINELEQSSPDIGKTLKEKIYTLDDVVLTVDRPIQEKTFADVGSGDSDFIEGQXESXFCEKILSCVSAGRRKIIREEFEVLGAVPKRDCDAAAGEFLSWFRKARENGEIILYSDKDVYL

SEQ ID NO: 51277 - DNA, 2307 bp, Unknown
  Obtained from environmental sample
  misc_feature (1)..(2307): n is a, c, g, or t
atgtacaaagacgacctaacgcagcgagtgcagcggatactttccgtagaggcccaggaagaggcatgccgttttaattctgaccagcttttgccggaacatataatcattgccatgttaagggacggcgcagggactgcctgcaaggccctgctgtccatgagaatagacttgaccgaattcaggcgcacgctggaaagcactttgccccgtataccgggcattttgatacacggcgccgtgcccccgtcaaggcggacaaagaacatggttgacctggccgccgcggaagcaaaggctatgggcagcgattacctgggcacggaacacctcctgtttgccgccatgaaggaacaggattccagcgtccagctgtttttaagcaaaaaagccattgatgtggatttattgagggtcgttgtccagaccacgttcagcccgccgcaggcatcaaggaacgacggcgattatatctcgtctaacggatgcccgtcgtattttatccaccgcgaccgccagtcaaagtaccagggacagcatacggacagggcaaaagtcaggccggcgtcttaccccgtgcttacccccacattggataatttctcccgcgatctgtccgcgctggcgagggccggcaaactcgatccggtaatcggcagggaaaaagagatgaaccgcatcgtgcggatactcgccaggcgggcaaaaaacaaccccatcctggtgggggagtctggcgtcggcaaaacggctattgtcgaggggctggcccagttgcttgcttccagaaacgcgccggaagccctttcggacaagcggatacttgcgctggacataggatccctggtggccggaaccaagtaccggggtgaatttgaggaaaggctcaaaaagatcatgaaggaaatcgcccaggcacggaatgtgattctctttattgatgaaatccacgttattatcggcgccggaggcgcggaagggaccattgacgcggccaatatgttaaagcccggcctctcccggggtgaaattcaatgtataggcgccacaacggtcgcggaattccgaaaacgttttgagaaagacgcggccctggaacggcgttttcaggcggttcttgtggaagaaacggatcctgacgaaaccctccgtattcttaaggggcttcagaaacgctacgaagaccatcaccatgtaaaatacagttccgaggccttggaagcggcggtacgtcttgcggcgcgttatattacgggccgttgtatgcccgacaaggctatcgatcttctggacgaggccggagccatgaagaagctggagcctcctgtagttcccccgcaaatcgcgagtattgaagaagaaatcctgcagcttatcgaagaaaagggggccatggtttcggcccaggactacgagaaggcggcggaattacgggacaaggttcgcaggcagaggcaaaagctggaagccctgcgtaaggcctgggaattgagcatccagaacgaacggcccctggtagaggagggggatgtacggaaggtagtggcggaaatcaccggtatacctttgaatcaccttgaggaacaggaatcccgtcgtcttttgaatatagaaaaagaactttccctgggggtcattggccaggatgaggcggttaagcgaatctccggggcaataaggcgttccagggttggaatttcttctccccggcgtcccctgggttcttttatttttttgggacctacgggggttgggaaaaccctcctggcaaagcggctttcggaatatctttttgaaagcctcgactccctggtcagaattgatatgtccgattatatggaaaaacacaatgtctcccgtcttgtaggggctcctccgggctatataggctatgaggaaggcggcgcccttacggaaaaaatccgcaagaacccttaccgggtgatcctctttgatgaaattgaaaaggcccatcgggatgtgtataaccttcttttacaggtacttgaagaaggggaactcaaagataatctggggcatacggtaaatttcagaaacaccgtcattattatgaccagtaacgcgggagtgcgggaaattagccgggactcccggctgggttttggaagcggatcgggaatcatgagtttccaggaaatagaggcttccagccttggagaattgaaacgcgtctttagtccggaatttctaaaccgtatagacgatgtaatagtattccattccctggaactgccccagattgaagccattttggatctccagctaggagaactttcgagcgcgtag

SEQ ID NO: 51278 - protein, 768 aa, Unknown
  Obtained from environmental sample
  DOMAIN (452)...(487): UvrB/uvrC motif
  misc_feature (1)..(768): Xaa is any amino acid
MYKDDLTQRVQRILSVEAQEEACRFNSDQLLPEHIIIAMLRDGAGTACKALLSMRIDLTEFRRTLESTLPRIPGILIHGAVPPSRRTKNMVDLAAAEAKAMGSDYLGTEHLLFAAMKEQDSSVQLFLSKKAIDVDLLRVVVQTTFSPPQASRNDGDYISSNGCPSYFIHRDRQSKYQGQHTDRAKVRPASYPVLTPTLDNFSRDLSALARAGKLDPVIGREKEMNRIVRILARRAKNNPILVGESGVGKTAIVEGLAQLLASRNAPEALSDKRILALDIGSLVAGTKYRGEFEERLKKIMKEIAQARNVILFIDEIHVIIGAGGAEGTIDAANMLKPGLSRGEIQCIGATTVAEFRKRFEKDAALERRFQAVLVEETDPDETLRILKGLQKRYEDHHHVKYSSEALEAAVRLAARYITGRCMPDKAIDLLDEAGAMKKLEPPVVPPQIASIEEEILQLIEEKGAMVSAQDYEKAAELRDKVRRQRQKLEALRKAWELSIQNERPLVEEGDVRKVVAEITGIPLNHLEEQESRRLLNIEKELSLGVIGQDEAVKRISGAIRRSRVGISSPRRPLGSFIFLGPTGVGKTLLAKRLSEYLFESLDSLVRIDMSDYMEKHNVSRLVGAPPGYIGYEEGGALTEKIRKNPYRVILFDEIEKAHRDVYNLLLQVLEEGELKDNLGHTVNFRNTVIIMTSNAGVREISRDSRLGFGSGSGIMSFQEIEASSLGELKRVFSPEFLNRIDDVIVFHSLELPQIEAILDLQLGELSSA

SEQ ID NO: 51279 - DNA, 432 bp, Unknown
  Obtained from environmental sample
  misc_feature (1)..(432): n is a, c, g, or t
gtggatttcatcaataaagagaatcacattccgtgcctgggcgatttccttcatgatctttttgagcctttcctcaaattcaccccggtacttggttccggccaccagggatcctatgtccagcgcaagtatccgcttgtccgaaagggcttccggcgcgtttctggaagcaagcaactgggccagcccctcgacaatagccgttttgccgacgccagactcccccaccaggatggggttgttttttgcccgcctggcgagtatccgcacgatgcggttcatctctttttccctgccgattaccggatcgagtttgccggccctcgccagcgcggacagatcgcgggagaaattatccaatgtgggggtaagcacggggtaagacgccggcctgacttttgccctgtccgtatgctgtccctggtactttga

SEQ ID NO: 51280 - protein, 143 aa, Unknown
  Obtained from environmental sample
  misc_feature (1)..(143): Xaa is any amino acid
MDFINKENHIPCLGDFLHDLFEPFLKFTPVLGSGHQGSYVQRKYPLVRKGFRRVSGSKQLGQPLDNSRFADARLPHQDGVVFCPPGEYPHDAVHLFFPADYRIEFAGPRQRGQIAGEIIQCGGKHGVRRRPDFCPVRMLSLVL

SEQ ID NO: 51281 - DNA, 429 bp, Unknown
  Obtained from environmental sample
  misc_feature (1)..(429): n is a, c, g, or t
ttggccgcgtcaatggtcccttccgcgcctccggcgccgataataacgtggatttcatcaataaagagaatcacattccgtgcctgggcgatttccttcatgatctttttgagcctttcctcaaattcaccccggtacttggttccggccaccagggatcctatgtccagcgcaagtatccgcttgtccgaaagggcttccggcgcgtttctggaagcaagcaactgggccagcccctcgacaatagccgttttgccgacgccagactcccccaccaggatggggttgttttttgcccgcctggcgagtatccgcacgatgcggttcatctctttttccctgccgattaccggatcgagtttgccggccctcgccagcgcggacagatcgcgggagaaattatccaatgtgggggtaagcacggggtaa

SEQ ID NO: 51282 - protein, 142 aa, Unknown
  Obtained from environmental sample
  misc_feature (1)..(142): Xaa is any amino acid
MAASMVPSAPPAPIITWISSIKRITFRAWAISFMIFLSLSSNSPRYLVPATRDPMSSASIRLSERASGAFLEASNWASPSTIAVLPTPDSPTRMGLFFARLASIRTMRFISFSLPITGSSLPALASADRSREKLSNVGVSTG

SEQ ID NO: 51283 - DNA, 546 bp, Unknown
  Obtained from environmental sample
  misc_feature (1)..(546): n is a, c, g, or t
atgggccttttcaatttcatcaaagaggatcacccggtaagggttcttgcggattttttccgtaagggcgccgccttcctcatagcctatatagcccggaggagcccctacaagacgggagacattgtgtttttccatataatcggacatatcaattctgaccagggagtcgaggctttcaaaaagatattccgaaagccgctttgccaggagggttttcccaacccccgtaggtcccaaaaaaataaaagaacccaggggacgccggggagaagaaattccaaccctggaacgccttattgccccggagattcgcttaaccgcctcatcctggccaatgacccccagggaaagttctttttctatattcaaaagacgacgggattcctgttcctcaaggtgattcaaaggtataccggtgatttccgccactaccttccgtacatccccctcctctaccaggggccgttcgttctggatgctcaattcccaggccttacgcagggcttccagcttttgcctctgcctgcgaaccttgtcccgtaa

SEQ ID NO: 51284 - protein, 181 aa, Unknown
  Obtained from environmental sample
  misc_feature (1)..(181): Xaa is any amino acid
MGLFNFIKEDHPVRVLADFFRKGAAFLIAYIARRSPYKTGDIVFFHIIGHINSDQGVEAFKKIFRKPLCQEGFPNPRRSQKNKRTQGTPGRRNSNPGTPYCPGDSLNRLILANDPQGKFFFYIQKTTGFLFLKVIQRYTGDFRHYLPYIPLLYQGPFVLDAQFPGLTQGFQLLPLPANLVP

SEQ ID NO: 51285 - DNA, 1437 bp, Unknown
  Obtained from environmental sample
  misc_feature (1)..(1437): n is a, c, g, or t
atgtcagtttggggactgcgctgtccactggttttcaacacaaactggcttgcctcgatctggaatatccctacaggcgatttgacaataggcgacaatcttcccacgctcaaaccgaatacgcaaagccccgctcccacgcttccggcggcgtacaatgcgcccggcacggcggctaatcccttcttcgttaccaacgaagccgatctccgcaaggtcggaaccggcactgacggctggacactttcggcgcactacaggcagacacagaacatcacgctgaccaataacttatccgtgattggcacaaacattaataagttcaccggttcgtatgacgggaacgaaaaaaccatttccggcttgaccatgacacgcaccagcgttagttattttggattattcggctatatcggatcagatggcattgtgaaaaatgttaccgttaccaacggctcgataaccggaaccgcaagcagttatttcggaggcattgccggacagaacgaaggcacgattgaaaactgctcctttagcggaaccgtcaacggcgacacaaccagcgataatgtcggcggcattgtcggagagaatagcagtaccggcacggtgtcaaacagcataaacaacgcaacggtaaaaggcagagatcaggtcggcggcgttgtcggacagaataacggcacggtgataaacagcagtaacaacgattcggtaaccggcaataatcagaccggcggtattgcgggaacggctcagggcaaaatcgaaaactgttacaacacgggaaccgttaccggaaaccagcaagtcggcggtatcgccggtactaatgtcggcagcggtaattatataaagaactcctataacacggcaaatgttaccagctccgccggaacaagctctaatctcggcggcattgtcgggtttaaccaagcaaacacaacggtagaatactgctacaataccggcaatcttttcggccccaatgcggtcggcggcattgcgggtaacgtcgccgccggaagtaccgtgcggtactgcgtatcgctcggcgaaagggtaaccggcagcggaactaatatcggtcgcatagcagggatttacaatgccacgctcaccggcaatgttgcccgtgaactgatgagaatcggcgcaagcggctcggagtcggtggtaacaggagcgacaactcaaggcaacggcttagacgtcagtttgggagtgggacaacaaggctctgttttctccggttggaattattctaccatttggaatatcagcggtaatttggttgtgggcggcgatttgcccacgctcaaagataatacgcaaagccccgctcccactctgccgggatcgaacccggcgttaggcacggcggctaatcccttccttgttaccaaacgaagccgatctccgcaaggtcggcactga

SEQ ID NO: 51286 - protein, 478 aa, Unknown
  Obtained from environmental sample
  DOMAIN (267)...(295): The GLUG motif
  misc_feature (1)..(478): Xaa is any amino acid
MSVWGLRCPLVFNTNWLASIWNIPTGDLTIGDNLPTLKPNTQSPAPTLPAAYNAPGTAANPFFVTNEADLRKVGTGTDGWTLSAHYRQTQNITLTNNLSVIGTNINKFTGSYDGNEKTISGLTMTRTSVSYFGLFGYIGSDGIVKNVTVTNGSITGTASSYFGGIAGQNEGTIENCSFSGTVNGDTTSDNVGGIVGENSSTGTVSNSINNATVKGRDQVGGVVGQNNGTVINSSNNDSVTGNNQTGGIAGTAQGKIENCYNTGTVTGNQQVGGIAGTNVGSGNYIKNSYNTANVTSSAGTSSNLGGIVGFNQANTTVEYCYNTGNLFGPNAVGGIAGNVAAGSTVRYCVSLGERVTGSGTNIGRIAGIYNATLTGNVARELMRIGASGSESVVTGATTQGNGLDVSLGVGQQGSVFSGWNYSTIWNISGNLVVGGDLPTLKDNTQSPAPTLPGSNPALGTAANPFLVTKRSRSPQGRH

SEQ ID NO: 51287 - DNA, 681 bp, Unknown
  Obtained from environmental sample
  misc_feature (1)..(681): n is a, c, g, or t
ttgttaccaaacgaagccgatctccgcaaggtcggcactgaaacaaccgccggaggctggacgctttcggcgcactacaaacagacacagaacatcaccatgacgggcggcaactttccgaggattggcacaggcacaagcaccaccctattcaccggcacgtatgacggggacggaaaaaccatcaccggcttgaccataaccggcagtgctaattatttaggattattcagcactatcggcgcaagcggcgtggtgaaaaacatgaacgttaccggcacgataacccaaaccgcagacacgtcgtttaccggcggcattgcgggtacaaatgaaggcacgattgacaactgctcctttagcggaaccattaccggatcatcctgcgatgaagtcggcggcattgtcggaaggcataccggcacgatgataaacagcagaagctccgcaacggtaatcggcagaaatcaggtcggcggcattgccggaaggaatcaaggcgcgattgaaaacagttacaacacgggaaccatcagcggaaaccagtcggtcggcggtatcgcaggagttaatacaggaagcggtaaatatataaagaactgctataacacggcaaatttaccgctactaacaacactgtcggaggcatttcagggtctaactcaacaaccgcattggtag

SEQ ID NO: 51288 - protein, 226 aa, Unknown
  Obtained from environmental sample
  DOMAIN (100)...(125): The GLUG motif
  misc_feature (1)..(226): Xaa is any amino acid
MLPNEADLRKVGTETTAGGWTLSAHYKQTQNITMTGGNFPRIGTGTSTTLFTGTYDGDGKTITGLTITGSANYLGLFSTIGASGVVKNMNVTGTITQTADTSFTGGIAGTNEGTIDNCSFSGTITGSSCDEVGGIVGRHTGTMINSRSSATVIGRNQVGGIAGRNQGAIENSYNTGTISGNQSVGGIAGVNTGSGKYIKNCYNTANLPLLTTLSEAFQGLTQQPHW

SEQ ID NO: 51289 - DNA, 696 bp, Unknown
  Obtained from environmental sample
  misc_feature (1)..(696): n is a, c, g, or t
atgagcgaaaaacaaggtaaaaaagagccacatgcaaaagcggcagaaaaagaaccgaaaaacgcaaatgtgcaggagttgattcaagatgttgacgccctaatgcaaaggtttattgacaccgaaggtttgggcggcggcctaaccagcaacgaccgtagaaggctggtgggagtcggcgtgcggaataacggctttatcgacaaggcgtttgacattgcccgtgataatccgcaatttatgccagcgcattttgacgtgaacgcgcttaatcaaaacatggcagatttggaaaatttgcgccagttgatgtgggtattgcagcaatttttacaggttgttaataacgcttttatggttcatgccgacagttgctatcgggacgctctccgcatttacggcagtttgcaggaacaggctcgcaacagggtggacggtgcgcaaccgctattcaatgcgctgagaacttttttcagcaaaacacgaaggcagccagcggacgagcctacggaaatggaactggagagggacatcaagcgccttattcacggaaaagccgacggggaaattgtcatcaaaaacgaagctccccatatcggcggcggcttgcacgaagttatcgacaatattcacaaaggaaggagcgcatttaaaggcacagtcgaagaaagcattgatgaaagtaaaataaggtga

SEQ ID NO: 51290 - protein, 231 aa, Unknown
  Obtained from environmental sample
  misc_feature (1)..(231): Xaa is any amino acid
MSEKQGKKEPHAKAAEKEPKNANVQELIQDVDALMQRFIDTEGLGGGLTSNDRRRLVGVGVRNNGFIDKAFDIARDNPQFMPAHFDVNALNQNMADLENLRQLMWVLQQFLQVVNNAFMVHADSCYRDALRIYGSLQEQARNRVDGAQPLFNALRTFFSKTRRQPADEPTEMELERDIKRLIHGKADGEIVIKNEAPHIGGGLHEVIDNIHKGRSAFKGTVEESIDESKIR

SEQ ID NO: 51291 - DNA, 879 bp, Unknown
  Obtained from environmental sample
  misc_feature (1)..(879): n is a, c, g, or t
ttgaggatcgaacttgtaaaagcgatcaaaaaagttaccgatttaccgattgaaatccacacacacgccacgactggaatgtctgtggcgactcttaccaagtgcgccgaagcgggagcggaaattcttgacactacaatttcctcaatgtctatgggcacaagccacagtcccacagagacaatggtagaaattttcagaggaacagagtacgacacgggacttgacacaagcctgttactcgaaattgccgcctacttccgcgaagtacgcaagaattataaaaaattcgaatccagcttccttggagcggatacccgtattctggcaagtcaggttcccggcggtatgctgagtaaccttgaaagccagcttaaagagcagggcgcttcggacaaaatagacgacgtgcttaaagaaatcgccgtagtccagaaagacgcgggctatccgccgcttgttactcctacaagccagattgtcggaacacagtccgtattcaacgtgctgttcggacgctacaacaaactttccggcgaattccaggacttggttgccggtaaatacggcgcctgccccgcccccaaaaatcccgacgttgttaaaaaagcgcttgaatcccttaaaatggaaaaagaaatcacccaccgcccggcggatgatattcccgatgaatataccaaacttgaagacgagaccaaaaaacttttaggcacaagctcggtaacaacagaagatgttcttacttatgccatgttcccgaaagtcgccccggatttcttcaaaaaacgcgccaacggccccgtggtcttcaaacctgaagccgatgctccaaagccgcggctgccgcgccgggacaggctgcgcgttactctgtaa

SEQ ID NO: 51292 - protein, 292 aa, Unknown
  Obtained from environmental sample
  DOMAIN (108)...(292): Conserved carboxylase domain
  misc_feature (1)..(292): Xaa is any amino acid
MRIELVKAIKKVTDLPIEIHTHATTGMSVATLTKCAEAGAEILDTTISSMSMGTSHSPTETMVEIFRGTEYDTGLDTSLLLEIAAYFREVRKNYKKFESSFLGADTRILASQVPGGMLSNLESQLKEQGASDKIDDVLKEIAVVQKDAGYPPLVTPTSQIVGTQSVFNVLFGRYNKLSGEFQDLVAGKYGACPAPKNPDVVKKALESLKMEKEITHRPADDIPDEYTKLEDETKKLLGTSSVTTEDVLTYAMFPKVAPDFFKKRANGPVVFKPEADAPKPRLPRRDRLRVTL

SEQ ID NO: 51293 - DNA, 612 bp, Unknown
  Obtained from environmental sample
  misc_feature (1)..(612): n is a, c, g, or t
gtgaacggctcaaattacgacgtggttgtctctcccgcgggaactgtagccgctgtccctgccgcttcatcagcggcgcctgcggcaagctcgctttcagcgttacccacagtgggcggagcgacaattcccgcgcctgtagccggaacgatactccgctatgtcgcgtcagagggcgcgcaggtaaaatccggcgacaccgtattaattattgagtccatgaaaatggaactggaaataaaagctacttcgtccggccccattcacttccttgttccaaccggaacgcaagttgcggcccagcagcctgtcgcgcaaatcggcggcggagctccggcggctgctccagcaccggctgcagcggctccggccccggcggccgcaccggctccatccggcggcggagttacaattcccgcgcctgttgcgggaacaattctgcgttacgcggtaaatgaaggcgccactgtctccgccggcgataatgtcgtcataattgagtccatgaaaatggaactggaaataaaagcgacttcgtcaggaaaagttcacttccttgttcccgcgggaacacaggtcgcctcccaacagcccattgcggaaattatgtaa

SEQ ID NO: 51294 - protein, 203 aa, Unknown
  Obtained from environmental sample
  SIGNAL (1)...(25)
  DOMAIN (41)...(107): Biotin-requiring enzyme
  misc_feature (1)..(203): Xaa is any amino acid
MNGSNYDVVVSPAGTVAAVPAASSAAPAASSLSALPTVGGATIPAPVAGTILRYVASEGAQVKSGDTVLIIESMKMELEIKATSSGPIHFLVPTGTQVAAQQPVAQIGGGAPAAAPAPAAAAPAPAAAPAPSGGGVTIPAPVAGTILRYAVNEGATVSAGDNVVIIESMKMELEIKATSSGKVHFLVPAGTQVASQQPIAEIM

SEQ ID NO: 51295 - DNA, 963 bp, Unknown
  Obtained from environmental sample
  misc_feature (1)..(963): n is a, c, g, or t
atgttaaaccaaaaaaaagatcccatattaatcgtaaaattttgtttactcgttttaatcgccgcgtttgctttttcctttatcggttccgtatttaacgcaagggctatggctcaaaccaaaacaaccgaagaactgccttcgttcagaaatccggaaggcataataccaaacagcagcgacctgccccgtgtaaatttaaaagaatttataatagacttggggaaaaccacgggtatttacgcttttatcactaatgtgttagataaaaccactccctctaatgaaacattcacagtaaaaggatggtatgagcttataatggttttggtcggcttccttgtcatttatcttggcgcggccaaaggctttgagcctttattgcttgttccaatcggtttcggcattgtgttcgcgaatattccttttgccggaatgggggaacagggcgtatggaacgattcacttaaattatgggatcatcagggctttttgaatgtaatttacaatgccggaataggcaatgaattttttccgttgataatttttatcggcataggcgcgatgacggatttcggccctcttatcgcaaatccgaaaaccgcgcttttgggagcggcggcgcagttcggcgttttcggcacattgttccttatcagtgtcgccaactaccttcccaccgtcgccttcaatcttaaagaagcctgcggcgttgcgataatcggcggagcggacggtcccacgacaatttacatcgctgcaaaacttgcccctcatcttttagcgactgtagcggtagcggcatattcctacatggctctagtgcctatgatccagccgcccatcatgaaactgctcacaacccaaaaagagcggcttatcaaaatgaaacagcttcgtcctgtttccaaaactgaaaaaatcgccttcccgataattgtattttcactggcaattctgtga

SEQ ID NO: 51296 - protein, 320 aa, Unknown
  Obtained from environmental sample
  SIGNAL (1)...(26)
  DOMAIN (102)...(320): Na+-transporting methylmalonyl-CoA/oxaloacetate decarboxylase, beta subunit
  misc_feature (1)..(320): Xaa is any amino acid
MLNQKKDPILIVKFCLLVLIAAFAFSFIGSVFNARAMAQTKTTEELPSFRNPEGIIPNSSDLPRVNLKEFIIDLGKTTGIYAFITNVLDKTTPSNETFTVKGWYELIMVLVGFLVIYLGAAKGFEPLLLVPIGFGIVFANIPFAGMGEQGVWNDSLKLWDHQGFLNVIYNAGIGNEFFPLIIFIGIGAMTDFGPLIANPKTALLGAAAQFGVFGTLFLISVANYLPTVAFNLKEACGVAIIGGADGPTTIYIAAKLAPHLLATVAVAAYSYMALVPMIQPPIMKLLTTQKERLIKMKQLRPVSKTEKIAFPIIVFSLAIL

SEQ ID NO: 51297 - DNA, 684 bp, Unknown
  Obtained from environmental sample
  misc_feature (1)..(684): n is a, c, g, or t
gtgggctttttccagggcggagatcatcagatcttcgcttgcctcgttggcgccgccttccaccatggtgatcccgtctttggttcccgctactacaatttcaagggtcgccctttcaatctgctcgtagcttgggttaagcacaagttccccgtctacctggcagacgcgggctccggcaacggggccgtggaacggtatatcggaaacatgcaccgccgcagaggatgcgacaatcgcgagaatatccgtgggattaacctggtctgccgatacagcagttggaataacctgaatttccctaccaaaagctttttcaaaaagcggcctcatgggccgatcaatgagtctggaaacaagaatttccttgtctttggggcggctttcgcgctttataaagccgccgggaatctttcntgcggcatagtactnttcgttgtagtcaactgtaagggggacataatccaggcctgccagcgcttcgctggaagcgcaaactgtggctattaccgccgatcccgcgtactgcgcaaaaaccgcaccgttagtctgcttcgcgatcctgccggtttcaaggatcagttcatgtccggcgatttgaaatgttacttgttgaagcataactatttacgcaatcccaattctttaataagggagcggtatttttcaagattcgtcctttga

SEQ ID NO: 51298 - protein, 227 aa, Unknown
  Obtained from environmental sample
  misc_feature (1)..(227): Xaa is any amino acid
MGFFQGGDHQIFACLVGAAFHHGDPVFGSRYYNFKGRPFNLLVAWVKHKFPVYLADAGSGNGAVERYIGNMHRRRGCDNRENIRGINLVCRYSSWNNLNFPTKSFFKKRPHGPINESGNKNFLVFGAAFALYKAAGNLSCGIVLFVVVNCKGDIIQACQRFAGSANCGYYRRSRVLRKNRTVSLLRDPAGFKDQFMSGDLKCYLLKHNYLRNPNSLIRERYFSRFVL

SEQ ID NO: 51299 - DNA, 2208 bp, Unknown
  Obtained from environmental sample
  misc_feature (1)..(2208): n is a, c, g, or t
atgcttcaacaagtaacatttcaaatcgccggacatgaactgatccttgaaaccggcaggatcgcgaagcagactaacggtgcggtttttgcgcagtacgcgggatcggcggtaatagccacagtttgcgcttccagcgaagcgctggcaggcctggattatgtcccccttacagttgactacaacgaanagtactatgccgcangaaagattcccggcggctttataaagcgcgaaagccgccccaaagacaaggaaattcttgtttccagactcattgatcggcccatgaggccgctttttgaaaaagcttttggtagggaaattcaggttattccaactgctgtatcggcagaccaggttaatcccacggatattctcgcgattgtcgcatcctctgcggcggtgcatgtttccgatataccgttccacggccccgttgccggagcccgcgtctgccaggtagacggggaacttgtgcttaacccaagctacgagcagattgaaagggcgacccttgaaattgtagtagcgggaaccaaagacgggatcaccatggtggaaggcggcgccaacgaggcaagcgaagatctgatgatctccgccctggaaaaagcccacggcatgattaaggagctttgccttttacaagagaaactcagggagctggccggaaagccaaaactgtcactaacggaagtttcccacgcgcttgaaaacaaggacgcgatattttccgccgcttatccgcttcttgaggccgcctgctttctgaagggcaagcaggaacggcgggacgccattttgaaggtcaaggcggatctggcaagtgtacatgccgcccagcttgaaaacgagaaccagaaaaaacttttcgacgccctttttgaggatatgcagtatgaaatactgagatcttcaattttaaataaggggatcagggtagacggcaggggaaccgaggacataagggatattacctgtgagatcggcatactcaaacggacgcatggctcggcgctctttacaagaggcgagacccaggcgcttgtggtaaccacccttgggacggtttttgacgaacagatttacgacgacatagaaggcgacaagcgggaacatttcatcctccattataactttcccccttattcggtgggagaagtcggacgattgggtaccggccgccgcgaaattggacacggaaacctggcgcgccgctccctggaagccatgataccgccgaaggaagtttttccctacacgatacgggttgtgtctgaaataatggaatcaaacggctcgtcttccatggcttcggtttgcggcggaaccctttcaatgcttcacgccggagtacccatgaaaaagccggtggcgggaattgccatgggcctgataaccgaaagcaacgcgcctggcgcccgttacgccatcctgtcggacattctgggagaggaagaccaccttggggacatggacttcaaagttgcgggtacggaagacgggatcaccggctttcagatggatattaagatcgcgggcgttaatcctgaaataatgcggaatgcccttgaccaggcaaaacgcggacgcctgcatattctttccaaaatgaacagtaccatcagcaagccggtggaagagattagcgagtatgctccaaagatactaaccctgcgaatcgacattgacaaaatcggtgcgctgataggccccggcggaaaaaatatcaaggcgatctgcgagcagtacagcgtaaagatcaacaccgaggacgacggtacggttaccatcttcggaaaaaataccacggacgccactgacgcaaaagccgcagtacttggcattgttttggatccggaggtgggaaagacatataacggcacggtcaagcgggtaatggaatacggcgcgtttgtggaaatacttccgggcaaggaagggttggttcatataagcaaactttcccgccagagggttgcccaggtaagcgatgtggtcaatgaaggggacaagattcaggtaaagttgattgaaattgacaaggtaggccgccttaacctttcttacatcgacgctatcgatccggtgcctggcggcggcatggagggcagccggggagcttccggcggaaatcctaacagaaactctgacaggaatcccgacagaaactctgacaacaggcgggacttccgccgccgttag

SEQ ID NO: 51300 - protein, 735 aa, Unknown
  Obtained from environmental sample
  DOMAIN (557)...(614): KH domain
  misc_feature (1)..(735): Xaa is any amino acid
MLQQVTFQIAGHELILETGRIAKQTNGAVFAQYAGSAVIATVCASSEALAGLDYVPLTVDYNEXYYAAXKIPGGFIKRESRPKDKEILVSRLIDRPMRPLFEKAFGREIQVIPTAVSADQVNPTDILAIVASSAAVHVSDIPFHGPVAGARVCQVDGELVLNPSYEQIERATLEIVVAGTKDGITMVEGGANEASEDLMISALEKAHGMIKELCLLQEKLRELAGKPKLSLTEVSHALENKDAIFSAAYPLLEAACFLKGKQERRDAILKVKADLASVHAAQLENENQKKLFDALFEDMQYEILRSSILNKGIRVDGRGTEDIRDITCEIGILKRTHGSALFTRGETQALVVTTLGTVFDEQIYDDIEGDKREHFILHYNFPPYSVGEVGRLGTGRREIGHGNLARRSLEAMIPPKEVFPYTIRVVSEIMESNGSSSMASVCGGTLSMLHAGVPMKKPVAGIAMGLITESNAPGARYAILSDILGEEDHLGDMDFKVAGTEDGITGFQMDIKIAGVNPEIMRNALDQAKRGRLHILSKMNSTISKPVEEISEYAPKILTLRIDIDKIGALIGPGGKNIKAICEQYSVKINTEDDGTVTIFGKNTTDATDAKAAVLGIVLDPEVGKTYNGTVKRVMEYGAFVEILPGKEGLVHISKLSRQRVAQVSDVVNEGDKIQVKLIEIDKVGRLNLSYIDAIDPVPGGGMEGSRGASGGNPNRNSDRNPDRNSDNRRDFRRR

SEQ ID NO: 51301 - DNA, 654 bp, Unknown
  Obtained from environmental sample
  misc_feature (1)..(654): n is a, c, g, or t
atgatcagatcggccgaggtcctacggctgagccgggagtctcgtattttggagcggtacacccttgtctttttttttcaccctaagcaaagggacgctttcctgtaccatgcccttctaacggcggcggaagtcccgcctgttgtcagagtttctgtcgggattcctgtcagagtttctgttaggatttccgccggaagctccccggctgccctccatgccgccgccaggcaccggatcgatagcgtcgatgtaagaaaggttaaggcggcctaccttgtcaatttcaatcaactttacctgaatcttgtccccttcattgaccacatcgcttacctgggcaaccctctggcgggaaagtttgcttatatgaaccaacccttccttgcccggaagtatttccacaaacgcgccgtattccattacccgcttgaccgtgccgttatatgtctttcccacctccggatccaaaacaatgccaagtactgcggcttttgcgtcagtggcgtccgtggtattttttccgaagatggtaaccgtaccgtcgtcctcggtgttgatctttacgctgtactgctcgcagatcgccttgatattttttccgccggggcctatcagcgcaccgattttgtcaatgtcgattcgcagggttag

SEQ ID NO: 51302 - protein, 217 aa, Unknown
  Obtained from environmental sample
  misc_feature (1)..(217): Xaa is any amino acid
MIRSAEVLRLSRESRILERYTLVFFFHPKQRDAFLYHALLTAAEVPPVVRVSVGIPVRVSVRISAGSSPAALHAAARHRIDSVDVRKVKAAYLVNFNQLYLNLVPFIDHIAYLGNPLAGKFAYMNQPFLARKYFHKRAVFHYPLDRAVICLSHLRIQNNAKYCGFCVSGVRGIFSEDGNRTVVLGVDLYAVLLADRLDIFSAGAYQRTDFVNVDSQG

SEQ ID NO: 51303 - DNA, 807 bp, Unknown
  Obtained from environmental sample
  misc_feature (1)..(807): n is a, c, g, or t
gtgtacactccggagcttaccgtaacctacacaaggggcgacgtaataaaaacaaccgccacaaccgtcttggttgacgtaaccggacctgctcttacatttgccgcttctcctgaatatttcagccccgacaatgacggctatgatgacgagttgaatatcacgctttcggcgacggacgtgtctcctgttgcaggctggcagttggaaatccgcgaaccggagccgccgtatcaactgttccgccgctatgcgggaacaggcagtccgggcggacgcattgtgtgggacggaagaagcgacaagggagagcttgtccaatccgctacggattatccttacacatatacggcgtctgatgttctgggcaattcaagcaagaccgaaggaaaaatcggcgttgacgtgcttgtcatccgcgatggggatcgtttgaagatacagattccgtctatcgtattcagggcgaattttgccgattttgtagggttaaataaagaagttgttgacaacaacaaccgtattctgcggcgtatcgcgcagatactcaacaagttccgcgattacaaggttttggtcgaaggccacgccaacacgacacagccggccggaacagcccgcgaccgcgaagagacagagcttaaacgcataagcgaagcgcgggcaaaagcggttgtggacattttggtaaaaaacggagttgcgcgaaacaggctttcggccgcgggcgtcggcggttcaaaccctattgtaagttttgaagaccggaacaactggtggaaaaaccgccgtgtggagtttatttga

SEQ ID NO: 51304 - protein, 268 aa, Unknown
  Obtained from environmental sample
  DOMAIN (161)...(263): OmpA family
  misc_feature (1)..(268): Xaa is any amino acid
MYTPELTVTYTRGDVIKTTATTVLVDVTGPALTFAASPEYFSPDNDGYDDELNITLSATDVSPVAGWQLEIREPEPPYQLFRRYAGTGSPGGRIVWDGRSDKGELVQSATDYPYTYTASDVLGNSSKTEGKIGVDVLVIRDGDRLKIQIPSIVFRANFADFVGLNKEVVDNNNRILRRIAQILNKFRDYKVLVEGHANTTQPAGTARDREETELKRISEARAKAVVDILVKNGVARNRLSAAGVGGSNPIVSFEDRNNWWKNRRVEFI

SEQ ID NO: 51305 - DNA, 1569 bp, Unknown
  Obtained from environmental sample
  misc_feature (1)..(1569): n is a, c, g, or t
ttggtccactttcggaggaatattttcgccgcaaaggaaatttatcccggcatgtctctcggcgcgggttttaacttcggttacggcgaggaaacaactctttccggggatttaggcattcattacaatatgggaaagcttggattcctgaacaattttacatgggcatttatgctgcgaagcatggggttaagttatttcccgacatggctgactcccgcgggaggagtttcattcgatttattaaccgtaaagggaaaaaacggtaagattgatcctttcgtagtcagcgcggcggcggatttaagcgtcccttccctattctacccaaaatatataaatttgattattaagaccggcattaattttaaaatagctgactttataactctgtcggcatcatggccaggcggctccggtctgaacttacgcgagcttttcgaagacgaaataggtttacagacttttccctcaatcggtcttagcgtaaacattatccttccgtcgggcgaagaaagaatagcgggcggacgcctgccttctgacggcgacttaaaaatcgcgggagcttataaacctctttacgaaggagttaccgctgtcggcggcggcgtcagctggtatgtcgggcaaagggacttaactcctccagtcatagatcccgcatatcctgaaactatttatttttctcccaataacgacggcaaggcggatttcctggaattccccaacagcataacagacaacaaatatatcgtaagctggaagatggaaataaaagatgaaaacggcgatattgtccgtgtaatcgaaaacaaggaacagcggtttacaagttttaattttaaggatgtctttaagcggatattctcgaagaaaaaacaaatagacattcccgataccttgaggtgggacggaatacgaagttcgggagaattggccccggacggaaaatatttctttacaattacagctgcggacgattcaggcaatattactatttcacaagattacgaaactgtaattaagaataccgtgccggtaatctctgttaacccgctgaccgacgcgcaaagaatatttgatccaaaagcccagggcggaaacagctcggttactttcacgcataaaggctcgaaagaagattcatggcaaagggttatcataaattcatcaggcgacatagtgcggactttcagcgaacctatgagcggagagccggggcctcaggtttggaacggcagggacgacacaggaaaaattgccccggacggagtgtacagttaccgtatcagcgtaacggataaggcacaaaattccgcaagcgcggtattgcccaatatcatccttgactcccgtgaagccggcgcttttcttctaagttccgcatccggcatagcgccaaaacctaatcaaactgctgaacttgtaaactttacaatacggctcctcttaaacgacggcattgacaactggaaactggaattaaaagacggaaaaaggcgttgcgcagagaacattctcgggcgcgtcgaaagtcccggcgtcccagggctggaacggccttga

SEQ ID NO: 51306 - protein, 522 aa, Unknown
  Obtained from environmental sample
  misc_feature (1)..(522): Xaa is any amino acid
MVHFRRNIFAAKEIYPGMSLGAGFNFGYGEETTLSGDLGIHYNMGKLGFLNNFTWAFMLRSMGLSYFPTWLTPAGGVSFDLLTVKGKNGKIDPFVVSAAADLSVPSLFYPKYINLIIKTGINFKIADFITLSASWPGGSGLNLRELFEDEIGLQTFPSIGLSVNIILPSGEERIAGGRLPSDGDLKIAGAYKPLYEGVTAVGGGVSWYVGQRDLTPPVIDPAYPETIYFSPNNDGKADFLEFPNSITDNKYIVSWKMEIKDENGDIVRVIENKEQRFTSFNFKDVFKRIFSKKKQIDIPDTLRWDGIRSSGELAPDGKYFFTITAADDSGNITISQDYETVIKNTVPVISVNPLTDAQRIFDPKAQGGNSSVTFTHKGSKEDSWQRVIINSSGDIVRTFSEPMSGEPGPQVWNGRDDTGKIAPDGVYSYRISVTDKAQNSASAVLPNIILDSREAGAFLLSSASGIAPKPNQTAELVNFTIRLLLNDGIDNWKLELKDGKRRCAENILGRVESPGVPGLERP

SEQ ID NO: 51307 - DNA, 861 bp, Unknown
  Obtained from environmental sample
  misc_feature (1)..(861): n is a, c, g, or t
ttgtttgcctttataggtctttggtccctaatagtttattacccgctagctcacatggtatggggtggtggtggcttgctaggcggcggttggctaaattcggttgattttgcaggcggaaacgtggtgcatatctcttcgggtgtatctggactcgtggtttgtttattgctaggcaggagacaaggctatgaacttcatacttatagaattcacaatattccttttgttatgctcggtatggctcttctgtggtttggctggtacggcttcaatgccggtagtgcagcagcagcagacggcttggctgcgcatgcatttgtgacaacgtctatttcggcggcggcagcaatgctttcatggatggcgatggatattctcttcagcggcaagccaactctaatcggtgcttgcacaggagttgtggcagggctggttggcatcactcctgccgctggatatgttccaatttgggctgcttttgttataggtgcctttgtaagccctgtttgttttggcggcattttgctggttaaaaagagactgaaaatagatgactcattggatgcctttggttgccacggcataggaggcatttttggcggacttatgactggtttgtttgccgatcccaaggttggtgaaaccgctggtttgttctttggaaatcccgcgcagttggggcgccaagcactggctattgtaatcagcatttcacttgctgttgtaggctcattgatttgcgctggaattgtccggtctttcacaacgctgcgcgttgatagaaaacacgaacttactgggctagacgtatcggaacacggtgaaaacgcatatccagcctataacggtttggattaa

SEQ ID NO: 51308 - protein, 286 aa, Unknown
  Obtained from environmental sample
  DOMAIN (1)...(279): Ammonium Transporter Family
  misc_feature (1)..(286): Xaa is any amino acid
MFAFIGLWSLIVYYPLAHMVWGGGGLLGGGWLNSVDFAGGNVVHISSGVSGLVVCLLLGRRQGYELHTYRIHNIPFVMLGMALLWFGWYGFNAGSAAAADGLAAHAFVTTSISAAAAMLSWMAMDILFSGKPTLIGACTGVVAGLVGITPAAGYVPIWAAFVIGAFVSPVCFGGILLVKKRLKIDDSLDAFGCHGIGGIFGGLMTGLFADPKVGETAGLFFGNPAQLGRQALAIVISISLAVVGSLICAGIVRSFTTLRVDRKHELTGLDVSEHGENAYPAYNGLD

SEQ ID NO: 51309 - DNA, 345 bp, Unknown
  Obtained from environmental sample
  misc_feature (1)..(345): n is a, c, g, or t
atgataaaagtagaagcaatcgttcgcgaagaaaagtacgaggatgtcaaggcagccttgaacaaaattgaagtcaccggaattaccgttttccaagttatgggatgcggtgtccaaagaggatacaccgaattggttcgtgggcaacaggttgattatgccctgagacaaaaagtgaaattcgaaatcgtggtatcttctgaagaatgggctgagaaaaccatcaaagcaattcaggaagccgcctatactggaaatgtgggcgatggaaaaattttcacttatgacttgcgttccgttatgcggattcgcacaaaggaaacggggacacaagccataaactga

SEQ ID NO: 51310 - protein, 114 aa, Unknown
  Obtained from environmental sample
  DOMAIN (4)...(106): Nitrogen regulatory protein P-II
  misc_feature (1)..(114): Xaa is any amino acid
MIKVEAIVREEKYEDVKAALNKIEVTGITVFQVMGCGVQRGYTELVRGQQVDYALRQKVKFEIVVSSEEWAEKTIKAIQEAAYTGNVGDGKIFTYDLRSVMRIRTKETGTQAIN

SEQ ID NO: 51311 - DNA, 1095 bp, Unknown
  Obtained from environmental sample
  misc_feature (1)..(1095): n is a, c, g, or t
atgcaagaaggccaggtaagaataccctctggctgcgcaatatcgggcattatcaacaagtccgggaagcgcattggaggcgaggctattataaaatctatcgctgtaatgcacgaccgctcaaatggtttgggcggcggctttgcagcgtatggaatttaccctgattataagaactattatgctttacatatattttatgagtccaatgccgcaaaaaaagaatgcgaggaatttttggaaaggcattttgatattataaacctttcaaaaattccaaccagaaaaatcaaggaaattacagacgagccgctgatttggcgttattttgtgacgccattgccaaccaaactcgcaagctgccagttggatgagcgagaatacaccgctaaatgcgtgtttcgtgtaaatacaaggatagataaagcctatgtgttttccagtggaaaaaatatgggcgtattcaaagcggttggttttcccgaagacgtgggaagattttataagctggaagaatacgagggctggtgctttaccgcgcacgggcgttatccaaccaatacgccgggctggtggggtggtgcgcatccgtttgctctgctggattactctgttgtgcacaacggcgaaatatcctcttatgatgcaaaccgacgtggcattgaaatgcacggctataaatgcacgctcttaacggataccgaggttattacatatataatagactatttgcacagaaagaaagggcttacgtttgacgaaatcgcagctgttattgcagctccattctggcagactatcgagcagatgccgccggaggagcgcgaggtgcatgagtatctgcgcatcatgttttcgtcttcgctcatcacggggccgttctcgattctggtggggtttgagggcgggctcatggcgctgaatgaccggctcaagctgcgcagtatggttgtgggcgaaaagggtgatctggtttatttctccagcgaggagtcgtcgatccgcgcggtggagccgaatctcgatacggtttgggcacccaagggtggcgagccggtgatcgcttgtctggatggggtgcagaatggcaattaa

SEQ ID NO: 51312 - protein, 364 aa, Unknown
  Obtained from environmental sample
  DOMAIN (106)...(331): Glutamine amidotransferases class-II
  misc_feature (1)..(364): Xaa is any amino acid
MQEGQVRIPSGCAISGIINKSGKRIGGEAIIKSIAVMHDRSNGLGGGFAAYGIYPDYKNYYALHIFYESNAAKKECEEFLERHFDIINLSKIPTRKIKEITDEPLIWRYFVTPLPTKLASCQLDEREYTAKCVFRVNTRIDKAYVFSSGKNMGVFKAVGFPEDVGRFYKLEEYEGWCFTAHGRYPTNTPGWWGGAHPFALLDYSVVHNGEISSYDANRRGIEMHGYKCTLLTDTEVITYIIDYLHRKKGLTFDEIAAVIAAPFWQTIEQMPPEEREVHEYLRIMFSSSLITGPFSILVGFEGGLMALNDRLKLRSMVVGEKGDLVYFSSEESSIRAVEPNLDTVWAPKGGEPVIACLDGVQNGN

SEQ ID NO: 51313 - DNA, 423 bp, Unknown
  Obtained from environmental sample
  misc_feature (1)..(423): n is a, c, g, or t
atgctgttgatccaagatcgctttcatttacggcaatcaggcccttatttacaatatatgggcgcgcgtatttcctcaatgcttagaaaaagaggaaaggagacaaataacaaagaacaatcggaagaattacaaaattgtttttctttgctggtttccgatcccgagtgggaattgattaaaattcttgcggcttattcggacgcggtaaaggaagcggcggaaagcctgaacccgtcctgtattaccgcttatctttacgagttgtcaaaagcgttcagccgtttttatcacgattgtcctattcttaacgcggaagataaatctctttccaaagcaaggcttgaacttagccgcgccgtaatgaccgcgctgaaagccgcgtttcatcttgtgtgcattccgtttctggaagttatgtga

SEQ ID NO: 51314 - protein, 140 aa, Unknown
  Obtained from environmental sample
  DOMAIN (17)...(140): DALR anticodon binding domain
  misc_feature (1)..(140): Xaa is any amino acid
MLLIQDRFHLRQSGPYLQYMGARISSMLRKRGKETNNKEQSEELQNCFSLLVSDPEWELIKILAAYSDAVKEAAESLNPSCITAYLYELSKAFSRFYHDCPILNAEDKSLSKARLELSRAVMTALKAAFHLVCIPFLEVM

SEQ ID NO: 51315 - DNA, 1959 bp, Unknown
  Obtained from environmental sample
  misc_feature (1)..(1959): n is a, c, g, or t
atggtcgagcgcgcgacggtttcttcgcaggactggaaaggataccagccggatgaggaaggttatgtaattcttgaccgttttatatatggcacaacctttactgatgtaattcttaaaaacgcctcgctggacgcgcccgagaatcagaacagatacttctaccgcgtttccgcgtttaacacggcgatgaaatacgaagaaagcgagcatacagatcctgtgtccgccatgctttttaacgcgccggacaatgtaaaggcatccggcggtgtctcgacggaatacgttgaattgcgatgggaactttcgcccggagcggattcttatgaaatattcagaagcgatttccccagcggagtttccgccagttctttgggcactgtccgcggaaatcaatcatggtttagaaacatggtcagcgccgccgagcagggcaaagatttttattacatggtatcggcgaaaaacggttttggatataaaaccccgttgacaagaccggcttatggttatgcccgcgtcttcggcgcgcccgaccagccgaaagtccgccttgcggataattcgggaaggggccagtcaaaaggcgaaataaaaattgagtgggatgaggctgacgaggacggagtttattatgcggtataccgttacagttcagttgattcttcgctgacgaggctggccgataaagaaaataaaacagaatatacggataaggttgggcttaaaacaggcgtgtattactattacaagattcaggccatagttgacgatatagcgtccggcaaggcgctcaaaagccagttttcttcttccgatgatttgaccgagagttatattttaagcccgcccgacagagtagtcgctgaaaaaaaatctgacaacacagtaaccgtcaaatgggaaccggctataggcagtgaaggcgagcgcctcttgtatacttataatgtgtacgcggatagaagtatcagtgggagctttacaactcttgtcagatccgggttttcgagtatagtcgacggggaagggtttatttccgcggaaggactttccgtaagttcaggcgcgtttttcaaagtatctaccgtaaatggcgatgttgagagcggtaaaagcgccgtagtattaccgactccggctgctgctgttatacagggcgcgacacagcgcgcttattttacgggcgcgtcggcggtaccaaattccggcggggtgtatcctgtgaaaattacatggaagaaaccagcggatgaagaacctgaattctataatgtgcagcgttctaccagatcgggagggggcttttctacaattaacgaaaccgcgttaagcgcgagcggtccgtataacgacgtgtattcatacgattcggcgaccggggtttacacctataccgacaaaaacgaaatcgcgaaagtgggcaggaaatactattaccgcgtactttcccttaacgagcttaagcagggaaatttctattcttcggaagcaatcggctatggagcgcttacgcatgaacagtacatacttgaatacaataaaactatgggcagcgcgatgaaaaaactgacgcttatgtataaatccggcagtaccgacaaactcggcagtgaatcaaagaacggcgcgataagcggcacaatatcttacaacgccgccttgtcaggattatccgcgcggattatcattcaacttacaaattacgccgatttatatattgaaaatgaaccagaaaaaggcgtttactttacacttaacggcaattccaatacgtctgtaaatacaagttcaaacggaaatatggacggaacaatgacatgtacgggaatgtatccggggaaaatattttacgaccgcatcgaaatcagaagcggggctgccgcgggcgggacctacggcgttgaaccggaaaacggcggccgcagggagattggatacattattattaattaa

SEQ ID NO: 51316 - protein, 652 aa, Unknown
  Obtained from environmental sample
  misc_feature (1)..(652): Xaa is any amino acid
MVERATVSSQDWKGYQPDEEGYVILDRFIYGTTFTDVILKNASLDAPENQNRYFYRVSAFNTAMKYEESEHTDPVSAMLFNAPDNVKASGGVSTEYVELRWELSPGADSYEIFRSDFPSGVSASSLGTVRGNQSWFRNMVSAAEQGKDFYYMVSAKNGFGYKTPLTRPAYGYARVFGAPDQPKVRLADNSGRGQSKGEIKIEWDEADEDGVYYAVYRYSSVDSSLTRLADKENKTEYTDKVGLKTGVYYYYKIQAIVDDIASGKALKSQFSSSDDLTESYILSPPDRVVAEKKSDNTVTVKWEPAIGSEGERLLYTYNVYADRSISGSFTTLVRSGFSSIVDGEGFISAEGLSVSSGAFFKVSTVNGDVESGKSAVVLPTPAAAVIQGATQRAYFTGASAVPNSGGVYPVKITWKKPADEEPEFYNVQRSTRSGGGFSTINETALSASGPYNDVYSYDSATGVYTYTDKNEIAKVGRKYYYRVLSLNELKQGNFYSSEAIGYGALTHEQYILEYNKTMGSAMKKLTLMYKSGSTDKLGSESKNGAISGTISYNAALSGLSARIIIQLTNYADLYIENEPEKGVYFTLNGNSNTSVNTSSNGNMDGTMTCTGMYPGKIFYDRIEIRSGAAAGGTYGVEPENGGRREIGYIIIN

SEQ ID NO: 51317 - DNA, 339 bp, Unknown
  Obtained from environmental sample
  misc_feature (1)..(339): n is a, c, g, or t
gtgccagggatcggaaatactctgggctttatgcttgcgcaaatattattaacaatatggagtattttttcttttatcatagttttttttattataataattgttatacgcgctgtaggttatctgaataacagcgatatatacagtcctttctggagttttattgattcagcttcgcagccgattttgtacagagtgaacagaatatttacaggcgataaagtaggaagcatattaaaagaaataattttatcgtttatatttttaattatattgcttgtcggcggaaagtttttaatacttttgctttccggtattctttataaactgcctatataa

SEQ ID NO: 51318 - protein, 112 aa, Unknown
  Obtained from environmental sample
  misc_feature (1)..(112): Xaa is any amino acid
MPGIGNTLGFMLAQILLTIWSIFSFIIVFFIIIIVIRAVGYLNNSDIYSPFWSFIDSASQPILYRVNRIFTGDKVGSILKEIILSFIFLIILLVGGKFLILLLSGILYKLPI

SEQ ID NO: 51319 - DNA, 855 bp, Unknown
  Obtained from environmental sample
  misc_feature (1)..(855): n is a, c, g, or t
atgaaaagcaggctgctttttaccttatgtttattatttactcttaccgccgcaatttacggtcaggaaacacccgcaaatgccgaacagccgcctctttccggacaaaatgaaaaacaggatggtacatccgaggaaaataaatccgaaaacgaagaacttgcggaggaaaaggagcctgcaggaggaagactgacgccggaggaaaggcagcgtaccgaacttgagattaaatcttcgaccatgcctgaacttgcggcatggtgccgcacgctcggcctttccgaaggcgggacaaaagaagaacttgcaaaacgcgtcagggagtattttggattgccggagccgaataacacagatgacggccggaaaatattagttattgaatccgcccagtccaccgaatattttacggttgatgttatagatgaagattacgcaaggcttaaaggcgacgtgcatcttattctgcatgataaagaagacgttcataaaataaaagcggacgaagtcctttttaaccgttccagaaatattattaccgcaaagggaaaagttgaatacataaaaataaaaggggatacaacagagattttccgaggagaaaatataaccgttaatattgacgattgggacagcgtttttcttgacggcgattctgaaaaaacgctttcagacgataataccgcgtacaggtttgaagggacggtaatctcgcgcagttatgacgatgtagttattcttaataaagccagaatcagcaacgccaacaatgaagaagctctttggtcgatcaccgcgtcaaaactttggcttcttcccggctcagatttcgctttatttacatggtgttaa

SEQ ID NO: 51320 - protein, 284 aa, Unknown
  Obtained from environmental sample
  SIGNAL (1)...(21)
  misc_feature (1)..(284): Xaa is any amino acid
MKSRLLFTLCLLFTLTAAIYGQETPANAEQPPLSGQNEKQDGTSEENKSENEELAEEKEPAGGRLTPEERQRTELEIKSSTMPELAAWCRTLGLSEGGTKEELAKRVREYFGLPEPNNTDDGRKILVIESAQSTEYFTVDVIDEDYARLKGDVHLILHDKEDVHKIKADEVLFNRSRNIITAKGKVEYIKIKGDTTEIFRGENITVNIDDWDSVFLDGDSEKTLSDDNTAYRFEGTVISRSYDDVVILNKARISNANNEEALWSITASKLWLLPGSDFALFTWC

SEQ ID NO: 51321 - DNA, 639 bp, Unknown
  Obtained from environmental sample
  misc_feature (1)..(639): n is a, c, g, or t
atggaaaaagaacctaacgggatttttcttcgcagtaccgggaaaaaagcaactaacaccgaagaaaacaccttaaaacttttggccgattattatgttaatttaggcgcgtatgcgggaattgatttttccgcgcctaaattgggaatattaaattcttttgatttgtcggtgggcgcgggtttttccagaacaataagcatgataggcggcaattataccccttatgcccaggaatttgacggatctgtcgaatggaataattccaatcttttctcgaatacagtgccattccgctacagaatgaaaacgcaaagttctataaaaggaacatacggcagcctgtcatggttagttccgttttattcagaccctttcatagacagagacttttttcaagaccgctcggaatctatggattggatcaaaatgattcagcaggggtcggaaaaaagcgaagaagaactcaggcagcaggatatattgccttatacatggcaaataagcggaaacatcaaccctgcggtcgattttctttctccttatgtatcaagtttgtctataaacagcttatccacgtcattggcgttcaaaatcatagatgataataatgcaaacatgtaccagcccggaaggtag

SEQ ID NO: 51322 - protein, 212 aa, Unknown
  Obtained from environmental sample
  misc_feature (1)..(212): Xaa is any amino acid
MEKEPNGIFLRSTGKKATNTEENTLKLLADYYVNLGAYAGIDFSAPKLGILNSFDLSVGAGFSRTISMIGGNYTPYAQEFDGSVEWNNSNLFSNTVPFRYRMKTQSSIKGTYGSLSWLVPFYSDPFIDRDFFQDRSESMDWIKMIQQGSEKSEEELRQQDILPYTWQISGNINPAVDFLSPYVSSLSINSLSTSLAFKIIDDNNANMYQPGR

SEQ ID NO: 51323 - DNA, 369 bp, Unknown
  Obtained from environmental sample
  misc_feature (1)..(369): n is a, c, g, or t
atgctcggcttcgtcatcgccgcttttatcgccggcataggcggctgcctctacgcgatggttaacggctttgtcaaaccggatgttgctcagttcctcagatccatcgactaccttatttatgtcgtgcttggcggcatgggttccatgacaggctcgattctttcggcctatgtccttacctatttgcaggaatttttacgtttcctgcaggactaccgccttttgatataccctgtgatactgatactcgtcatgctgttccgcccccagggccttttgggaatgaaagaattttccatagtgggctttgttgataaaattcgcggcagatttttcaccaaaggagcaaagggaggacaggcatga

SEQ ID NO: 51324 - protein, 122 aa, Unknown
  Obtained from environmental sample
  SIGNAL (1)...(21)
  misc_feature (1)..(122): Xaa is any amino acid
MLGFVIAAFIAGIGGCLYAMVNGFVKPDVAQFLRSIDYLIYVVLGGMGSMTGSILSAYVLTYLQEFLRFLQDYRLLIYPVILILVMLFRPQGLLGMKEFSIVGFVDKIRGRFFTKGAKGGQA

SEQ ID NO: 51325 - DNA, 807 bp, Unknown
  Obtained from environmental sample
  misc_feature (1)..(807): n is a, c, g, or t
atgagcatgaacagggatcaattacgcttaagggtacaaaacctctccattgattttggggggcttaaagccgtcagcgaattttcctgcgagatgtaccacggtgaactggtcgggcttatcggcccgaacggggcgggcaagacgacggttttcaatatgctttccggcatatacgcccccacaggaggggagattgaattccgtgaccgcaaaggcggtatttgtcttgtgaaaaaccttaaccccgcaaagatgaaccggattggccttgccaggacttttcagaatatacgcctgttttccaatctttccgtcgaggacaatatccgcatagcgttacattccggcaggacaagcggccccattgacgcgctgttccgcctgaagcgtttccgtattgacgaggagcggatgagagcgcaggcgctggaacttctttcacttttcaagattgaaaaaaagaaggatgaactggcgcgcaatcttccatacggcgagcagcgcaagctggagatcgcgcgcgccctggcttcaaatccctgccttctgctgctggatgaacccgccgcggggatgaacccacaggaaaccgaagatttaatgaagataatcagatttatcaggaatgaatttcacctgacgattcttttaatagaacacgatatgcggctggtaatggggatatgcgagcggttaatagtgctggattacgggcggacaatcgccgccggctcaccggaagaaattaggcgtaatccggcggtgataaaggcttatctggggacggaggccgccaatggctga

SEQ ID NO: 51326 - protein, 268 aa, Unknown
  Obtained from environmental sample
  DOMAIN (35)...(239): ABC transporter
  misc_feature (1)..(268): Xaa is any amino acid
MSMNRDQLRLRVQNLSIDFGGLKAVSEFSCEMYHGELVGLIGPNGAGKTTVFNMLSGIYAPTGGEIEFRDRKGGICLVKNLNPAKMNRIGLARTFQNIRLFSNLSVEDNIRIALHSGRTSGPIDALFRLKRFRIDEERMRAQALELLSLFKIEKKKDELARNLPYGEQRKLEIARALASNPCLLLLDEPAAGMNPQETEDLMKIIRFIRNEFHLTILLIEHDMRLVMGICERLIVLDYGRTIAAGSPEEIRRNPAVIKAYLGTEAANG

SEQ ID NO: 51327 - DNA, 732 bp, Unknown
  Obtained from environmental sample
  misc_feature (1)..(732): n is a, c, g, or t
atggctgagaccctgttgaaagttgaaaacctcgttgtcaattatggcgctatacgcgcactgagggggatctcctttgaggtatccaaaggggaaataatcaccctgataggggcaaacggcgccgggaagagtacaactcttcacgcgatttcaaatattattaaaaaaacttccggcacggtgatgtttgaccagcgggatataagttcctctccgcctgacagcattgtcgcgtccggcctggtgcaggttcccgaaggccggcgtatctttgccaatctcagcgttcgtgataatctggaaatgggcgcgtattcgcggcgttctgttacagcggctgaaaaacaggccataaaaacagatatggaaaaagtgtttgatgtttttcccaggttgaaagaacgcatacgccaggtggcggggactctttcaggcggcgaacagcagatgctggctatgggccgcgcgctgatggccaacccccgtctgctgctccttgacgaaccgtcaatgggccttgcccccatccttgtcgatgagatcttctcggttgtcaaggggattaatgaaacagggacgaccgtactgcttgttgaacagaacgcttacaaagctcttgcgcttgcgtcacgagcttatatccttgagaccggggagattgtcaaaagcggcatgaccgccgatttaatgaaggatgaggccgtaaaggcagcttatttaggaggatga

SEQ ID NO: 51328 - protein, 243 aa, Unknown
  Obtained from environmental sample
  DOMAIN (31)...(219): ABC transporter
  misc_feature (1)..(243): Xaa is any amino acid
MAETLLKVENLVVNYGAIRALRGISFEVSKGEIITLIGANGAGKSTTLHAISNIIKKTSGTVMFDQRDISSSPPDSIVASGLVQVPEGRRIFANLSVRDNLEMGAYSRRSVTAAEKQAIKTDMEKVFDVFPRLKERIRQVAGTLSGGEQQMLAMGRALMANPRLLLLDEPSMGLAPILVDEIFSVVKGINETGTTVLLVEQNAYKALALASRAYILETGEIVKSGMTADLMKDEAVKAAYLGG

SEQ ID NO: 51329 - DNA, 417 bp, Unknown
  Obtained from environmental sample
  misc_feature (1)..(417): n is a, c, g, or t
ttgacaaccgagaagatctcatcgacaaggatgggggcaaggcccattgacggttcgtcaaggagcagcagacgggggttggccatcagcgcgcggcccatagccagcatctgctgttcgccgcctgaaagagtccccgccacctggcgtatgcgttctttcaacctgggaaaaacatcaaacactttttccatatctgtttttatggcctgtttttcagccgctgtaacagaacgccgcgaatacgcgcccatttccagattatcacgaacgctgagattggcaaagatacgccggccttcgggaacctgcaccaggccggacgcgacaatgctgtcaggcggagaggaacttatatcccgctggtcaaacatcaccgtgccggaagtttttttaataatatttgaaatcgcgtga

SEQ ID NO: 51330 - protein, 138 aa, Unknown
  Obtained from environmental sample
  DOMAIN (18)...(56): Protein of unknown function (DUF1602)
  misc_feature (1)..(138): Xaa is any amino acid
MTTEKISSTRMGARPIDGSSRSSRRGLAISARPIASICCSPPERVPATWRMRSFNLGKTSNTFSISVFMACFSAAVTERREYAPISRLSRTLRLAKIRRPSGTCTRPDATMLSGGEELISRWSNITVPEVFLIIFEIA

SEQ ID NO: 51331 - DNA, 645 bp, Unknown
  Obtained from environmental sample
  misc_feature (1)..(645): n is a, c, g, or t
atgaaagtatccaaaattatgactcggaatccggtttttacccatcccgatctttcgctcagcgacgcgcgttcgttaatggacagggaaaaagtcggccacataccggtactcaataaaaataatggacttgtgggccttatcacaaaagtcgatctattgaaggccggcccgtcgcccgcgaccagccttgacgtgtacgagatcagctatctgctttcaaaaatcacggtggaaaaggtgatggtaaaaaatgtgatcaccgttcaggaaaacgaagttgtggaagaggcggcaagaatcatggcggacaacgggattggctgcctgcccgtgttaaacaattcccttttaaccggcattattactgacactgacattttccatttttttattaacgcttacggagcgcgccacaagggtattcgcataacgattaatttcaaagataaactcggccagtttgccgcgtttgccggcgccttagccgcaaggggggggcatatcgtcgcctttgtcacctccgagggcgatgatgtcgcccaccgtcgcgcaaacattaaaattaccgacatcagccgcatcgttgtagaggaaattgccgctacattggacggcgcggaaaatgaggacattcgggaataa

SEQ ID NO: 51332 - protein, 214 aa, Unknown
  Obtained from environmental sample
  DOMAIN (5)...(132): CBS domain pair
  misc_feature (1)..(214): Xaa is any amino acid
MKVSKIMTRNPVFTHPDLSLSDARSLMDREKVGHIPVLNKNNGLVGLITKVDLLKAGPSPATSLDVYEISYLLSKITVEKVMVKNVITVQENEVVEEAARIMADNGIGCLPVLNNSLLTGIITDTDIFHFFINAYGARHKGIRITINFKDKLGQFAAFAGALAARGGHIVAFVTSEGDDVAHRRANIKITDISRIVVEEIAATLDGAENEDIRE

SEQ ID NO: 51333 - DNA, 330 bp, Unknown
  Obtained from environmental sample
  misc_feature (1)..(330): n is a, c, g, or t
atggctaatatcagggaaattctagcgaaaaatatgcgggataaccgtcaaaagctcggtatatcccaggcagaattggcagaacgtgcaaatatatcgacaaattttgtcgccatgatagagcttatgcataaatttccagcccctgagacgttagatcgcatagcttcggctctttgtctggaaactcctgagctttttaccgtccctacttccccggaagacgctttaaagaagctttacaaggaaattttgaatgatttagaccgggccataggggaggctgttgataaagccatagacaaacgaaatagagcaataaaaccgtaa

SEQ ID NO: 51334 - protein, 109 aa, Unknown
  Obtained from environmental sample
  DOMAIN (12)...(66): Helix-turn-helix
  misc_feature (1)..(109): Xaa is any amino acid
MANIREILAKNMRDNRQKLGISQAELAERANISTNFVAMIELMHKFPAPETLDRIASALCLETPELFTVPTSPEDALKKLYKEILNDLDRAIGEAVDKAIDKRNRAIKP

SEQ ID NO: 51335 - DNA, 750 bp, Unknown
  Obtained from environmental sample
  misc_feature (1)..(750): n is a, c, g, or t
ttgattggaatcaactttatcagcacagttcagatagtagtagatgatttggtaaaagaagtgtacaacggcgcgggattgtccgcgatatacagcgataacggtacgattatagcacattgggacaaggcgagggtcaagggtaatattaaaactaacgccaaggaaaaaaatctttttggaaacgacattgaccgtttagccagcgcgattttgcatggcggcgagaacggcagaaatgccgttacgctggaaaagtactcccctgacctgaaaacaaaggtatactttatttttgaacctatcctcgtttcaggctttgaatcaaccccctggtctctgcaattaggcatccccatagcggaaataatgaagccgattcatgccttggtatcttattccataatatttgccgttatccttctggtattggcggcggttattactttgctcgtcgccaggagcattgttaaaccgattatcggcgtaaccgctaccttaaaggatatatctgaaggcgaaggcgacttgacgcgaagcatcgccgtcagttccaaagacgaggtaggcgaccttgccaaatacttcaataaaacgcttgaaaaaatcaaaggcctggttcttctcattaaaaagcagtccagcgtgttatcagaaatcggcgttgatctgtccagcaacatgaccgaaacggcggcagcggtgaacgaaattacctccaatattcagagcattaaggccgcgtcataa

SEQ ID NO: 51336 - protein, 249 aa, Unknown
  Obtained from environmental sample
  DOMAIN (134)...(205): HAMP domain
  misc_feature (1)..(249): Xaa is any amino acid
MIGINFISTVQIVVDDLVKEVYNGAGLSAIYSDNGTIIAHWDKARVKGNIKTNAKEKNLFGNDIDRLASAILHGGENGRNAVTLEKYSPDLKTKVYFIFEPILVSGFESTPWSLQLGIPIAEIMKPIHALVSYSIIFAVILLVLAAVITLLVARSIVKPIIGVTATLKDISEGEGDLTRSIAVSSKDEVGDLAKYFNKTLEKIKGLVLLIKKQSSVLSEIGVDLSSNMTETAAAVNEITSNIQSIKAAS

SEQ ID NO: 51337 - DNA, 843 bp, Unknown
  Obtained from environmental sample
  misc_feature (1)..(843): n is a, c, g, or t
atggaaaaagttataacgaatatcaacaaactcaacgaaaatgtagaaagccagagccttaatgtttctcaagcgtcatccgccatcgaggaaatggtagcgaatatcaactctgttaccaccacgctgatcaataacgccgaaaatgttaaaaatcttcaagaagcgtcggaagtgggacgcggcggattgcaggaagtagcgacggatattcaggaaatagccagagagtccgagggcttgctggaaattaacgcggtaatggaaaatatagcgagccagaccaatttactttcgatgaatgcggcgattgaggcggctcacgccggggaagccggcaagggttttgccgtagtcgccgatgaaatccgaaaacttgcggaaagcgccagcgaacaatccaagaccattggcaatgttttgaagaaaataaaggaatcaatagacaagataaccaaatcaacaggaaacgttcttaacagattcgaagttattgacaccgccgtaaagacagtgtctctgcaagaagaaaatatccgcaacgcgatggaagaacagggagaagggagcaagcaagtgcttcaaagcgccggcagtttgaacgaacttacacagcaagtaaagagcggcagtgaagaaatgcttgtgggcggcaaggaaataatgaatgaaagccaaaacctcgaaaaagcaacgcaggaaataaccaacggcatgaacaagatgacatcggaagcggataaaatcaatttagcggtagaccatgttaatgaaatgtgcgaaaaaaaccgcgaaggcattaacacattaatagaggaagtttcgcggtttaaggtaagttaa

SEQ ID NO: 51338 - protein, 280 aa, Unknown
  Obtained from environmental sample
  DOMAIN (16)...(238): Methyl-accepting chemotaxis protein (MCP) signaling domain
  misc_feature (1)..(280): Xaa is any amino acid
MEKVITNINKLNENVESQSLNVSQASSAIEEMVANINSVTTTLINNAENVKNLQEASEVGRGGLQEVATDIQEIARESEGLLEINAVMENIASQTNLLSMNAAIEAAHAGEAGKGFAVVADEIRKLAESASEQSKTIGNVLKKIKESIDKITKSTGNVLNRFEVIDTAVKTVSLQEENIRNAMEEQGEGSKQVLQSAGSLNELTQQVKSGSEEMLVGGKEIMNESQNLEKATQEITNGMNKMTSEADKINLAVDHVNEMCEKNREGINTLIEEVSRFKVS

SEQ ID NO: 51339 - DNA, 684 bp, Unknown
  Obtained from environmental sample
  misc_feature (1)..(684): n is a, c, g, or t
gtgaatgaaacaatgcgggaatgggtttccagagttgcagacactcattatgtgcttggcacagttatgggacctcatccatttccgatgattgttagggattttcaaagcgttataagccacgaagccaaggtacaaattttggaaaaagagggcaagctgccagcggcggttattgcctgtgttggcggtggctcaaatgcaatgggaattttttatcattttatagaagacaaatccgtggaactgataggttgtgaagcggcagggcttggcattgaaacaggcaaacacgcagctacaataacaaaaggtgcaatcggaattttccacggaatgaaatcttatttttgccaaaattcagaagggcaaatagctcctgtgtattcaatatctgctggcttggattacccaggcattggtccagaacacgcacatttgtacgatattggtagggcaaaatatgttcctgttacagacgaagaagcggttttggcttttgagtatttggctcgcacagaaggaattatcgctgccatagagagttcacacgctgttgcttatgcgagaaaaatagtaccgagtttgccaaaaacggaaagcgttattatttgcctttctggtcgcggcgataaagatgttgcgtcaatagcaaagtacagaggagttaatttgcatgagtaa

SEQ ID NO: 51340 - protein, 227 aa, Unknown
  Obtained from environmental sample
  DOMAIN (1)...(209): Pyridoxal-phosphate dependent enzyme
  misc_feature (1)..(227): Xaa is any amino acid
MNETMREWVSRVADTHYVLGTVMGPHPFPMIVRDFQSVISHEAKVQILEKEGKLPAAVIACVGGGSNAMGIFYHFIEDKSVELIGCEAAGLGIETGKHAATITKGAIGIFHGMKSYFCQNSEGQIAPVYSISAGLDYPGIGPEHAHLYDIGRAKYVPVTDEEAVLAFEYLARTEGIIAAIESSHAVAYARKIVPSLPKTESVIICLSGRGDKDVASIAKYRGVNLHE

SEQ ID NO: 51341 - DNA, 771 bp, Unknown
  Obtained from environmental sample
  misc_feature (1)..(771): n is a, c, g, or t
atgagtaaaattcaacacgcttttaaaaaaggcaaagcttttattgcttttttaaccgcaggcgaccctgatttgcaaacaacagaggaacttgtttttgaaatggtgaaatccggtgcagatataatagaactaggcattcccttttccgacccaattgcagaagggccggtgattcaagaggcggatgtgcgagcacttgcgagcggaacaactccagagaaaatttttgcaatggcagaacgcataagagaaaagtctcaagttccacttgtttttttaacgtatattaatcctgttctcaaatatggctacgatgctttttttgcaaaatgcaatgaagttggcatagacggaattattatcccagatttgccttatgaagaaagagaagaagtccacgaattttcctcaaaatatgacatagacttggtgcctttggttgcacccacttcagaagaccgaattaaaaaaatagccgattccgcagagggttatttatatgtggtgtcttcgctcggagtgacgggcattcgcagcgaaataaaaacagatttggattctattataaatgttgcaaaagagacggcaaaagttcccttagcggttggttttggaataaatactcccgaacaggcggcaaaaatttccaaaatagcagacggagttattgttggcagcgcaatagtgaaaatcatagcgcaacatggaaaagattccgcaaaaccagttagcgaatatgttaaaaaaatgaaagaagcgatgacttag

SEQ ID NO: 51342 - protein, 256 aa, Unknown
  Obtained from environmental sample
  DOMAIN (54)...(253): BtpA family
  misc_feature (1)..(256): Xaa is any amino acid
MSKIQHAFKKGKAFIAFLTAGDPDLQTTEELVFEMVKSGADIIELGIPFSDPIAEGPVIQEADVRALASGTTPEKIFAMAERIREKSQVPLVFLTYINPVLKYGYDAFFAKCNEVGIDGIIIPDLPYEEREEVHEFSSKYDIDLVPLVAPTSEDRIKKIADSAEGYLYVVSSLGVTGIRSEIKTDLDSIINVAKETAKVPLAVGFGINTPEQAAKISKIADGVIVGSAIVKIIAQHGKDSAKPVSEYVKKMKEAMT

SEQ ID NO: 51343 - DNA, 420 bp, Unknown
  Obtained from environmental sample
  misc_feature (1)..(420): n is a, c, g, or t
atggacgttcttataaccaacgatgatggcatagaagcttctaacttgatagctcttgcgaaagcggcttgtgaatgtgcaaatgtgaaagttgttgcaccgcaaaacgaacaaagcggcgttggtcatggattttcatattaccgctcgctgcactacgcacctgcaaaagattttccttgcgaagcattctgggtggacggcactcccgccgactgcatgaaattcgctctaacacatatatataaagacatcaattttgatttggtgatatctggcgtgaacaacggagataacgcaggagttgcatctttttacagcggaaccgttgcagcagcgagagaagcggctctgtggggagttccagcaatagcggtttccctgcaaaagcaaagcgattatgctctctctatgcgctaa

SEQ ID NO: 51344 - protein, 139 aa, Unknown
  Obtained from environmental sample
  DOMAIN (1)...(138): Survival protein SurE
  misc_feature (1)..(139): Xaa is any amino acid
MDVLITNDDGIEASNLIALAKAACECANVKVVAPQNEQSGVGHGFSYYRSLHYAPAKDFPCEAFWVDGTPADCMKFALTHIYKDINFDLVISGVNNGDNAGVASFYSGTVAAAREAALWGVPAIAVSLQKQSDYALSMR

SEQ ID NO: 51345 - DNA, 1095 bp, Unknown
  Obtained from environmental sample
  misc_feature (1)..(1095): n is a, c, g, or t
gtgctctccctatatattcatatccctttttgcacgtctatttgcggttattgcgatttttgcgctatgcctgtgccggaacgtgtgcatagcgaatatgtggatttgctcttgcaggaattaaaattcagagcagaaagcggattgaaaaattttgaaacggtgtatttgggcggaggctcgccatctgttttgagcccagagaacttacgaaagttgctggctggtttgcaacagcagggtttgcaagcggatgaattaaaagagttttcgatggagtggaaccctgagcaggttagcgaagagcgtatagacgtagctttggaatttggaataaatcgttttagcctcggggttcaaagcctggatgacggtttgctgaaaatgctcggcaggcagcactgtgcaaaagaagcacttgatgcttttgaaaaactgaatgaaaaatttaaaacaggcaatgcggatttaatgttttgcttgccaaatcaaagcacggagaattttttgagtgatgtacaaacgctggtagaccaaagagcaaagcacataagtttttacgggctgcttttaaaaaaaaagaacaaacttcccccccaacccgaagacctataccccgaaatgtatttaaaggcaacggaaattttgagcaaagctggattgcataggtacgaggtttccaattttgcaatgccaagccacgagagcatacacaactcggtttattggaaaagaggtgagtatctgggggtgggtccgtctgcgcacagctacctggacggagttcgcagctatgcaagcgggaaatatgtcccttggaaaaaatgggttttgggcggttgcccgcagagcggcttaactttagatattccaagtgcggaaggcagggaaatagaagccgtatggctatctttgagaacaagggagggtttgtcgcttaaaaattatgaactggaatttgggaagaaatttgacctgaaaaaagcggaacctttcataaaaaaagggtggctggcggtaaatggagattttttagccctgaacggcgaaggttggctatggcttgatagaatccaaaaatttctacattcatag

SEQ ID NO: 51346 - protein, 364 aa, Unknown
  Obtained from environmental sample
  DOMAIN (241)...(353): HemN C-terminal region
  misc_feature (1)..(364): Xaa is any amino acid
MLSLYIHIPFCTSICGYCDFCAMPVPERVHSEYVDLLLQELKFRAESGLKNFETVYLGGGSPSVLSPENLRKLLAGLQQQGLQADELKEFSMEWNPEQVSEERIDVALEFGINRFSLGVQSLDDGLLKMLGRQHCAKEALDAFEKLNEKFKTGNADLMFCLPNQSTENFLSDVQTLVDQRAKHISFYGLLLKKKNKLPPQPEDLYPEMYLKATEILSKAGLHRYEVSNFAMPSHESIHNSVYWKRGEYLGVGPSAHSYLDGVRSYASGKYVPWKKWVLGGCPQSGLTLDIPSAEGREIEAVWLSLRTREGLSLKNYELEFGKKFDLKKAEPFIKKGWLAVNGDFLALNGEGWLWLDRIQKFLHS

SEQ ID NO: 51347 - DNA, 957 bp, Unknown
  Obtained from environmental sample
  misc_feature (1)..(957): n is a, c, g, or t
gtggattatcccgtctatatggatattgaacgcaccgagcagcccaaagataaagacggacagcctttggagaaagccagtccggaaaagaaaatcattgaagaaaaacttaattcccagaaagcgctctggaccaaaaataaaaatgaaatcacgcccgaggagtatgcggatttttataagcacatcgggcatagttacgataaaccgctggagattattcattattccgcagaaggcgtaagcgagttcaaggccttactgtatataccggagcacgcgccatttgacctttttaccaaagaacatacgctgggcctcaatctgtacatcaagcgggttttcattatgcacgattgccagaaattgataccggaatatctgcggtttctaaaaggcgtggtggattcgagcgatttgccgctgaacgtttcgcgcgaaattttgcaggaagacgcgcagctagagaagattaagaaaaatatcacaaaaaaagttttgagcaccttgaaaaccttgaaagaaaaagatttcgagaaatatttaaaattttatcaggagtttggggcggtgcttaaagaagggctgcattacgattacgagaataaagaagccctagcggatttattgttgtttaccaccgacaaatcggagcaataccgcagtttagctgactatgtcaaagatatgccgcgcggccagaaagctatttattatctaatcagtgaatcgcgcggccaggctctggcttcaccgcatctgggcgcgttccaagcccaaaattatgaagtgctcttcctgcaggatattatcgatgaatttgtcctgccgcagctttacgaatacaaaggacattcgctgcagccgatagacaaagcggacattccgcttggcgataaaactgccgcggaagcccaaattaaagccgcaacggaaaatatagcgggttatgaataa

SEQ ID NO: 51348 - protein, 318 aa, Unknown
  Obtained from environmental sample
  DOMAIN (1)...(318): Hsp90 protein
  misc_feature (1)..(318): Xaa is any amino acid
MDYPVYMDIERTEQPKDKDGQPLEKASPEKKIIEEKLNSQKALWTKNKNEITPEEYADFYKHIGHSYDKPLEIIHYSAEGVSEFKALLYIPEHAPFDLFTKEHTLGLNLYIKRVFIMHDCQKLIPEYLRFLKGVVDSSDLPLNVSREILQEDAQLEKIKKNITKKVLSTLKTLKEKDFEKYLKFYQEFGAVLKEGLHYDYENKEALADLLLFTTDKSEQYRSLADYVKDMPRGQKAIYYLISESRGQALASPHLGAFQAQNYEVLFLQDIIDEFVLPQLYEYKGHSLQPIDKADIPLGDKTAAEAQIKAATENIAGYE

SEQ ID NO: 51349 - DNA, 498 bp, Unknown
  Obtained from environmental sample
  misc_feature (1)..(498): n is a, c, g, or t
ttgacagattcggccgagtcccttacgcgggcggcgcctacgccgacaaacatttccacaaagtccgctccgctcatgcggaagaaagaaactcccgcttcccccgctaccgcccgggcaagtaaagtttttccggttcccggcggtccgacaaggagcacgcctttaggaatctttccgcctatatctttgtacttctgcgggttcttcaaaaaatcgacaacttcaaaaagttcctcttttgcctcgtcaacgcccgcgacatcgctgaagcgcgtaacgatgtccccttccgcgacaatcacggcgcggttctgcccgacggaaagaacattgccgcctatattgccgatacgctttaaaacaaagcgccaaagaaaaataaaaatagcaataggtaaaacccaactgataatggaactgagtaacgcgcctccctcgcgcggaacagcgccgtacgcgacatttttttcatccattaatttaataaaatcttga

SEQ ID NO: 51350 - protein, 165 aa, Unknown
  Obtained from environmental sample
  misc_feature (1)..(165): Xaa is any amino acid
MTDSAESLTRAAPTPTNISTKSAPLMRKKETPASPATARASKVFPVPGGPTRSTPLGIFPPISLYFCGFFKKSTTSKSSSFASSTPATSLKRVTMSPSATITARFCPTERTLPPILPIRFKTKRQRKIKIAIGKTQLIMELSNAPPSRGTAPYATFFSSINLIKS

SEQ ID NO: 51351 - DNA, 1191 bp, Unknown
  Obtained from environmental sample
  misc_feature (1)..(1191): n is a, c, g, or t
ttgaaagggagggtctttatgatatacagaagcgaatatatttcagatgacgaatgggggcggtttttggagttttccgagaaccttgagacgccttgcatagttgtcaatcttaagggcataaaaaataattatattaaaatgcgcgattcttttcctttcgcgcaaatttattacgcggttaaagcgaatcccgacgtgaaaataatttccctgcttgacgaattaggctctaatttcgatcttgcttcgcgttatgagcttgatttagtattgtccatggggatttcacccgaccggatgtctttcgggaatacaataaaaaaagcaaaagacgtggcgtacttttttgaaaagggcgtacggatgtttgcgaccgacagtgaaagcgatcttagaaacattgcctcacacgctcccggttccaatgtctatgtgcgtattgtcatgggcgattccagtaccgccgactggccgctttcgcgcaaattcggctgtcatccagatatggcgtacagccttttaattatggcgcgttcgcttggtttaaccccttacggcatatcttttcatgtaggaagccagcagagggatatcggtcagtgggacgaggcaatcgcgaaaacaaagtatcttttttcttccctggaaaaagatgaaaatatacgcttggcgatgatcaatatgggcggcggttttcccgcgtcatatattcagccgaccaatgatttaaccgaatacgcttcagaaatatacaaatatctgaccgatgattttggctctgatatacctttcattgcgcttgaacccggacgctctttggtaggtgacaacggtattttaatatcggaagtcgttttaatttctagaaaaacccatacggcgcttaaccgctgggtgtatcttgataccggaaaatttaacgggcttatagaaacattaaatgaagcaataaaatatcctattgttatggaaaattatgacaatgaggcggaggaagaagaagtaattctcgccggacctacctgcgacagtctggatattctgtacgaagaccacaaataccggcttccggtaaacctcaaaacaggcgacaaactctattttctttccaccggggcgtattcgtcaagttacgcttctgtctgttttaacggcttcccgccgattaaaacgtatattatggattag

SEQ ID NO: 51352 - protein, 396 aa, Unknown
  Obtained from environmental sample
  DOMAIN (280)...(395): Pyridoxal-dependent decarboxylase, C-terminal sheet domain
  misc_feature (1)..(396): Xaa is any amino acid
MKGRVFMIYRSEYISDDEWGRFLEFSENLETPCIVVNLKGIKNNYIKMRDSFPFAQIYYAVKANPDVKIISLLDELGSNFDLASRYELDLVLSMGISPDRMSFGNTIKKAKDVAYFFEKGVRMFATDSESDLRNIASHAPGSNVYVRIVMGDSSTADWPLSRKFGCHPDMAYSLLIMARSLGLTPYGISFHVGSQQRDIGQWDEAIAKTKYLFSSLEKDENIRLAMINMGGGFPASYIQPTNDLTEYASEIYKYLTDDFGSDIPFIALEPGRSLVGDNGILISEVVLISRKTHTALNRWVYLDTGKFNGLIETLNEAIKYPIVMENYDNEAEEEEVILAGPTCDSLDILYEDHKYRLPVNLKTGDKLYFLSTGAYSSSYASVCFNGFPPIKTYIMD

SEQ ID NO: 51353 - DNA, 801 bp, Unknown
  Obtained from environmental sample
  misc_feature (1)..(801): n is a, c, g, or t
atgttccggaaaaggggttccngttttaattccaataaaactctcttcgacccgtacgccaaggccctgacggatctctccaattgggacctgaaagcctgcgtaggttatgatccctacacggcatccaaggatctttcttattcttacattgatgacatattcacccagccaaggtgtatagcgattgatgataattttgactggcagggcgatctacccctcaactatccattgcgtttcagtgtactttacgaaacccatgtaaagggactcacaaatcatccaagttcgggcgtttccgcgcccggaacctacaaaggtgtgatcgaaaaaattccttacttaaaagaccttggcattaccagcctggaattccttcctattcaggaattcaacgagaatgaactaaattcaacaaatccgcagacaggaaagaagctggtaaactactggggttattctaccgtggccttttttgccccaaagacttcctatgcccatgatcgcagtcccggaggcccggtaagggaattcaaggagatggtgagggaactccacaaagcggggatcgaagtaattctggatattgtctttaaccataccgcagaaggcaacgagtgggggcctacaatttctttccggggcctggacaataccatatattatatgctgaacggaaataaaaggtactaccaaaattattcaggttgcggaaacacggtaaactgcaaccacccnggttgttcgcacttttattatggactgcctccgttactgggtgatggaaatgcacattga

SEQ ID NO: 51354 - protein, 266 aa, Unknown
  Obtained from environmental sample
  misc_feature (1)..(266): Xaa is any amino acid
MFRKRGSXFNSNKTLFDPYAKALTDLSNWDLKACVGYDPYTASKDLSYSYIDDIFTQPRCIAIDDNFDWQGDLPLNYPLRFSVLYETHVKGLTNHPSSGVSAPGTYKGVIEKIPYLKDLGITSLEFLPIQEFNENELNSTNPQTGKKLVNYWGYSTVAFFAPKTSYAHDRSPGGPVREFKEMVRELHKAGIEVILDIVFNHTAEGNEWGPTISFRGLDNTIYYMLNGNKRYYQNYSGCGNTVNCNHPGCSHFYYGLPPLLGDGNAH

SEQ ID NO: 51355 - DNA, 813 bp, Unknown
  Obtained from environmental sample
  misc_feature (1)..(813): n is a, c, g, or t
atggactgcctccgttactgggtgatggaaatgcacattgacggtttccgcttcgaccttggttcgatccttggcagggacgagcatggcaatcttatggaaaatccgcctgttttgcagcgcattgccgaagaccccgttttgagtagcaccaaaataatcgcggaagcctgggacgcgggcggggcataccaggtgggctggttccccgggggccgctgggcggaatggaacgatcgcttccgtgacgatatgcgtcggtactggcgcggagattcaaaactgacaaggcaccttgcaacgaggctttcaggaagctccgacttatatttgcgagatggcagaaagcctttccattcggtgaattttattacaagccacgacggttttacgctaaaggatcttgtctcgtatgaaagaaaacacaacgaagaaaacggcgaaaacaaccgcgacggtggggacaacaacaacagtgccaataacggcgttgaaggtcgtactgagaatgaaaaaattgaaacccgccgttttaagctgatgaaaaattttttcgcaagtatgatggtttccctaggaacaccaatgatattgggaggagacgagattggccgcacccaagggggaaacaataacgcctactgccaggacaatgaaatatcctggtatgactggtctttttacgaaaagaattacgctctttaccgctttgtaaaggaaataatcgctttccgcctccgccatcatggttttatgcgccccgagttttttacgggcagggacggaaaggtacaacgccattcccggacataa

SEQ ID NO: 51356 - protein, 270 aa, Unknown
  Obtained from environmental sample
  misc_feature (1)..(270): Xaa is any amino acid
MDCLRYWVMEMHIDGFRFDLGSILGRDEHGNLMENPPVLQRIAEDPVLSSTKIIAEAWDAGGAYQVGWFPGGRWAEWNDRFRDDMRRYWRGDSKLTRHLATRLSGSSDLYLRDGRKPFHSVNFITSHDGFTLKDLVSYERKHNEENGENNRDGGDNNNSANNGVEGRTENEKIETRRFKLMKNFFASMMVSLGTPMILGGDEIGRTQGGNNNAYCQDNEISWYDWSFYEKNYALYRFVKEIIAFRLRHHGFMRPEFFTGRDGKVQRHSRT

SEQ ID NO: 51357 - DNA, 1197 bp, Unknown
  Obtained from environmental sample
  misc_feature (1)..(1197): n is a, c, g, or t
atgattatctgcggtcttgcggcttcacgatacgagagggcgccggatgcggaagctcttatcaaaattgcgcgggtcagaaatgatgactatgtctatttgagccaattttcagataaaaatatgctgagtatcgatcattttattcatcccagtctggaagcggcccgctcgataatgcaggccataaaacacggcgcgttgggtaatattgtttcgtttcccggcactcaatatgtgcttgggtcggttgatgtcgcgacaggcagcgttcttgacggactggcgcttaaggattaccagagtctgaacgccggagaaagtttgatcactcttgttgaacggaatggcggagcgctgctcccttcgggcgctaccgtgcttgccgggggagaccgggtatacattctggcggataaaaacgatctgccccgcatttttggacttgcgggaagcgccgagaaacctatccgcagggtgggaattgtgggcggcggcaaggtaggttctcttttgaccgatggtttgctcaacagttcttcggaaattgattctgataaacatttatttttcatgttgaaaacattgatttcacgaagtaaccgccaggttattattattgaacaggattaccgggtctgtaaagatctggcggcccgttttcccgatgcgttgattttgaataatgatatttctgacgaaagttttattaccgaagagcagcttgatacccttgatcttctggtaactactacctccaatcaggagcttaacattattaccgcgatataccttaaatcacggggcgttaggcgaacgatcgcaatggttaccggttccggtcatgcggctatggcccggcatctgggagtggatgtggtgatgccgattcaatcggtcgttgtcgattcgattctttcccgcctgatgggaagcggcattaaagaagtgcacaatctgggagacggcagcgtagaaataattgaagttgagatcggggaaaatgctcctattgtggacaaaccgatcaagcagtttgcgctttcgggaggcggtcttttaatgctggtaacgcgaagcggcaattcttttattccgcggggcgattatgttttctgccggggagattacattcttcttctttgtaagaccggcagccggacggagataaaaaaatattttggcgctgaccggtag

SEQ ID NO: 51358 - protein, 398 aa, Unknown
  Obtained from environmental sample
  DOMAIN (160)...(297): TrkA-N domain
  misc_feature (1)..(398): Xaa is any amino acid
MIICGLAASRYERAPDAEALIKIARVRNDDYVYLSQFSDKNMLSIDHFIHPSLEAARSIMQAIKHGALGNIVSFPGTQYVLGSVDVATGSVLDGLALKDYQSLNAGESLITLVERNGGALLPSGATVLAGGDRVYILADKNDLPRIFGLAGSAEKPIRRVGIVGGGKVGSLLTDGLLNSSSEIDSDKHLFFMLKTLISRSNRQVIIIEQDYRVCKDLAARFPDALILNNDISDESFITEEQLDTLDLLVTTTSNQELNIITAIYLKSRGVRRTIAMVTGSGHAAMARHLGVDVVMPIQSVVVDSILSRLMGSGIKEVHNLGDGSVEIIEVEIGENAPIVDKPIKQFALSGGGLLMLVTRSGNSFIPRGDYVFCRGDYILLLCKTGSRTEIKKYFGADR

SEQ ID NO: 51359 - DNA, 462 bp, Unknown
  Obtained from environmental sample
  misc_feature (1)..(462): n is a, c, g, or t
atgaaatttatgaagtataaaatattaggcttttttattattattttcctctttgttgtaacttccgcttttagcggtccctttggtattgaatttggaatgacgcttgaacaggtaaaacagataagcaagacagaaccaaaaaatgtagaagatgattactatattattactcctccaaatactaacgatcaatttggagtatatgttgtatttattaatcctaaatatggagtttatataattaaagcgctaagtaaaactataaattcaaacgcacaaggaacagctttaagagctcgttttaatgaccttgtatcaacatttgaaaaaacttatggaaaatataaaaaagaagattttgtgatacaaggaggaagtgatagttatgcttttatgtatagtttatcaatagatgaaagggtactaatggctagttgggggggaaaaaggaagttctaa

SEQ ID NO: 51360 - protein, 153 aa, Unknown
  Obtained from environmental sample
  SIGNAL (1)...(25)
  misc_feature (1)..(153): Xaa is any amino acid
MKFMKYKILGFFIIIFLFVVTSAFSGPFGIEFGMTLEQVKQISKTEPKNVEDDYYIITPPNTNDQFGVYVVFINPKYGVYIIKALSKTINSNAQGTALRARFNDLVSTFEKTYGKYKKEDFVIQGGSDSYAFMYSLSIDERVLMASWGGKRKF

SEQ ID NO: 51361 - DNA, 744 bp, Unknown
  Obtained from environmental sample
  misc_feature (1)..(744): n is a, c, g, or t
ttgtcaaaacacgccacgatctttttttcggacatacgcggttttacggaaaaatcggaaaactttgtaaaggcttttggcagtgaagcttccgaccgtatcgttttttggcttaacgaatatttatcgagcatggttttttgcgttgaaaagaccaacggcattattgataaattcatcggcgacgctgtaatggcgcattgggggacggcaagcactgccggaagtccgcagaaagacgcttttaactgcgtaaaatccgcgctgatgatgaggaatatgcttaaaaaaatgaacaaaaaccggaaagaggaaaatatgggcgatccgcctattcatatcggatgcggaataaatacgggcattgttaccgccggacaaatcggctccgatctccgcatggaatacaccgtcataggcgatcccgtgaatcttgcgtccagagttgaatcgcttaacaagccgcttggcactgatattcttatcagcgaaaacacatggaatttggtaagaaaatattttatcaccgaagaaatgccgccggtaaccgtaaaaggaaaagaaaaaccggtacggctctttgccgtgataaattttaattttgacgtattaaaacagactcccgtcggttcagaacccatgaaccttgccgaactgcggaaatatttggggattaagccgccggatatttcanagacgaatgtcaacgccgaagaagtgaaatataaaataggcggcaaatga

SEQ ID NO: 51362 - protein, 247 aa, Unknown
  Obtained from environmental sample
  DOMAIN (2)...(198): Adenylate and Guanylate cyclase catalytic domain
  misc_feature (1)..(247): Xaa is any amino acid
MSKHATIFFSDIRGFTEKSENFVKAFGSEASDRIVFWLNEYLSSMVFCVEKTNGIIDKFIGDAVMAHWGTASTAGSPQKDAFNCVKSALMMRNMLKKMNKNRKEENMGDPPIHIGCGINTGIVTAGQIGSDLRMEYTVIGDPVNLASRVESLNKPLGTDILISENTWNLVRKYFITEEMPPVTVKGKEKPVRLFAVINFNFDVLKQTPVGSEPMNLAELRKYLGIKPPDISXTNVNAEEVKYKIGGK

SEQ ID NO: 51363 - DNA, 711 bp, Unknown
  Obtained from environmental sample
  misc_feature (1)..(711): n is a, c, g, or t
gtgtctcccacggccggacttccggaagcgcatattgtctacccgaggccggacatgatcgtacggagcgatattgttgaaatcgtaggaacggcggagtcccgttacgggatacagcagatagttctcagcatggacggcggcccgtatgtgccgcttgaaggactcgagtattgggattaccgcattcccgcggaagaaataggggaagggaaacataccgtccgcgtcaaagccgtggacgcgctcggcgttgaggggctgaacagcagggttgactttatcctggataatttgcccccgcaaattgagcttattaaccatgaagtaggcgacattattaccggcggcatcgtaacaataaagggtaaagtaatcgaggcaaacgggttacagtcactgtccctcagcaaagacgggggagaaacttatgtcccgctgttccacacaggcggcaggaagggggatcccgccagatatttttcgttttcaatcccaagcaagaaattaaatgacggcgccatgatcttctatataagggcgatcaataccacaggggtttcgataatcaggccgatactgttctttgttaataacgtagcgcccgtgattgatataatgtcgccgtcggaagaagaagatgtctatggggtttacccaggttaccgggcgcgtcataagcccggtgggtttgacgcaattctactttga

SEQ ID NO: 51364 - protein, 236 aa, Unknown
  Obtained from environmental sample
  misc_feature (1)..(236): Xaa is any amino acid
MSPTAGLPEAHIVYPRPDMIVRSDIVEIVGTAESRYGIQQIVLSMDGGPYVPLEGLEYWDYRIPAEEIGEGKHTVRVKAVDALGVEGLNSRVDFILDNLPPQIELINHEVGDIITGGIVTIKGKVIEANGLQSLSLSKDGGETYVPLFHTGGRKGDPARYFSFSIPSKKLNDGAMIFYIRAINTTGVSIIRPILFFVNNVAPVIDIMSPSEEEDVYGVYPGYRARHKPGGFDAILL

SEQ ID NO: 51365 - DNA, 1032 bp, Unknown
  Obtained from environmental sample
  misc_feature (1)..(1032): n is a, c, g, or t
atgagccgcgttttcgcgcccttttgccgcaagcagtacccccgaagtatccttgtccagcctgtgaaccagcaggggcgcgggcgtacggagttcggcaagaatcgcgtccagcgaggtttttaccccttttccgccctggacggcaagcccggcgggtttattaataaccataatattgtcatcttcgtacaaaatttctatgtttttcattccgataatattaacatgaaacgtttctttattttactgtttttcattcctgtcttatgttttgcggagcccatgtattctcccacatggggtttttacatcgatcttcccgaaggttatgaatatgtggacggggacgcaaaagaccgtttttcgttcaagggaccgggcggagctatgtttgacgccgccgtttattacggacgttacgcaaatctgcgtgaattgatgaacgatgtaaacaagagtatcgggaataagggcgatgtcgattattaccgctacaataacaggcaggccgcaataatggaattgaatttcggcgattatcacggctgggctattgccgtagaacttgataaatataaagaacagcagccgatgctccttgctctcgcgtacggtctgtccgccataaaagaactggaattgtttcatatatcggcattggattcaatctgtccttcaaaagaagagcgccgctatcccggccttgtaattgattacagttatccgaggggcggacaaaaaaaggctgttattcagcctggcaatattaatgttatgatacgcgagaatgacgccgaggcagcgcaggtttttatcgagcgtgaattccagcttcttcagaattatgttaattcgcagaaatggcaggacgcatggattcgctattacagatccatttaccgcgattcctatgacagggttgcaaatgccgcttccatgattgtccgcagttggggcggtcccacttccgggggagacgcggaaaaaagggcgttgcacagagagctttaccctggcaggctgcgataa

SEQ ID NO: 51366 - protein, 343 aa, Unknown
  Obtained from environmental sample
  misc_feature (1)..(343): Xaa is any amino acid
MSRVFAPFCRKQYPRSILVQPVNQQGRGRTEFGKNRVQRGFYPFSALDGKPGGFINNHNIVIFVQNFYVFHSDNINMKRFFILLFFIPVLCFAEPMYSPTWGFYIDLPEGYEYVDGDAKDRFSFKGPGGAMFDAAVYYGRYANLRELMNDVNKSIGNKGDVDYYRYNNRQAAIMELNFGDYHGWAIAVELDKYKEQQPMLLALAYGLSAIKELELFHISALDSICPSKEERRYPGLVIDYSYPRGGQKKAVIQPGNINVMIRENDAEAAQVFIEREFQLLQNYVNSQKWQDAWIRYYRSIYRDSYDRVANAASMIVRSWGGPTSGGDAEKRALHRELYPGRLR

SEQ ID NO: 51367 - DNA, 657 bp, Unknown
  Obtained from environmental sample
  misc_feature (1)..(657): n is a, c, g, or t
atgaaaaacatagaaattttgtacgaagatgacaatattatggttattaataaacccgccgggcttgccgtccagggcggaaaaggggtaaaaacctcgctggacgcgattcttgccgaactccgtacgcccgcgcccctgctggttcacaggctggacaaggatacttcgggggtactgcttgcggcaaaagggcgcgaaaacgcggctcatttttcacatctgcttaacagccccaaaattaagaaacagtacgtcgcaatctgcgccggtattccaaaaaatgaaaaaggcgttatcaccgacaaactgttaatacacggcaatttaaaaagctcggaaacaagatacaaaattttaaaatcttccgtttttacggaggaagctcttgaatactccgctctggaacttgaacttggcacaggaagaatgcaccaaatccgccgccaccttgccatgaatggaaaccccatacttggcgacgacaaatacggcgattttacacttaacaaaaaattacacaaaaacgcaggtttaaaacgcctgctgcttcacgcctcgcggctaattattaaagaaagctttaatttagatattcgcgctccgttaccggaatatttttcttgtttttatgaacaaaggattcacgataattga

SEQ ID NO: 51368 - protein, 218 aa, Unknown
  Obtained from environmental sample
  DOMAIN (12)...(153): RNA pseudouridylate synthase
  misc_feature (1)..(218): Xaa is any amino acid
MKNIEILYEDDNIMVINKPAGLAVQGGKGVKTSLDAILAELRTPAPLLVHRLDKDTSGVLLAAKGRENAAHFSHLLNSPKIKKQYVAICAGIPKNEKGVITDKLLIHGNLKSSETRYKILKSSVFTEEALEYSALELELGTGRMHQIRRHLAMNGNPILGDDKYGDFTLNKKLHKNAGLKRLLLHASRLIIKESFNLDIRAPLPEYFSCFYEQRIHDN

SEQ ID NO: 51369 - DNA, 315 bp, Unknown
  Obtained from environmental sample
  misc_feature (1)..(315): n is a, c, g, or t
ttgcaaatggctaatatatgggattttcttactgcaaaagacggcatcaacaccctggtcggcgaagggggtatccagttaagcggcggacaacaacagcgtattggcattgctcgcgcactttacgatgatcccgatgtactggtacttgacgaagccacctccgcgcttgactcagaaacagaacaaagaataatggatgaaatatacagtgtaagcgtaaataaaacacttatagtaatcgcccaccggcttagtaccgttgagcgttgtggcagaagaatccgcatagaaaatggtaagatcatttcatga

SEQ ID NO: 51370 - protein, 104 aa, Unknown
  Obtained from environmental sample
  DOMAIN (1)...(100): ABC transporter
  misc_feature (1)..(104): Xaa is any amino acid
MQMANIWDFLTAKDGINTLVGEGGIQLSGGQQQRIGIARALYDDPDVLVLDEATSALDSETEQRIMDEIYSVSVNKTLIVIAHRLSTVERCGRRIRIENGKIIS

SEQ ID NO: 51371 - DNA, 825 bp, Unknown
  Obtained from environmental sample
  misc_feature (1)..(825): n is a, c, g, or t
atggtaagatcatttcatgatcttgagtcttatggaatttatgatatgaaagtagtgttattagccggcggatttggcactcgcctctccgaagaaacagacatacgtcccaaaccaatggtggaaataggcggataccccattctttggcacattatgaagatatattcgtactggggttttaatgaatttgtgatccttaccggttataaatcgcatattataaaagattattttctcaattactatacccggtactccgacatgactatcgacatggtcagcaattccgttgaactgcacaagatcaggactgaaccgtggaaagtgacaatgctctacaccggccctgatacccagacaggcggcaggctgttacgcgcaaaagattatctgtgcaaggaacgatttatgctgacctacggcgacggcgttagtgatgtaaatattcgggaacttattaagcgccatgaatcatcggagaagcttgtaacgttgacctctgtgcagcctgcagggcgttttggctcaattgagatagcggactgcggaaaagtggaatcgttcaaagaaaaacccgttggtgacggcgcgtggataaacggcggattttttgtgatggaaccgggtgtttttgattatctggccgacggcgacgcgacgattctggaaaggaaacccctggaacacattgcggaagccggtcagttatatgcgtataaacacaagggtttttggaggcccatggataccctgcgggataaaaacgaattaaacgatatgtggacaaaagggacagcgccctgggcgctctggttgaaatga

SEQ ID NO: 51372 - protein, 274 aa, Unknown
  Obtained from environmental sample
  DOMAIN (17)...(265): Nucleotidyl transferase
  misc_feature (1)..(274): Xaa is any amino acid
MVRSFHDLESYGIYDMKVVLLAGGFGTRLSEETDIRPKPMVEIGGYPILWHIMKIYSYWGFNEFVILTGYKSHIIKDYFLNYYTRYSDMTIDMVSNSVELHKIRTEPWKVTMLYTGPDTQTGGRLLRAKDYLCKERFMLTYGDGVSDVNIRELIKRHESSEKLVTLTSVQPAGRFGSIEIADCGKVESFKEKPVGDGAWINGGFFVMEPGVFDYLADGDATILERKPLEHIAEAGQLYAYKHKGFWRPMDTLRDKNELNDMWTKGTAPWALWLK

SEQ ID NO: 51373 - DNA, 894 bp, Unknown
  Obtained from environmental sample
  misc_feature (1)..(894): n is a, c, g, or t
atgttttcaatggtcgaaactgaaattttttcaaaagctgcggcaaaattcggaccaatggcttccagccccgctttttcatctgtatttgacggtgtaaaaaataattttgataaatatatggaggaaagtaacccttttgcttatccgtcaaccggagcgcttgaatattaccaggccggtcttcgtttcactacaacaataggttccgccgatataggcgggcagtatttttacggccatttgttccgccccggctttaccgtcgacggaattgacgcgtttgttgatgatttggcatatggtatcttaggtgataactttccgataacaatgaaccccggttatacaggtaatccttccctgataaaaccaataataaaatacaaccgctatcatcagattggacttgattacgcacaggtgcttttaggttttaacattcgcgcggaagccgccattcatattactgaagatctttcaggcgacgacggcgctgtccaaaacccgttcatcggctggtctcttggttttgaccgaagtctcttttggggattaacgcttaatattcaatgcaatgaaaccgtgcgcctgtttaacgataagatcggagacaatcccattctggacgcggaagccgataccaacgccatttctacccgtttaaccatgcgtttatcaaaaagtttcttcatggacaaactggaaagcagcgcgacggttatatgggacgtagaaaattccgatttctacattatcccgtctcttgtctggaccgaaggcaacatgagctggatattatccggaggcattttcgccggaaaagaaaccggagatttaggacagtactggagaaacaattacgttaagtttggaataacgtactcgttctaa

SEQ ID NO: 51374 - protein, 297 aa, Unknown
  Obtained from environmental sample
  misc_feature (1)..(297): Xaa is any amino acid
MFSMVETEIFSKAAAKFGPMASSPAFSSVFDGVKNNFDKYMEESNPFAYPSTGALEYYQAGLRFTTTIGSADIGGQYFYGHLFRPGFTVDGIDAFVDDLAYGILGDNFPITMNPGYTGNPSLIKPIIKYNRYHQIGLDYAQVLLGFNIRAEAAIHITEDLSGDDGAVQNPFIGWSLGFDRSLFWGLTLNIQCNETVRLFNDKIGDNPILDAEADTNAISTRLTMRLSKSFFMDKLESSATVIWDVENSDFYIIPSLVWTEGNMSWILSGGIFAGKETGDLGQYWRNNYVKFGITYSF

SEQ ID NO: 51375 - DNA, 405 bp, Unknown
  Obtained from environmental sample
  misc_feature (1)..(405): n is a, c, g, or t
atgaccgggttatcaagctttaccgtccgcacttccgggcggagcgaatggatcaatataaccgccgaggtacagaaggcggttgacgcttccgccgtgaaagagggcatctgcgtggtgtttgtgccccataccaccgcggcggtaacgataaacgaaaacgccgatcctgatgtccctcatgacgtgggactggcgctggacaagatatcccccgaccggcatgaattccggcacagcgagggtaattcggcggcccataccaaatcaagtctggttggtccttcgctcaccgtaattgttaccggaggcagactgctcctcggcacatggcagggaatctggttcaacgaatacgacggcccgcgtacgaggaaagttcaggttagagttatcggagaatag

SEQ ID NO: 51376 - protein, 134 aa, Unknown
  Obtained from environmental sample
  DOMAIN (17)...(132): Uncharacterised protein family UPF0047
  misc_feature (1)..(134): Xaa is any amino acid
MTGLSSFTVRTSGRSEWINITAEVQKAVDASAVKEGICVVFVPHTTAAVTINENADPDVPHDVGLALDKISPDRHEFRHSEGNSAAHTKSSLVGPSLTVIVTGGRLLLGTWQGIWFNEYDGPRTRKVQVRVIGE

SEQ ID NO: 51377 - DNA, 978 bp, Unknown
  Obtained from environmental sample
  misc_feature (1)..(978): n is a, c, g, or t
gtgctacaagactctcccatttataccacttctgcctctaatgaaccagttggttttttgcataaagataaaataattatttcaaatggtaacgctggatatggattagaaaaaggatatgacgaaccaatgccgtattttggatttgaaccagataatgaatatccttatataaaacggtatcatgtaacgattggggattatattgttccggcaaacacagttgatctttttggttctaatattataggaaaaaagaataatattttgacatcatattgttgtgatatattaagaagtaaaaatagagaaacattatttaaatacgagccatattataaagacaatcaatcatattttgaatatgcttatatgaaagatatttattggtatgaagaatatgattcaaattggagcagattctttgtatttaattccatactgagctttggttataggcgaggattagtcgtaaataacatagaaaaaacgaaatatggatacaaagttaaatgcaaagaatcaacatcaaacaacagccctgattttaaagtaccgacccttgaatggaataatattcaagggaaaaaagaatttactttgcttatttatattgacggtgattacattgatctgtatgtagacaacactacagacaaggtagggtcatttgtatttgtgtctaatgaatttattaatcagtttaacaatcttataaaaacaaatacttgcgatttagcaaatgtaaagtggcctagacgagcaaacggtaacatggattatccttcagaccagcaagccatagaaaaaacagcttttttcacaagtgatactgaaaaccaagagagcgaaatggttcaaaacaacctcgaaacaaatctctttccaacttggacatggattacgattattggcggaagcattgttgtagttgggggctgtgttgtattttttattataaaacgcaaaatgcgatga

SEQ ID NO: 51378 - protein, 325 aa, Unknown
  Obtained from environmental sample
  misc_feature (1)..(325): Xaa is any amino acid
MLQDSPIYTTSASNEPVGFLHKDKIIISNGNAGYGLEKGYDEPMPYFGFEPDNEYPYIKRYHVTIGDYIVPANTVDLFGSNIIGKKNNILTSYCCDILRSKNRETLFKYEPYYKDNQSYFEYAYMKDIYWYEEYDSNWSRFFVFNSILSFGYRRGLVVNNIEKTKYGYKVKCKESTSNNSPDFKVPTLEWNNIQGKKEFTLLIYIDGDYIDLYVDNTTDKVGSFVFVSNEFINQFNNLIKTNTCDLANVKWPRRANGNMDYPSDQQAIEKTAFFTSDTENQESEMVQNNLETNLFPTWTWITIIGGSIVVVGGCVVFFIIKRKMR

SEQ ID NO: 51379 - DNA, 309 bp, Unknown
  Obtained from environmental sample
  misc_feature (1)..(309): n is a, c, g, or t
ttgatactgaaaaataacagacgccttttggcgataatggcggtaattgccgtccttattaccgcgcttgccgtattgacgttcatgaaccaaggcttcctagacatgtaccgcgcctataaacaagaccgcgagcttacccaaaagatagaagccgcccacgccgaggccgattcgcttaaagccgaaatcgaaaggctcaagagcgacaccacttacatagagggactcgcaagggaaaaactaggcatggcgcgcaaaggggagaagataatcaaatttgtggatagcgttaattacccgaaataa

SEQ ID NO: 51380 - protein, 102 aa, Unknown
  Obtained from environmental sample
  SIGNAL (1)...(24)
  DOMAIN (18)...(97): Septum formation initiator
  misc_feature (1)..(102): Xaa is any amino acid
MILKNNRRLLAIMAVIAVLITALAVLTFMNQGFLDMYRAYKQDRELTQKIEAAHAEADSLKAEIERLKSDTTYIEGLAREKLGMARKGEKIIKFVDSVNYPK

SEQ ID NO: 51381 - DNA, 675 bp, Unknown
  Obtained from environmental sample
  misc_feature (1)..(675): n is a, c, g, or t
atgagcgcagaaaagacagaatcgatcatcctttcggtaaccccatacagagagacaagctgcatcctgcgcctcttcacccgctcgcacggattggtgcacggaatagctaaaggcgctcgccgcggcagcggcaaatccacccccacgccgatagacagaggcctgctccttgaggcgttactctaccaccggccaaaccgcgaactgcacactcttggcagtttacacgtggcaaatttcttccacggcatccgctccgacataacaaagtcggcgctccgcgacatagcgatagaactgtacctcaagtccataacggaaccgtcgccgcaccccgaactctttgatttgttggctgacttctttgccggattagattgcgcaaacagcgttgataatgataatacgaacaccgcgttcatcaaactgtggcgctttatcggcaaatactgcgaacacaacggattcggtatagatacggaaaattacgtaggcagcggtattgatccgcgtatcgtaaaaatcataagcgaggaagacacggcggaatcgtgctatcgttattccatggatgagtgtataagcgtgacggaacggttactgcgatactgccgccggcattttgatatccgaacagcgtttaattcgatggagtttgttcgggggctttga

SEQ ID NO: 51382 - protein, 224 aa, Unknown
  Obtained from environmental sample
  DOMAIN (1)...(215): Recombination protein O
  misc_feature (1)..(224): Xaa is any amino acid
MSAEKTESIILSVTPYRETSCILRLFTRSHGLVHGIAKGARRGSGKSTPTPIDRGLLLEALLYHRPNRELHTLGSLHVANFFHGIRSDITKSALRDIAIELYLKSITEPSPHPELFDLLADFFAGLDCANSVDNDNTNTAFIKLWRFIGKYCEHNGFGIDTENYVGSGIDPRIVKIISEEDTAESCYRYSMDECISVTERLLRYCRRHFDIRTAFNSMEFVRGL

SEQ ID NO: 51383 - DNA, 519 bp, Unknown
  Obtained from environmental sample
  misc_feature (1)..(519): n is a, c, g, or t
atgttgcgtaacaaaatgagcgggttcacccttatcgagctgatggtcgttatcgtgatcatcggggtgctggcgtcgttggcgataccgaggtttacggaggcgtcggctaaggcgaaaatatcggaggcgccgcgggtattagcgtcgtttgagtcggcttatcttgcggcggcaacagagatgtcggcagaacagttaaagactatgggggcaaatgatttggtttttgagaaaccaacagatagtaaatggtttaattatgcaattggtaagtctggtacgggtgaatacggtgttgacgcatgccaaggtgaagcaaagtcgaaaatggggtcgtttacaactgatgattggcttcagacgcagtatagtgaaacgagtgataaattcacacactattctagtagcgtagacgtagcgaaaaaaatggtacctaactttgacgctaaagatggtggtactagcttaactgcggcagctgatgatgacccaccgtgcactggagatgaatgctaa

SEQ ID NO: 51384 - protein, 172 aa, Unknown
  Obtained from environmental sample
  DOMAIN (7)...(30): Prokaryotic N-terminal methylation motif
  misc_feature (1)..(172): Xaa is any amino acid
MLRNKMSGFTLIELMVVIVIIGVLASLAIPRFTEASAKAKISEAPRVLASFESAYLAAATEMSAEQLKTMGANDLVFEKPTDSKWFNYAIGKSGTGEYGVDACQGEAKSKMGSFTTDDWLQTQYSETSDKFTHYSSSVDVAKKMVPNFDAKDGGTSLTAAADDDPPCTGDEC

SEQ ID NO: 51385 - DNA, 1026 bp, Unknown
  Obtained from environmental sample
  misc_feature (1)..(1026): n is a, c, g, or t
atggcgagtgccgtcgtccttgataccaccggcagctcagagccttggggcacgaggtcaatatatattatccgnctcctcccctacggcggttttcttcacgacaggccgctttggaagagatttccggcgcgtatgaagcagctttggcgcaacctgacgaatataaaacgcgccatccctttattctccgaaaatataccgataaaaccggtcttacggatcaacgactccaacatccctgacgccgacgccgtgatcgccacggcgtggccgacggcttacgacacaaccggtctgtccgcgaagaaaggtaaaaaatattatttcgtgcagcactatgaagtctggagcggagacataaaaaaggtcgacggctcataccgtctgccgctcgacatcatcacgacagccccgtggctgaccgatttaatgaaaactaaattcaaccgcgacgcgacggaaatacgcatcggcctcaggctcgacaaattctatcctccggccgcaaaggatttcggacgcccgtcgatccttatcatggcgcacgatttggaatggaaaggcacaaaagacgcaacggacgcgctggcaagcgtcaaagaacgctatccgcatatagaaataaaaatgttcggaatgtgcgtcaaaccgaacgcgccgttcgactttgagtatcatcaagacccgccgtacgaaaaattgctcgacctctaccaaaacgcgaccgtctttatctttccaagccacaaagaaggctgggggttaaccgcaatagaggctatggcgtgcaaatgcgcgctgatcgccaccaatgtggggtgcataccgatcattaacaacggggaaaatcttattttggcggaaataaaaaatccggagtcaatcgccaaggccgttatcaaattacttaaagataacgaacttgccgaaaagaccgcggagcaaggcctaaaaagcgtccaagcgttagactgggctgcgtcggcgcgtaaaatgctggactgcttggcgcctccccaataa

SEQ ID NO: 51386 - protein, 341 aa, Unknown
  Obtained from environmental sample
  DOMAIN (163)...(320): Glycosyl transferases group 1
  misc_feature (1)..(341): Xaa is any amino acid
MASAVVLDTTGSSEPWGTRSIYIIRLLPYGGFLHDRPLWKRFPARMKQLWRNLTNIKRAIPLFSENIPIKPVLRINDSNIPDADAVIATAWPTAYDTTGLSAKKGKKYYFVQHYEVWSGDIKKVDGSYRLPLDIITTAPWLTDLMKTKFNRDATEIRIGLRLDKFYPPAAKDFGRPSILIMAHDLEWKGTKDATDALASVKERYPHIEIKMFGMCVKPNAPFDFEYHQDPPYEKLLDLYQNATVFIFPSHKEGWGLTAIEAMACKCALIATNVGCIPIINNGENLILAEIKNPESIAKAVIKLLKDNELAEKTAEQGLKSVQALDWAASARKMLDCLAPPQ

SEQ ID NO: 51387 - DNA, 912 bp, Unknown
  Obtained from environmental sample
  misc_feature (1)..(912): n is a, c, g, or t
ttgtcgaaagcaagggcaaagattattattaacgcacaaaaaaaagacgcggttttcccgttagctgtaaatatagccgccgtagtattgcttttatgcggcgcgtttttactggtttcctttaacggaaaaaaggacgcgcgggtaaggacgggaagcgccgtttataatttgacggagcgcgcgcttattgaagaaattcgcaaagataccgctgataaaatcgccgaaaaggaaagggaaatagaagcgatagtttcccgcctgaatgaaattgacgaagagcttttaaaattattatcaaatagccagaatcttaccgccgaccaaattacggcgcgggaaagacttttgtctttgcagaattatttccgcgaccagttagccgtattacaggatgaaagatcgcaaatactggaagcttcccgttcaagagaagcccgtcttcgcgcgcaacttgacgagagaacaagggagtttgccgcggcccagcagaaagcatccagtgagttggaatctgccgtcagcgaacttgataaacttagaacggaacaggaaaaaataaccgccatagacgctcagatttcaggcgggctcgcttccgccaaagacaatattcagaagaagcaatacgatcaagcgtcccgtattgttgataatttacggcttttttgtaataacaattctcttgcctcttcgcgcgtattcctgtcaagaaaggatttttataaccaggcgattgattttgtggaagctatgattaacgacgcccagaaaaacagcggatcttcgtccggcgcggatcagtccgaagcgaacgccgagaatgtcaaattacaggaaaaaattaacgaaatgcaaaaaacaattgacgcgcaaaacagcggagattcgggactgcaaacaggataa

SEQ ID NO: 51388 - protein, 303 aa, Unknown
  Obtained from environmental sample
  misc_feature (1)..(303): Xaa is any amino acid
MSKARAKIIINAQKKDAVFPLAVNIAAVVLLLCGAFLLVSFNGKKDARVRTGSAVYNLTERALIEEIRKDTADKIAEKEREIEAIVSRLNEIDEELLKLLSNSQNLTADQITARERLLSLQNYFRDQLAVLQDERSQILEASRSREARLRAQLDERTREFAAAQQKASSELESAVSELDKLRTEQEKITAIDAQISGGLASAKDNIQKKQYDQASRIVDNLRLFCNNNSLASSRVFLSRKDFYNQAIDFVEAMINDAQKNSGSSSGADQSEANAENVKLQEKINEMQKTIDAQNSGDSGLQTG

SEQ ID NO: 51389 - DNA, 324 bp, Unknown
  Obtained from environmental sample
  misc_feature (1)..(324): n is a, c, g, or t
atggcttcaaaaaagaatacaagcgcgatagagttttacgagaaaacccttgaaattgactcggataaccctacggctcttaactgtatgggttatattctcgccgatacgggaatagatattatgagagctcttcgtctttgcagaaaagccgtggactttaagccgcaaaacgccgcttaccttgattccctcggttgggcttactacaaaagcggcgaaccggtagaggcgcgtacatggcttcgcagggcgttagatgttgcccccgatgaagaagaaataaaaaggcattttaaattagcgacaggagaaaagctttga

SEQ ID NO: 51390 - protein, 107 aa, Unknown
  Obtained from environmental sample
  DOMAIN (59)...(92): Tetratricopeptide repeat
  misc_feature (1)..(107): Xaa is any amino acid
MASKKNTSAIEFYEKTLEIDSDNPTALNCMGYILADTGIDIMRALRLCRKAVDFKPQNAAYLDSLGWAYYKSGEPVEARTWLRRALDVAPDEEEIKRHFKLATGEKL

SEQ ID NO: 51391 - DNA, 2064 bp, Unknown
  Obtained from environmental sample
  misc_feature (1)..(2064): n is a, c, g, or t
ttgagaaaaattgccgtttttacagcgttttttctttttgcttacgctttatacgcgcaagaagctcccattcgtccggggcctgttacaggcggcacaggacccgccgcgttatcggccgctgatgaattcagggtcggcgttcacgcctacaaccgtttttcgtataacgaagcgatttattcttttgaacgcgcccttgccttccgccccgacgaaccgctgattcttgactggctcggcaaggcgtactaccgctcaggcatggaagaaaccgccctaaggcagtggagagccgctcttgatctttacggcagaaatacgggcgttggaatgctgcttggcgcgcgtatagaaacagtagccaacaggcgctttttactgcccgtaaaaaacgatgaagtgcgttatgtaggatcgggacgttaccccggaaggatagaagagacaatcctttaccgtcagcctacttcgatattggcgaataacgacggcactgtatgggtagccgcttacggcagcaatgaacttttattaatagacgtaaatggagtaataagggatcgcaaacgcggtcatcttaacggtttagaccgtccatacgatttggcgcgcgggcttgacggccgtatgtatgtgtccgaattccgacgcggcagggtgagtattcttaaaagtaacggggactggcaggcgtatatcggctcaagaggcctgggcgacggtcaatttgtcggtccccagcacctaacggttgatgaagacggttatctgtatgtagtcgattacggcaacagccggatttcaaaatttgatccggacgggttatttattctttcgtttggaaaaaagagcgcggtatttcccggtctgctgtccccaacaggcattgcagcatataacagtaaaatttatattgccgaaagcgcggaaaaagcaatttacatgttcgacccaaacggcaattatctgggacgccttgccgcggaagggctgaaagcccctgaaagcctgaggtttctttctgacggtacaatgctggtcgccgacggcaacagaattgtgcagattaaccccgattccgcgattgtccgcgaactgggacttgccggaggagagcgtgtgcgcataacatgcgctgaaatggacagcaacggcagcatactcgccgcggatttcaacgcaagcgaggtcagtgttatgacccgttttgacgatttagcttccggtctttttgtgcagatacgcaatattgacgcanaacaattccccaaagtaatagtagatcttacagtagaagacagactgcgccgcccaatcctcggtcttaatgacaataatttccgtctcacagaaaataacgtttccgcggcggaacaggtattgtatattcccggctaccgcacaagaggagcggatatttcccttcttgttgaacgctccgacataacttcccgtatgcgcgatgattttaccgccgccgctcgcgatataaaccgcgccttacaggaaatgggcaattcaaaaatagtttcggttgtttcagcttcggctcagccgcgcaaagaaccgcacgccaattcccttgaaaacgcggtacggggcgcgagcgattataccgcgcggtggcgttttgattcaggtcttcggttagcggcaagcgatcttttaacgggcgttccgaaaaggtcggttgtatatatcggatcgggcgctttaggcgatctggcgtttgaacagtacagtctttcggaaatgacggcttatctggcgaataacggtatagtgtttaatgccgtcataatcggcggcgggcaagtttcccccgaattagattatctttgcaaaggaacaggcggaagggcgatgcccctttaccgttcgcgcggcataggagaacttatcaagagtacggcggacataccgtcgggtctttacagctttacatacacttcgcgcttgcccacagactttggaagagcgtggctgccggttgaagctgaagtttatttgcttgaaagatcaggccgcgataatacccagtactttccgccgttagaatag

SEQ ID NO: 51392 - protein, 687 aa, Unknown
  Obtained from environmental sample
  SIGNAL (1)...(19)
  DOMAIN (74)...(107): Tetratricopeptide repeat
  misc_feature (1)..(687): Xaa is any amino acid
MRKIAVFTAFFLFAYALYAQEAPIRPGPVTGGTGPAALSAADEFRVGVHAYNRFSYNEAIYSFERALAFRPDEPLILDWLGKAYYRSGMEETALRQWRAALDLYGRNTGVGMLLGARIETVANRRFLLPVKNDEVRYVGSGRYPGRIEETILYRQPTSILANNDGTVWVAAYGSNELLLIDVNGVIRDRKRGHLNGLDRPYDLARGLDGRMYVSEFRRGRVSILKSNGDWQAYIGSRGLGDGQFVGPQHLTVDEDGYLYVVDYGNSRISKFDPDGLFILSFGKKSAVFPGLLSPTGIAAYNSKIYIAESAEKAIYMFDPNGNYLGRLAAEGLKAPESLRFLSDGTMLVADGNRIVQINPDSAIVRELGLAGGERVRITCAEMDSNGSILAADFNASEVSVMTRFDDLASGLFVQIRNIDAXQFPKVIVDLTVEDRLRRPILGLNDNNFRLTENNVSAAEQVLYIPGYRTRGADISLLVERSDITSRMRDDFTAAARDINRALQEMGNSKIVSVVSASAQPRKEPHANSLENAVRGASDYTARWRFDSGLRLAASDLLTGVPKRSVVYIGSGALGDLAFEQYSLSEMTAYLANNGIVFNAVIIGGGQVSPELDYLCKGTGGRAMPLYRSRGIGELIKSTADIPSGLYSFTYTSRLPTDFGRAWLPVEAEVYLLERSGRDNTQYFPPLE

SEQ ID NO: 51393 - DNA, 546 bp, Unknown
  Obtained from environmental sample
  misc_feature (1)..(546): n is a, c, g, or t
atgatgatggaggccgtttcgcgccgtctgtgccgtctgcgggacgaggggggcgccttccccgatttgttgctgattgacggcggcaaggggcagttgcacgcggcgatgggggcgctcgcggaatttgagaacccgccgctgatcgcctctttggccaagcgggaggagatactcttctccccgtgtttggacgaaccgctttcgctgccggatacgcacccggcgcggcggttggtcgagcggattcgcgacgaggtgcaccggtacgcgatcacctaccaccgcagcgtccgcggcaagcagttcacccgctcggcgcttgagaacctgccggggatcggtaaggcgagggcgcggctgctgttggagcggttcgggtctattaggcgcctcttggaggcggacgccggggagattgcgggcgttcggggtttttcggaggagtcggcgctgcggctcaaggaggcgttggcgcgggagggtcaaaaaaacttgatttcggaaagcgcgccaaaaaaaattattacaccgcccgccgattaa

SEQ ID NO: 51394 - protein, 181 aa, Unknown
  Obtained from environmental sample
  DOMAIN (1)...(92): UvrC Helix-hairpin-helix N-terminal
  misc_feature (1)..(181): Xaa is any amino acid
MMMEAVSRRLCRLRDEGGAFPDLLLIDGGKGQLHAAMGALAEFENPPLIASLAKREEILFSPCLDEPLSLPDTHPARRLVERIRDEVHRYAITYHRSVRGKQFTRSALENLPGIGKARARLLLERFGSIRRLLEADAGEIAGVRGFSEESALRLKEALAREGQKNLISESAPKKIITPPAD

SEQ ID NO: 51395 - DNA, 933 bp, Unknown
  Obtained from environmental sample
  misc_feature (1)..(933): n is a, c, g, or t
ttggtgttaaaaaaattcgcggattacaagcgggaaaacgagccaaaactggaaacaataacgatagtgttttttgcggattcagacgcccttgtccgcggtctgtttggaaacagcattgacggagccagtcttaccggcagcctggcccagcagctcagtcaggagcaatttgatattattcccggctacaccgccatggtacatctgcttgcccttaacaacgcggcttctccctttgacgatatccgtgtgcgcagggcgatcaattacggcattgatatacagggaatcattgatacggcattttacggcaaaggcgaaccgtcgggcagtcccctgattccggggctgaaggcgtattatgaaggatcactggccaatccctaccctgtcgatcttgagaaagcccgttcgctgcttaaggaggcgggttacggagaaggcgggaaaaaactttccctggaaataaccgtcccctcaatttataccatgcacgttgacactgcccaggtgatcgccgatcagctttccaaacttgatatcgcggtaagtataaaacttgtcgagtgggcggcctggctttcagacgtatactttggacgaaagtatcaggcgacgattatctcactggacagccctgttgtttcaccgaggagttttctttcccgttaccgttcggataacaacagtaatttcattaattactccagcgcgaattttgatcgtgtttttgacgcgatcctcgttgaacccaatgaggacaagcgcgtcgccctgtacaaggaagcccagcgtattatttccgccgacgccgccagcgtttacatacaggacatactgggatttcgcgccttgcgaacaggaacctacggcgggatactgaattaccccctgtacgtcaatgattttgcggcaatgtataccaaataa

SEQ ID NO: 51396 - protein, 310 aa, Unknown
  Obtained from environmental sample
  DOMAIN (1)...(233): Bacterial extracellular solute-binding proteins, family 5 Middle
  misc_feature (1)..(310): Xaa is any amino acid
MVLKKFADYKRENEPKLETITIVFFADSDALVRGLFGNSIDGASLTGSLAQQLSQEQFDIIPGYTAMVHLLALNNAASPFDDIRVRRAINYGIDIQGIIDTAFYGKGEPSGSPLIPGLKAYYEGSLANPYPVDLEKARSLLKEAGYGEGGKKLSLEITVPSIYTMHVDTAQVIADQLSKLDIAVSIKLVEWAAWLSDVYFGRKYQATIISLDSPVVSPRSFLSRYRSDNNSNFINYSSANFDRVFDAILVEPNEDKRVALYKEAQRIISADAASVYIQDILGFRALRTGTYGGILNYPLYVNDFAAMYTK

SEQ ID NO: 51397 - DNA, 864 bp, Unknown
  Obtained from environmental sample
  misc_feature (1)..(864): n is a, c, g, or t
gtggaggtcaaattgattagaggatggtataccgcggccagcggaatgcgcgcgcagcaatggcggctggacgctgtggctaataaccttgccaatgtgaacaccgacggttataaacgggacgtggcggctttcaaggccttcccggaactgcttatacgcaggcaggacgacgacggggtctatctgcacccattcggctccgccgacgcggcccccatcgtggggaaaatgggtaccggggtcgagttaaacgagctttacaccgcttttgagcagggcagtttcaaggaaacccagagcgattttgatattgccttggacgggagaggcttttttgccgtttccacgccctggggcgagcgctatacccgcaacggctctttccagcttggcaaagagggttaccttgaaaccaaagaaggttataaggttcttggggaatacggcccgttaagggtaaaagccaacaatttccaggttgacaaggacggcagggtatggataaacgcggcaatcagcgatgatcccgaggtaatggtaagccgcgaagggaatacctgggatgaggttgtacagcttgacaccctcaaactggtcgaattcgagcttgaccgctaccttgaaaagcagggctccagcctgtaccgggaaagcgacacctcaggccccgcaatggtaattgagcagggcaaccggccaaaggtcatccagggctttgtagaggccgcgaacgttgaccccgtagtcgagatggtgcagatgatcgaggtgaaccgctcttatgaggcgaaccaaaaaataatccaggttgaagaggccgccctcggcacactgatcaaccagacaatgaaattcggctga

SEQ ID NO: 51398 - protein, 287 aa, Unknown
  Obtained from environmental sample
  DOMAIN (244)...(282): Domain of unknown function (DUF1078)
  misc_feature (1)..(287): Xaa is any amino acid
MEVKLIRGWYTAASGMRAQQWRLDAVANNLANVNTDGYKRDVAAFKAFPELLIRRQDDDGVYLHPFGSADAAPIVGKMGTGVELNELYTAFEQGSFKETQSDFDIALDGRGFFAVSTPWGERYTRNGSFQLGKEGYLETKEGYKVLGEYGPLRVKANNFQVDKDGRVWINAAISDDPEVMVSREGNTWDEVVQLDTLKLVEFELDRYLEKQGSSLYRESDTSGPAMVIEQGNRPKVIQGFVEAANVDPVVEMVQMIEVNRSYEANQKIIQVEEAALGTLINQTMKFG

SEQ ID NO: 51399 - DNA, 462 bp, Unknown
  Obtained from environmental sample
  misc_feature (1)..(462): n is a, c, g, or t
gtgctttccggttcaggggatagcacgataaaactgtgggatactgtaagcgggcgtctaatcagaacttttaaggggcgttcggttgaatctgtagcgttcagccccgatgggaagctagtgctttccggttccagtgacggcgtaaaactgtgggatacggtaagcgggcgtctaatcagaacctttggggggcatacttctgcggttgaatccgtagcgttcagtcccgacggaaagcagatactttccggctcttacgatgacacggtaaaattatgggacgcaaacaccgggagggaaatcaaaactttttcggggcatactgaaggtgttaattccgtagcgttcagccccgatggcaaacagatattttccggttcatcggataaaacggtaaaactgtgggacatagcaagcggcaaggaaatcagaacctttaaggggcgcattgcctcataa

SEQ ID NO: 51400 - protein, 153 aa, Unknown
  Obtained from environmental sample
  DOMAIN (19)...(53): WD domain, G-beta repeat
  misc_feature (1)..(153): Xaa is any amino acid
MLSGSGDSTIKLWDTVSGRLIRTFKGRSVESVAFSPDGKLVLSGSSDGVKLWDTVSGRLIRTFGGHTSAVESVAFSPDGKQILSGSYDDTVKLWDANTGREIKTFSGHTEGVNSVAFSPDGKQIFSGSSDKTVKLWDIASGKEIRTFKGRIAS

SEQ ID NO: 51401 - DNA, 1149 bp, Unknown
  Obtained from environmental sample
  misc_feature (1)..(1149): n is a, c, g, or t
atggaggaacgaatggggttagacatgaaaaccagaaaaaaaatttgcgcgaggatttacaggcgctaccagaaagcggacagggaaggcaaggccaaaatccttgacgagtatgccccggtgcttgagcataaccgggattacttggcccacctgctagccaattggggtaaaacagtgtatgccccttgcgacgggaaacccgtcaaatatgtcgctaaaccgcccataaaggcccgcaataaggcccctaaaaacaaaaaaacagggaggccggaaaagtatgacaaacccttcgccgaggttctattaagcctctgggagtttttcgactttcagtgcggcaagcttttagcccccctgctaaaggggatggaaggttttttggttcaagagtttaatctaagcgaagaggtacgggcgctgcttttgtctgtcagcccggcaaccatcgaccggaagatcaggaaccagaaaaaaagatatcgccttaaaggcatgcataccaccaagcccggaacgctccttaaaagccagattccgatacgggtctgttttgaccgggacgagaagtggccgggctttttcgagcttgacacggtcagccattgcggcgcgaatgcaaaaggccaattctgccagactttgaccgtcaccgacgtgggatcagggtggaccgaagaatgcgcgcttttgaacaatgcccaccgctgggtcaaggagcgcattgaaagcacacgggacggcctcccgttccccatgctcggcatcgacagcgacaacggcggcgagttcatcaaccgccggctccttgactggtgcgtccagaacaatgtcaagttcacccgcggacgcccataccggaaaaacgacaactgtttcgtcgaacagaaaaacggggatgtagtgcggaaaaccgtcggatatgggcgttttgagggccaaaacgcctttgatgcccttgacgaggtctaccgtttcctgaacccgcttttgaattattggtatccgaccgtccgcctcgtcgccaagaaaaactcccttcgggcaggtataaaaaaatctatgagaaggatcccaaaacgccgtgccaaaggctccttgaatcctctttcatcagcgaggaatgcaaaacagagcttcgcctga

SEQ ID NO: 51402 - protein, 382 aa, Unknown
  Obtained from environmental sample
  DOMAIN (188)...(336): Integrase core domain
  misc_feature (1)..(382): Xaa is any amino acid
MEERMGLDMKTRKKICARIYRRYQKADREGKAKILDEYAPVLEHNRDYLAHLLANWGKTVYAPCDGKPVKYVAKPPIKARNKAPKNKKTGRPEKYDKPFAEVLLSLWEFFDFQCGKLLAPLLKGMEGFLVQEFNLSEEVRALLLSVSPATIDRKIRNQKKRYRLKGMHTTKPGTLLKSQIPIRVCFDRDEKWPGFFELDTVSHCGANAKGQFCQTLTVTDVGSGWTEECALLNNAHRWVKERIESTRDGLPFPMLGIDSDNGGEFINRRLLDWCVQNNVKFTRGRPYRKNDNCFVEQKNGDVVRKTVGYGRFEGQNAFDALDEVYRFLNPLLNYWYPTVRLVAKKNSLRAGIKKSMRRIPKRRAKGSLNPLSSARNAKQSFA

SEQ ID NO: 51403 - DNA, 2187 bp, Unknown
  Obtained from environmental sample
  misc_feature (1)..(2187): n is a, c, g, or t
atggaaaagcggatacttgtaatagacgactttcattgcattgaggacccggcggtgcttcgtgtcatggaagaaggtttcttcaggaatatgctgccggggacatcggtgtttttaatttcccgttccatatctagaataaataccgcggatctgctttcccgcgatcagatattcaacataagcgaaaacgacttccgttttaccgaaaacgagctcagccagtattttcgcgggattggcatttcattccagccggacagcctgcgcgagatcatgcaggatacggaaggctgggctttcgcgataaaccttatagcgcgttcctggcagagagcgcccggctacggcggctatgtgcgtaacgcgatgaggcagaatatcttccggcttctggaaacggaaatatgggacgggctgccggataaacttcagaatttttttgtccgcctgtcgcttatcgatcatctgtccgttgacctgattgcccggctgacgggaggggatgaagagttaaccgacgggctggaaaaacaaagcgcctatgcgcgccgggacacatatatcaacgcgtacctcatccatccgctgcttctggaatttttaaaaacaaagcaaactttgcttacggaagaacaaaaaagggaaacctatgacattgcgggcgattggtgcgccaataacggctttacgatagacgcccttttctaccatgaaaagacgggaaactatcagtcaatactgtcggttttagccgggttaaccactcaaataccgcaggatatcgcgaaatacgcggctgatattctggaccgcgcgccggaagtagcgttttacaaggtggaattttttgcggaaatgcacctgcgtacctatatgtgccaggggccgctgcaaaaatcgctcgagttggtgaaatactatgaatccaaattccttgagctgccggatgataaccccacaaaaaaacgcacgctggcgtggctctatatcagctggtgctttatacgcggcttaatgagcctgaccgatgaggtatatgacgccgaaatataccttaagaaagccgctgaatgtgtttccacatccgtcgatcccggccatttaagcccgcattgcccggcggtgtggattatttgcgtcggttcttcaagaaaaggcgctttggaagaatatatcgacgctataagccgcggcgaaaaatatttgtcgcgctctaacctttgcggtttcatggccggtaagactgaattggcgcggggtgttctggagttctaccggggcgacatgggccaggcggaagcttttaccgccctcgcgctgaagaaggcgcgggagaacaaacaattcgggcttgtacaccgggcgctgttctattccctgcgtatcgccgcggcgcaggggaatttcacccgggcggaacaggcgcttaaagagacaaaaacccaactggatgaaaccgaatactttagccgttttatggattacgatatttccctttcctggtttttctgttttctcgatatgccggaaaagacatctgagtggcttcaggaagatttctcatggtacagccatgccggttttaatgaaaatttttggaattttataaaggcgcggttttattttgccacaaggaatttccccccgcttctggcgcatatcgaggaaatgaaagcgagggaatcatttttatacgaacgtatagaaatgcttgttatggaagcctgtatatattacaaaatgaaggacaaagaaaagtcctttgccgcgctgcgggccgcgtatacggacgcgctgtcaaacaatattgtaatgccctttattgaaatgggaaaagatatgcgaacccttagctcggctttgctaaaagagtctgacaaggttattcccaaagcatggctggaagacattaaccgcaagtccgcttcctacgccaaacgccgcgccggtatgatttcggaatacatgcagacaaaccgcgttacggacaatcctgccattaccccgagggaagcggacattcttaacgatctttcccacggactttcgcgcgctgaaatagcttccagccgcggcctttcgataaataccgtgaagatggtgatcaacagtctctacttcaagcttggcgcccagaatctggctgatcttatccgcattgcgacagaacgcaagatgatataa

SEQ ID NO: 51404 - protein, 728 aa, Unknown
  Obtained from environmental sample
  DOMAIN (665)...(722): Bacterial regulatory proteins, luxR family
  misc_feature (1)..(728): Xaa is any amino acid
MEKRILVIDDFHCIEDPAVLRVMEEGFFRNMLPGTSVFLISRSISRINTADLLSRDQIFNISENDFRFTENELSQYFRGIGISFQPDSLREIMQDTEGWAFAINLIARSWQRAPGYGGYVRNAMRQNIFRLLETEIWDGLPDKLQNFFVRLSLIDHLSVDLIARLTGGDEELTDGLEKQSAYARRDTYINAYLIHPLLLEFLKTKQTLLTEEQKRETYDIAGDWCANNGFTIDALFYHEKTGNYQSILSVLAGLTTQIPQDIAKYAADILDRAPEVAFYKVEFFAEMHLRTYMCQGPLQKSLELVKYYESKFLELPDDNPTKKRTLAWLYISWCFIRGLMSLTDEVYDAEIYLKKAAECVSTSVDPGHLSPHCPAVWIICVGSSRKGALEEYIDAISRGEKYLSRSNLCGFMAGKTELARGVLEFYRGDMGQAEAFTALALKKARENKQFGLVHRALFYSLRIAAAQGNFTRAEQALKETKTQLDETEYFSRFMDYDISLSWFFCFLDMPEKTSEWLQEDFSWYSHAGFNENFWNFIKARFYFATRNFPPLLAHIEEMKARESFLYERIEMLVMEACIYYKMKDKEKSFAALRAAYTDALSNNIVMPFIEMGKDMRTLSSALLKESDKVIPKAWLEDINRKSASYAKRRAGMISEYMQTNRVTDNPAITPREADILNDLSHGLSRAEIASSRGLSINTVKMVINSLYFKLGAQNLADLIRIATERKMI

SEQ ID NO: 51405 - DNA, 900 bp, Unknown
  Obtained from environmental sample
  misc_feature (1)..(900): n is a, c, g, or t
atggaatcttcgtttcaaacaagtcatgattcggcggcttcctttcattttgaacgccctcgcctgaacggcttattgacggaagctgtaaagtatccgatggtggttgtatgcgccggggccggttacggcaagacaaccgcggttcacgattttttaaaagggtatgacgcgagaaaggcatggatacagctttccgagcgcgataatgtcggatggcgtttttgggaaagttatacgcactcagtatcaaaactgaacaaaacactggccgaggctatctacaatattggttttcctgataccagagagaagatgcaccattacaagtctttagtaaaagaaaccgctgtggcggaaaagagggtgcttgtaatagacgattatcattgcattgaagacaagtcagtgcttcgttttttggaagaaggtttcttcaggaatatgcttccaggctctacggttattgtgatttcccgctccatatcccatttaaatgtcgcgggcatgacctaccgtgaccagatatttaacataaacgaaagcgacctgcgttttaccgaaaatgagctcagtgggtatttccgcaggatgggtatttcatttcaggcagacagtctgcgggagatcatgcaggacacagagggttgggcgttcgcgattaaccttatcgcacgctcctaccaaaaagcgcccggctacagcggttatgtgcgtaccgctatgaagcagaatattttccggcttctggaaatggaaatatggaacagcctctctgagcaactgcagaattttttggttcgcctgtccctcatcgatcacctgtcagttgatttaatcaagcaacttgccggagagggagaagggtttgccgcctcggccataaacccnnnnnnataa

SEQ ID NO: 51406 - protein, 299 aa, Unknown
  Obtained from environmental sample
  misc_feature (1)..(299): Xaa is any amino acid
MESSFQTSHDSAASFHFERPRLNGLLTEAVKYPMVVVCAGAGYGKTTAVHDFLKGYDARKAWIQLSERDNVGWRFWESYTHSVSKLNKTLAEAIYNIGFPDTREKMHHYKSLVKETAVAEKRVLVIDDYHCIEDKSVLRFLEEGFFRNMLPGSTVIVISRSISHLNVAGMTYRDQIFNINESDLRFTENELSGYFRRMGISFQADSLREIMQDTEGWAFAINLIARSYQKAPGYSGYVRTAMKQNIFRLLEMEIWNSLSEQLQNFLVRLSLIDHLSVDLIKQLAGEGEGFAASAINPXX

SEQ ID NO: 51407 - DNA, 501 bp, Unknown
  Obtained from environmental sample
  misc_feature (1)..(501): n is a, c, g, or t
ttgcggtattcggaaagcgttgtcgcccctatgcactgtatgtcgccgcgggaaaggcccggtttaagcatattggaagcgtcgatagtgccttcagccccaccggcgccgattatggtatgtatctcatcgatgaacagaataacatttccggcctgcgtgatttccctggttattttttttatcctttcttcaaattcgccccggtattttgttccagcgactattgaacccatgtccagggaaagtatgcgtttgcccgaaagagcttccggcgcgtttccggaaacaagcagttggaccaggccctcgacaatggccgtctttccgacgcccggctcccccaccagtatggggttattctttgaccgccttgcgagtatccgcacaatgcggttcatctctttttccctgccgattaccggatccagtttgcccgctttcgcaaacgccgtcagatcgcgggagaaattatcaagcgtgggggttagcacggggtaa

SEQ ID NO: 51408 - protein, 166 aa, Unknown
  Obtained from environmental sample
  misc_feature (1)..(166): Xaa is any amino acid
MRYSESVVAPMHCMSPRERPGLSILEASIVPSAPPAPIMVCISSMNRITFPACVISLVIFFILSSNSPRYFVPATIEPMSRESMRLPERASGAFPETSSWTRPSTMAVFPTPGSPTSMGLFFDRLASIRTMRFISFSLPITGSSLPAFANAVRSREKLSSVGVSTG

SEQ ID NO: 51409 - DNA, 2013 bp, Unknown
  Obtained from environmental sample
  misc_feature (1)..(2013): n is a, c, g, or t
gtgctaacccccacgcttgataatttctcccgcgatctgacggcgtttgcgaaagcgggcaaactggatccggtaatcggcagggaaaaagagatgaaccgcattgtgcggatactcgcaaggcggtcaaagaataaccccatactggtgggggagccgggcgtcggaaagacggccattgtcgagggcctggtccaactgcttgtttccggaaacgcgccggaagctctttcgggcaaacgcatactttccctggacatgggttcaatagtcgctggaacaaaataccggggcgaatttgaagaaaggataaaaaaaataaccagggaaatcacgcaggccggaaatgttattctgttcatcgatgagatacataccataatcggcgccggtggggctgaaggcactatcgacgcttccaatatgcttaaaccgggcctttcccgcggcgacatacagtgcataggggcgacaacgctttccgaataccgcaaacactttgagaaagatccggcccttgagcgccggttccaggctattcttgttgaggaaaccagcgtggacgaaacactgcagatacttcacggcatacggaaaaaatacgaagaccaccataaagtgtcatacaccgatgcggctgtagagctgacggtgaaactcgcaaagcgctatgttaccggccgtttcatgcctgacaaggcaatcgacatacttgatgaagccggggcgatgcggaaacttgaatacagcgacagcgatgaaccgcctgaaatagcgggcatcgaagcggagattaacagcctgaccgaagaaaaaagccttcttgttaacgcgcaggattatgaacacgcggcgttggtcagggacaaggtcagggccttacgatcccggcttgaatccgcccgtatcgcctgggaacacgcctacaacaaggaacagctaaaggttgacgaagacgacatccgccgcgtagtctcgcaggctaccggcattcccctgatgcaccttgccgaacaaaattcaaaaagactcctccacatggaagcggaaatccacaaacgggtaatcggccaggacgacgcggtacagcgaatctgttccgcaatacgccgctcccacgcgggcgtctcatccccccgccgccctacgggttcattcatctttttagggcctaccggcgtagggaaaaccctgcttgccaagcgccttgcggaatacctgttcggcacagaggaatcgcttgtccgcattgacatgtccgattacatggaaaaacacaatgcctcaaggctcacgggcgccccgcccggctatatcggctacgaagagggcggaatgttaaccgaaaaaatcaggcgcaacccgtaccgcgtaatactgtttgacgaaatggaaaaagcccaccaggatgttttcaacctgctcctgcaggtgatggaagaaggggaactgcgcgacaatctgggccatacggtaagcttccgcaataccgttattataatgaccagcaacgcgggcgttcgggaaatttcccgcgattccaggcttggcttcggttcgggttcaggcctgttaagccagagcgagattgaatcccaggcgaccagcgagctgaaacgcctgttcccccccgaattcctgaaccgcgtggacgacacagttgtcttccacccccttagcgttgagcagatagagagtattctggagattgaactggcagaattgtcgaaccggcttgcggaacagaattacagcattgaaatatcgcctgaggcaagagacttgcttattgagaaaggatgggatcccaaattcggcggaaggcccctgcgccgcaccctgcaaaaagaactcgaagatccccttgcccgcctcctcatggaaaatgactggccaaaaggaactgtttttaccgcgaacgtccgcgacggcaagatagagcttacaggcaatgcaccaacgtacaccgatgaattaagtattagagatgaagaactgatatacagtgagtag

SEQ ID NO: 51410 - protein, 670 aa, Unknown
  Obtained from environmental sample
  DOMAIN (333)...(572): Torsin
  misc_feature (1)..(670): Xaa is any amino acid
MLTPTLDNFSRDLTAFAKAGKLDPVIGREKEMNRIVRILARRSKNNPILVGEPGVGKTAIVEGLVQLLVSGNAPEALSGKRILSLDMGSIVAGTKYRGEFEERIKKITREITQAGNVILFIDEIHTIIGAGGAEGTIDASNMLKPGLSRGDIQCIGATTLSEYRKHFEKDPALERRFQAILVEETSVDETLQILHGIRKKYEDHHKVSYTDAAVELTVKLAKRYVTGRFMPDKAIDILDEAGAMRKLEYSDSDEPPEIAGIEAEINSLTEEKSLLVNAQDYEHAALVRDKVRALRSRLESARIAWEHAYNKEQLKVDEDDIRRVVSQATGIPLMHLAEQNSKRLLHMEAEIHKRVIGQDDAVQRICSAIRRSHAGVSSPRRPTGSFIFLGPTGVGKTLLAKRLAEYLFGTEESLVRIDMSDYMEKHNASRLTGAPPGYIGYEEGGMLTEKIRRNPYRVILFDEMEKAHQDVFNLLLQVMEEGELRDNLGHTVSFRNTVIIMTSNAGVREISRDSRLGFGSGSGLLSQSEIESQATSELKRLFPPEFLNRVDDTVVFHPLSVEQIESILEIELAELSNRLAEQNYSIEISPEARDLLIEKGWDPKFGGRPLRRTLQKELEDPLARLLMENDWPKGTVFTANVRDGKIELTGNAPTYTDELSIRDEELIYSE

SEQ ID NO: 51411 - DNA, 351 bp, Unknown
  Obtained from environmental sample
  misc_feature (1)..(351): n is a, c, g, or t
atggtggtcttcgtattttttccgtatgccgtgaagtatctgcagtgtttcgtccacgctggtttcctcaacaagaatagcctggaaccggcgctcaagggccggatctttctcaaagtgtttgcggtattcggaaagcgttgtcgcccctatgcactgtatgtcgccgcgggaaaggcccggtttaagcatattggaagcgtcgatagtgccttcagccccaccggcgccgattatggtatgtatctcatcgatgaacagaataacatttccggcctgcgtgatttccctggttattttttttatcctttcttcaaattcgccccggtattttgttccagcgactattga

SEQ ID NO: 51412 - protein, 116 aa, Unknown
  Obtained from environmental sample
  misc_feature (1)..(116): Xaa is any amino acid
MVVFVFFPYAVKYLQCFVHAGFLNKNSLEPALKGRIFLKVFAVFGKRCRPYALYVAAGKARFKHIGSVDSAFSPTGADYGMYLIDEQNNISGLRDFPGYFFYPFFKFAPVFCSSDY

SEQ ID NO: 51413 - DNA, 888 bp, Unknown
  Obtained from environmental sample
  misc_feature (1)..(888): n is a, c, g, or t
atggatctgaaagaactactgaaaaaccatatcgattccggcgcggcaatcactatagcctgtaccccggtgaacaggggggaagccagcgccttgggcattttgaaaatcgataaaaactgcaggataaccgaattcatggaaaaacccggcccgaccaaagatattaccgattatagggttccgccggaactcaaggtagagaaaaaaatcgacggggacgcctatcttggctccatgggcatttatgtttttaacgcaaaggcaatggatgacggccttgaaaatgaacttaccgacttcggcaaagaagtaatcccccaggctatcaacaacctcaaggttaacgcctatctcttcgacggttactgggaggatatcgggactatacggaatttctatgagacaaatctggagttgacggccctgaggccgaaattcgatttttatgacgaagataggcccatattcacgcacaggcgcaacctgcctccgtctaaaataaatttcggcaacatgaaccagtccatcgccgcggaaggctgcattataacaaacggcagcataaccgattcaattgtcggcatccgcaccatcatagaaaccggctcaagcctgaacggggtaatctgcatgggggctgacttctatgaaaccgaaagccaaaaagcgtataacgccgaagcgaggattcccaatgtaggaataggccgcgggtcaattatcaaaggggcaatcatcgacaagaatgtccgcataggcgaaggatgccgcatcggcgttgacaatataagccggacagacggcaactacggccattaccatgttgttgacgggatcatagtcattccgaagaatacggtgctctacccgggaacggtgatataa

SEQ ID NO: 51414 - protein, 295 aa, Unknown
  Obtained from environmental sample
  misc_feature (1)..(295): Xaa is any amino acid
MDLKELLKNHIDSGAAITIACTPVNRGEASALGILKIDKNCRITEFMEKPGPTKDITDYRVPPELKVEKKIDGDAYLGSMGIYVFNAKAMDDGLENELTDFGKEVIPQAINNLKVNAYLFDGYWEDIGTIRNFYETNLELTALRPKFDFYDEDRPIFTHRRNLPPSKINFGNMNQSIAAEGCIITNGSITDSIVGIRTIIETGSSLNGVICMGADFYETESQKAYNAEARIPNVGIGRGSIIKGAIIDKNVRIGEGCRIGVDNISRTDGNYGHYHVVDGIIVIPKNTVLYPGTVI

SEQ ID NO: 51415 - DNA, 588 bp, Unknown
  Obtained from environmental sample
  misc_feature (1)..(588): n is a, c, g, or t
ttgggcactgcggtggtgcataccggcaaatacgcggtagtcaacccgttcttcggcgcggagaaacgtttggcacccacggagagctacgtgcgcatctccgacgaggcgatctacgacaggggcgaggtcatgtaccccgacgtcatagcggtattcgccccacaggtgataaccgtcggcaagtcgcactcgataccgttctattcaggactgcgcggcggcggattgatcattgttaattccgaagagcctataatcaatgaaaaaaacatggcggagattgacaaaaccggagcccgtgtgacatacgtcccggccacgaaattggctgtcgatttcgccggaaccgacttggcgacaaacatgacaatgctcggagccctctgcggcctatcgccggatttagttgacttggactcattgttaacggcggtagaggaacgtttcagcggaaagtccaaaatagtaacatcaggaacaaccgcggcgcttgacgaagcaatcaagagcaaatacgacaaagcctcggcgctgattgaaaagaatttggtcgctattaaagaagcgtatgggtatacgaaatag

SEQ ID NO: 51416 - protein, 195 aa, Unknown
  Obtained from environmental sample
  DOMAIN (1)...(170): Pyruvate ferredoxin/flavodoxin oxidoreductase
  misc_feature (1)..(195): Xaa is any amino acid
MGTAVVHTGKYAVVNPFFGAEKRLAPTESYVRISDEAIYDRGEVMYPDVIAVFAPQVITVGKSHSIPFYSGLRGGGLIIVNSEEPIINEKNMAEIDKTGARVTYVPATKLAVDFAGTDLATNMTMLGALCGLSPDLVDLDSLLTAVEERFSGKSKIVTSGTTAALDEAIKSKYDKASALIEKNLVAIKEAYGYTK

SEQ ID NO: 51417 - DNA, 1515 bp, Unknown
  Obtained from environmental sample
  misc_feature (1)..(1515): n is a, c, g, or t
gtgggaaccgtcaccgaaatttacgattactaccgcctgctttacgccagaatagggataccccattgccctgtctgcggcagggagatacgcgaacaaccggtagattccattatagaaagcattttacagatgcctgtgggcacaaggatacaattgctcgcgcctgtaatacgcgggaaaaagggggagcaccagaaaataatcgatgacgcccgcaaggccggtttcgccagggcgaggattgacggggttcccgtggagcttgacgaaagcataaggttggacaagcagaaaaagcacagcgtagacattatcattgaccgccttgtgattgggcctgacatacgtctaaggcttgccgaatccgtggaaaccgccctgcaaacatcagacgggctgttactggtattaagccagaatcccgaaagctcaaacaaaagcatgaccgaaaatttcttttcacagaaaaacgcctgccccgactgcggcgtttcgataccggaacttcaaccccgcctgttttcttttaacaatccttttggagcatgcccaagctgttcagggcttggctccaaactggagtttgatcccgaccttgtcatcccaaacccttcgctttcctttaacgaaggcggcattgtcccctataacccggacagcgcgtggcatcacagccgttttgaaagccttgcgaagcattacaaattcagcctggacacgccgctaaagaccctgcccaaaaaaatcatggacgcgattctgtggggcagcagggatgaaataaaagtccgctacaataaccgggagggcacaggccattttgaataccagtcgaaattccccggagtgctggaagacctgaaacggcgctacctggagacccagtcgccgggcataaaggaatggcttgaaaaattcatgagccagaagcactgcgaagactgcgaaggcaagaggttaaaacccgaggtgctcggcgtgaccgtcgcgggcaagaacatttgggagctttcccggctttccgtaaccgactcgctgaaattttttgagtcggtcaaatttaacaagaatgaaaaaaaaatctcctaccagatattaaaagaaataacggcgcggctgggctttatgcgcaatgtcgggcttgactaccttagccttgagcgcaaagcgtctactctttccggcggcgaggcgcagaggatacgattggcaacgcagatcggatcaagccttgtgggggtgctgtacattctggacgagccgtccatcggcctgcaccagcgggacaaccggcggctcatcgacacgcttttgtacctccgcgatctgggcaacaccctcatcgtcgtggagcatgacgagcagacccttcgcatagctgatcatatagtagatctggggcccggcgcgggcgtgcacggcggcaaggtcgttgcccagggcagccccgaagacgtaatgaaagtgccggaaagcctgacagggcagtacctcgcgggaccctcgccatga

SEQ ID NO: 51418 - protein, 504 aa, Unknown
  Obtained from environmental sample
  DOMAIN (318)...(470): ABC transporter
  misc_feature (1)..(504): Xaa is any amino acid
MGTVTEIYDYYRLLYARIGIPHCPVCGREIREQPVDSIIESILQMPVGTRIQLLAPVIRGKKGEHQKIIDDARKAGFARARIDGVPVELDESIRLDKQKKHSVDIIIDRLVIGPDIRLRLAESVETALQTSDGLLLVLSQNPESSNKSMTENFFSQKNACPDCGVSIPELQPRLFSFNNPFGACPSCSGLGSKLEFDPDLVIPNPSLSFNEGGIVPYNPDSAWHHSRFESLAKHYKFSLDTPLKTLPKKIMDAILWGSRDEIKVRYNNREGTGHFEYQSKFPGVLEDLKRRYLETQSPGIKEWLEKFMSQKHCEDCEGKRLKPEVLGVTVAGKNIWELSRLSVTDSLKFFESVKFNKNEKKISYQILKEITARLGFMRNVGLDYLSLERKASTLSGGEAQRIRLATQIGSSLVGVLYILDEPSIGLHQRDNRRLIDTLLYLRDLGNTLIVVEHDEQTLRIADHIVDLGPGAGVHGGKVVAQGSPEDVMKVPESLTGQYLAGPSP

SEQ ID NO: 51419 - DNA, 1032 bp, Unknown
  Obtained from environmental sample
  misc_feature (1)..(1032): n is a, c, g, or t
atgaggggggtaagcgagcataacctgaaaaatatcaatgtggatattccgctgggtgtgttcacctgcattaccggcgtttccggatcagggaagtcaaccctgctgtccgacgtgctgtacccggcgctggcaaacagggtatacggttcgaaccatcccgaaggaagctataaagatattaaaggcgctgaattaattgacaaggttattgacattgatcagagtcccataggcaggacgccgagatccaacccgattacctatgtcggcgggtttaccgcgataagggacatattcgcgagtctgcccgagtcgaaaatgcggggctacaggccggggcgtttctcattcaatgtccggggcggacgatgcgagaactgcgagggcggcgggacaatcaaaatcgagatgaacttcctgcccgacgtgtatatcacctgcgacgtgtgccagggcaaacgcttcaaccgcgagacccttgacatacggtacaaaggaaagaatatcgccgaagtgctggacatgaccattgaggaggccgcggaatttttcgcccccattccccaggtcgcgcgcaagatgcagaccctgctttcggtggggcttggctatatcaagctcggccagtcagcgctaaccctttcgggcggcgaggcgcagcgcgtcaaactcgccctggaactttccaggcgttccaccggcagcaccctgtatatacttgacgagccgaccacgggccttcatttcgccgatgtcaagcagcttatggatgtaattcagcggctggcggatcagggaaacacggtgataatgatagaacataaccttgatgtgctgttgcaggcggattacattattgatctggggccggagggcggcgacaaaggcggtcaggttgtggcgaccggtacgccggaacaaatagccgccaataccgcttcctatacgggaacgtatataaaagaaatgctggaacgcaccaaaaagcggcgtgaagggccgtgcccaaggcagcgtggttccggatga

SEQ ID NO: 51420 - protein, 343 aa, Unknown
  Obtained from environmental sample
  DOMAIN (19)...(293): ABC transporter
  misc_feature (1)..(343): Xaa is any amino acid
MRGVSEHNLKNINVDIPLGVFTCITGVSGSGKSTLLSDVLYPALANRVYGSNHPEGSYKDIKGAELIDKVIDIDQSPIGRTPRSNPITYVGGFTAIRDIFASLPESKMRGYRPGRFSFNVRGGRCENCEGGGTIKIEMNFLPDVYITCDVCQGKRFNRETLDIRYKGKNIAEVLDMTIEEAAEFFAPIPQVARKMQTLLSVGLGYIKLGQSALTLSGGEAQRVKLALELSRRSTGSTLYILDEPTTGLHFADVKQLMDVIQRLADQGNTVIMIEHNLDVLLQADYIIDLGPEGGDKGGQVVATGTPEQIAANTASYTGTYIKEMLERTKKRREGPCPRQRGSG

SEQ ID NO: 51421 - DNA, 417 bp, Unknown
  Obtained from environmental sample
  misc_feature (1)..(417): n is a, c, g, or t
atgcgctcaggaatttttttttcatccggaaccacgctgccttgggcacggcccttcacgccgctttttggtgcgttccagcatttcttttatatacgttcccgtataggaagcggtattggcggctatttgttccggcgtaccggtcgccacaacctgaccgcctttgtcgccgccctccggccccagatcaataatgtaatccgcctgcaacagcacatcaaggttatgttctatcattatcaccgtgtttccctgatccgccagccgctgaattacatccataagctgcttgacatcggcgaaatgaaggcccgtggtcggctcgtcaagtatatacagggtgctgccggtggaacgcctggaaagttccagggcgagtttgacgcgctgcgcctcgccgcccgaaagggttag

SEQ ID NO: 51422 - protein, 138 aa, Unknown
  Obtained from environmental sample
  misc_feature (1)..(138): Xaa is any amino acid
MRSGIFFSSGTTLPWARPFTPLFGAFQHFFYIRSRIGSGIGGYLFRRTGRHNLTAFVAALRPQINNVIRLQQHIKVMFYHYHRVSLIRQPLNYIHKLLDIGEMKARGRLVKYIQGAAGGTPGKFQGEFDALRLAARKG

SEQ ID NO: 51423 - DNA, 828 bp, Unknown
  Obtained from environmental sample
  misc_feature (1)..(828): n is a, c, g, or t
atgaactcgatatttgaacgcactccgctgcaggaaatgaccgatgtaagcgattgtatgtcggaagcgcaaaaatcggctgttaatgaaattcaaaacctgctcaaacaaatgttaaaaaacgatcatgaactggaattgagcattaaggattatgtcaccgcccacgccgatgtggagcatttaaccgataaacttgaatccgaaggcggttctgttaccatagacacaggcgcggtagacgcggaacttgacaccattcgccaaatggcaaaaatgacaatcgggcggcagggaaaccacttccccgttcttaccgcggaatattatcacagtatgcccagcgaagtagcgacgcgcgaaaatattatcgccatgcttgcgagaatcgaaagtatcgacgccgaggcgttttgccgtatttataaaaacagattaaaccgcattgttccgtatgttcttttaatacccacttacggcgatatgggtttctgctgggaaccgtttgatcgttataaccgtgccacaagccgcggacgcattataattcccatgtaccccaaaaatttatatttggcggttcttaccgcagttgccgatctccgctggcaggtagcgaaagagaaagcgtctttctactggatggaagaaggattaacaggacattattatcagtggttccaggcggcaaaattaaaaggcgacattaaagaatattttatccgcgattatattatgtggatgaccaaagaagcggaaggtattcaaaaacttgagaaagacgttcgcggcactttctggcgttatatgccttttacaaagcagtaa

SEQ ID NO: 51424 - protein, 275 aa, Unknown
  Obtained from environmental sample
  misc_feature (1)..(275): Xaa is any amino acid
MNSIFERTPLQEMTDVSDCMSEAQKSAVNEIQNLLKQMLKNDHELELSIKDYVTAHADVEHLTDKLESEGGSVTIDTGAVDAELDTIRQMAKMTIGRQGNHFPVLTAEYYHSMPSEVATRENIIAMLARIESIDAEAFCRIYKNRLNRIVPYVLLIPTYGDMGFCWEPFDRYNRATSRGRIIIPMYPKNLYLAVLTAVADLRWQVAKEKASFYWMEEGLTGHYYQWFQAAKLKGDIKEYFIRDYIMWMTKEAEGIQKLEKDVRGTFWRYMPFTKQ

SEQ ID NO: 51425 - DNA, 810 bp, Unknown
  Obtained from environmental sample
  misc_feature (1)..(810): n is a, c, g, or t
atggctcccatgggtattacatcgacggaactgcttgacggcagagacagccacggagaatttttacctttaattgccattccaacagaaggaacggacgcttttacggcggcggagtcttttcttgcgatagatccccgcgacaaaatgataaaatccgttacatcgccgattcatctttatgcgtcgataattgttgactgtaatttaataacgatactttcagataatgcgtcgtcggcatatatttttgagggactgtttacggcggtagaggcgtattgttcgtcaaggtcgaattttctttccgacactttattggaaaaggcggtttcctcttatgcaaaattattaaaaaaaggcgcgggtgctcccggcgcggaaactttcgctcatgccggaatgcttttgtccatcggttccgctgtaagttccgccggctttggttcggctcttgccatggcgattaacgcacgctgtaatgtttcaaaaccgcaatgttcgtcggcgcttttccccgtcatcgcggagaggcttgtaagcgcacgccctgaaaaaatggcgaaggttgccggtttgctcggagcgccgaaagcggctacccctgcagacatggcgaaaactgcggtagatacaatccgcaaaaccatgaccgctttagccgtgcctgtcgatcttaaagaacacaatattccgctggatagattcacggcagccgcaaacgccgcgcgtaaattggagcttacggcaaattctgcatggactgtatctgaagacgaagtatttaacattttaaagcagattttgtag

SEQ ID NO: 51426 - protein, 269 aa, Unknown
  Obtained from environmental sample
  misc_feature (1)..(269): Xaa is any amino acid
MAPMGITSTELLDGRDSHGEFLPLIAIPTEGTDAFTAAESFLAIDPRDKMIKSVTSPIHLYASIIVDCNLITILSDNASSAYIFEGLFTAVEAYCSSRSNFLSDTLLEKAVSSYAKLLKKGAGAPGAETFAHAGMLLSIGSAVSSAGFGSALAMAINARCNVSKPQCSSALFPVIAERLVSARPEKMAKVAGLLGAPKAATPADMAKTAVDTIRKTMTALAVPVDLKEHNIPLDRFTAAANAARKLELTANSAWTVSEDEVFNILKQIL

SEQ ID NO: 51427 - DNA, 1896 bp, Unknown
  Obtained from environmental sample
  misc_feature (1)..(1896): n is a, c, g, or t
atggtcagttttaccccacgcgagtttaacttcagcgaaaacgacggcacttcgcggatgtaccagtcggtgcagagcatgggcgggaacgggctggcggacatcctgataaccgacggcaatgacatagtggtaacggagggaagccgccgagggtttgccgggagctaccgcataaaagggattaaggacattagccgcaattccgaccatacagccgtgtttggagggtcggcaggaccgggcggcgggatccagaaggggattacgggtttcggcaaggttaagttcataaccgtgaacggtaccggcaacagccatgcggacgggaccaccagccaggccgccgggttcgtcgacgtgaacggggacggccttcccgattacgtgaacggcgggacggtcaccctgaatttaggcagggaagaatggggcggcggggggaccggcttttccgggctggcgctgaacgagggtgttacggagacgatagccgtttcgatgtcgctcgcgggccctggcattaatatcggtgacgcggacaagggcaattacgcgggattcaacgcgggcgtcggcggcggggtgagctactcggcgacaatgatggaaaccggttccatgctgatagacataaacggggacgggctgccggacatggccagcgcggagggcggggtcatgcgggtcaggttcaacctgggcgaccgttttgaggaagaggcggtcccgtttgccatgcccgactggcaccttgacccttttaacgaggcccctttattttcaaagacggccgacggcaccatgatggtaggagtgtttgaagaaatgcccctgctggggagcatactgggatggaccggactgggcggcatgttctccccgggcggttccacggtaaacccgttcgggaggggcattgaagaacacctcaaaaagctggagacgacttcgaccatatcggccaacgtaagcctgagcgtgaacatcggcggcaatctcaagattacactgtttccgccggtttacagcgtgaacgtcacgctgggcgccggcgggggctttaactcgggcgcgaacctcagcggagtgaccatgaggctgacggacatggacggcgacgggcaacctgaccgggtactgcgggtgcccggaaccgattacatttatgtgcagcgcaacctttcgggcagggtgggccttttgcggaaaataagcctgccccagggcggggaatacgcgcttgattacacttgggagcggggaacccgcgaaatgccgcaaagccgctacgtgctgtcggatgtcgtcaaacgcgacaacagcggcaaaaacgggctgagaaacccggggttccaaagcgcccgcgagtacgcggcgcgctattcctacgcggacgggtattacgaccgcggggaaaaagaattctacggtttcaaacaggtaattacacaggcggtggacggccgggggcggacgctgggcgagacggtgacggagtattataccgacgcctaccacctgcggggcatggtgcataaggtcacggcaaaagacgaacgcggcaacgttttgcgcagtgcggaatacactgcggacgccgcgccctacgcgcgcaacgtcggcgaaacctcgtacgtatatgaattaatacaggaagggccgcccgtcaccgcgagcgccgggtatgagtacgacagatacgggaacgtgacgcggctggaggaaagggcgagcgggagcgaaacaataaccgcggagatacggtactgggacaacgacagcccgtacctgcacgcgcacccgcgtgaaataacggtgcggggctcggaatcgggcctgctgcgcaagcgggccgggggatacgaccccgccaccggcgcgcttataagctga

SEQ ID NO: 51428 - protein, 631 aa, Unknown
  Obtained from environmental sample
  misc_feature (1)..(631): Xaa is any amino acid
MVSFTPREFNFSENDGTSRMYQSVQSMGGNGLADILITDGNDIVVTEGSRRGFAGSYRIKGIKDISRNSDHTAVFGGSAGPGGGIQKGITGFGKVKFITVNGTGNSHADGTTSQAAGFVDVNGDGLPDYVNGGTVTLNLGREEWGGGGTGFSGLALNEGVTETIAVSMSLAGPGINIGDADKGNYAGFNAGVGGGVSYSATMMETGSMLIDINGDGLPDMASAEGGVMRVRFNLGDRFEEEAVPFAMPDWHLDPFNEAPLFSKTADGTMMVGVFEEMPLLGSILGWTGLGGMFSPGGSTVNPFGRGIEEHLKKLETTSTISANVSLSVNIGGNLKITLFPPVYSVNVTLGAGGGFNSGANLSGVTMRLTDMDGDGQPDRVLRVPGTDYIYVQRNLSGRVGLLRKISLPQGGEYALDYTWERGTREMPQSRYVLSDVVKRDNSGKNGLRNPGFQSAREYAARYSYADGYYDRGEKEFYGFKQVITQAVDGRGRTLGETVTEYYTDAYHLRGMVHKVTAKDERGNVLRSAEYTADAAPYARNVGETSYVYELIQEGPPVTASAGYEYDRYGNVTRLEERASGSETITAEIRYWDNDSPYLHAHPREITVRGSESGLLRKRAGGYDPATGALIS

SEQ ID NO: 51429 - DNA, 942 bp, Unknown
  Obtained from environmental sample
  misc_feature (1)..(942): n is a, c, g, or t
ttgatgataaaacctgtatctgtggcggcgctgcccgtcgcggagaacttcattatacaaaagaaccgcatcgagaacaacgcggcggccggcagtaagcgcgtctgcgtcgttacggggactcacggcgacgaacttgaggggcagtatgtctgtgcgcggttggcgaagattctttccgacgggaaagacaagctgtcgggcattgtggacatatatcccgccgtaaacccgctggggatcgataccattacacgcggctttccgatgttcgatctggacatgaaccgtatattccccggctcgtcgtcggggtcgctggcagaggtcgcggcgcacgacgttatccgcgacatagacggcgcggatatgtgcatagacatacattcaagcaacatttttttacgcgagataccgcaagtacgcgtaagcgaacaaacagcagccgaattgttgccttatgctgtgatgctcaacgtagatctcgtatggatacacgcatcggctacagtgctggaatcaacacttgcacacacactcaacacacatggagttaagactctagtggttgagatgggtgttggaatgcgtatcacggagaactattgcacacaactcgttgatggcatactgaatttgctacacgaacttggaatgtggaatgggcaaacagggcaagtgcgagagccgctagtttcaaaggatcatcgcatagattttctgaactcagatgcgcacgggatatttattccgggtgccgtgcatggtagccatgtaaacgccggcgactgtattggcaaagtaatagacccactcgtaggtgttgttgttgaagaaacgcttgcaccgtgtaatggcttattgtttacgctcagggaatatccggttgtattcggaggttcacttctagcacgaatcataggagacttagataatggataa

SEQ ID NO: 51430 - protein, 313 aa, Unknown
  Obtained from environmental sample
  DOMAIN (31)...(309): Succinylglutamate desuccinylase / Aspartoacylase family
  misc_feature (1)..(313): Xaa is any amino acid
MMIKPVSVAALPVAENFIIQKNRIENNAAAGSKRVCVVTGTHGDELEGQYVCARLAKILSDGKDKLSGIVDIYPAVNPLGIDTITRGFPMFDLDMNRIFPGSSSGSLAEVAAHDVIRDIDGADMCIDIHSSNIFLREIPQVRVSEQTAAELLPYAVMLNVDLVWIHASATVLESTLAHTLNTHGVKTLVVEMGVGMRITENYCTQLVDGILNLLHELGMWNGQTGQVREPLVSKDHRIDFLNSDAHGIFIPGAVHGSHVNAGDCIGKVIDPLVGVVVEETLAPCNGLLFTLREYPVVFGGSLLARIIGDLDNG

SEQ ID NO: 51431 - DNA, 2031 bp, Unknown
  Obtained from environmental sample
  misc_feature (1)..(2031): n is a, c, g, or t
gtgagcttagggtttgagcggccgcttgtcgcggttgcggcgtttattgttattcctcttgcctggtatatcctctcaaaattaaagaatccgtttgttacatacgttcctcttggcgcgccgggcggggcttcttttaaatcacagcagatgggcgggcttgttaaattgctgaaatttctggaagtattggggctctttttgcttttctttacggcggcgggacctgttacaaaaaagacggaaaccgtttggcttaacaggggagcggatataatttttgtgttagacgtaagcccaagtatggcggcgctggatatggacgggaataaccgctatacggcggcgaaaaatttaattattgagttcgcgcaaaagcgcccttccgataatataggtcttacggcggtgggaagcgacgcagtccttcttctcccgccgaccacagacagggacgccctttacgcgcggctggaaatgctgcgtataggtgaaatgggagacggaaccgcgcttggaacgggtcttgccgccgccgcttaccatcttgataaatcaaacgcgaaacgcaaaatagcggttcttattacggacggcgaaaacaacgccggcgcgattcatcctgaagccgccgcggctatgttacacgaaataggcatatcgctgtgggtaataggcattgggtcggcgggagaagtccctatagattaccttgatcctttcacaaaagtccgcaggacaggccgtttcgattcgcgctttaacattgaaagcctgcgccgcctgagcattgccggcggcgggacttttatttacgctcctacagccggcagtttcgcatccgccttttcaaaattggacgaaggcgaaataacagtgcaaatatcacgcctgataaaccgaagacattcggtatcaatttattatttaattcccgcagtcatgcttacggcggcgatttggctgctcaggcggtctctctacaaaaacaacataagcgaggctcttggaaaaaaaatgagagcctccgcggccttcttctttttatttgccgtatttgccattatcgcagttttaaatccaaagtggggaactcaattaaccgtctccgaataccgccgcggactggacgcggtctttgccattgatgtttcgcgcagcatggatatcaacgacgcgaaagaagactcgcttaacagcgcacagtacagcgcgcaaggaggcggtgaattgtcgcgccttaaacgcggcattcaaatcgctgaggaaacaataaaaacggcttccggcgcgcgctttgccgccgccataggcagaagcagggggtatttgtccgttccgctcacatgggacagcgaagcgccgttaagttttcttcacgcgcttgacacggcttccatgactggcaggagcaccaatctggaagcgcttgtagaagcggcggcggacgcctttcaggagtcgtctccggcaaaaaaagtgatcattcttgtttcggacggcgaggcgctgggcggcgttctcggaaacgcgcttaacaggtgcataagagaggacatcattgtaaacacagtcgctctgggcagcgacagggggcggcccgttccgcagtattccggcagcgcggaaatacccgccgctgtcagccggagagacgcagccgttatgcgcatggccgcagagaagacgggcggaatttacatagacggcagccgcgacgacgccgcaactgttctttcaaaccacctgctttccgtttcccagcagacaggcgccgggagcagccggaacgagccgaaagaacggcgttcattgtttgtaattctggcgattatagcttacggtctttcaaaatttatcccgcttcttcccggcattccgcttataccgttagccgcaattattttcatgtttacttcctgctctgaaggcaaactgcttcttctggaagcgaattatctgcaaacgcgcggcaggtacgacgaagcgcttttacgttacatgaaagcgcagctnncgtgccgaatttga

SEQ ID NO: 51432 - protein, 676 aa, Unknown
  Obtained from environmental sample
  DOMAIN (91)...(286): von Willebrand factor type A domain
  misc_feature (1)..(676): Xaa is any amino acid
MSLGFERPLVAVAAFIVIPLAWYILSKLKNPFVTYVPLGAPGGASFKSQQMGGLVKLLKFLEVLGLFLLFFTAAGPVTKKTETVWLNRGADIIFVLDVSPSMAALDMDGNNRYTAAKNLIIEFAQKRPSDNIGLTAVGSDAVLLLPPTTDRDALYARLEMLRIGEMGDGTALGTGLAAAAYHLDKSNAKRKIAVLITDGENNAGAIHPEAAAAMLHEIGISLWVIGIGSAGEVPIDYLDPFTKVRRTGRFDSRFNIESLRRLSIAGGGTFIYAPTAGSFASAFSKLDEGEITVQISRLINRRHSVSIYYLIPAVMLTAAIWLLRRSLYKNNISEALGKKMRASAAFFFLFAVFAIIAVLNPKWGTQLTVSEYRRGLDAVFAIDVSRSMDINDAKEDSLNSAQYSAQGGGELSRLKRGIQIAEETIKTASGARFAAAIGRSRGYLSVPLTWDSEAPLSFLHALDTASMTGRSTNLEALVEAAADAFQESSPAKKVIILVSDGEALGGVLGNALNRCIREDIIVNTVALGSDRGRPVPQYSGSAEIPAAVSRRDAAVMRMAAEKTGGIYIDGSRDDAATVLSNHLLSVSQQTGAGSSRNEPKERRSLFVILAIIAYGLSKFIPLLPGIPLIPLAAIIFMFTSCSEGKLLLLEANYLQTRGRYDEALLRYMKAQLXCRI

SEQ ID NO: 51433 - DNA, 600 bp, Unknown
  Obtained from environmental sample
  misc_feature (1)..(600): n is a, c, g, or t
atgcagacaaaagcacctgtaaaaaaagcaaaaaaaccctctcgtaaaaccaaaggtatgcaaacctctggtatgaaactcgtcagaaagacagttaaaaaatccgtaaaaaaaataacttgggatgaaataaaggaaggtttcaaggaaattcatcaagcaaacaaagaacttcatgacagcatttttggcagtaaaaacacatttgactcttttgttgagcaattaatgtctcccgacattctccagaaattcaggaaattcggcttttcttttaacatattaaaaaaaataaaattcgctcaagatgtatatgctgaaattgacgctctgtttgataatggcatacaggccgttgtagtgaaaataaccacccccttattacaagcggacatagacgaccatattttacgcatggaaaaggtacgtaaacacgctgatgaatacaatgacaaaagacaattcatgggcgctatagccgccacgattactgataaatccaccagagaatacgccttanaaaaagggctttttgtcatagaaccaagcggcgaagatgtcaaagttacaaaacctacggttgaaccgcgggtttggtga

SEQ ID NO: 51434 - protein, 199 aa, Unknown
  Obtained from environmental sample
  misc_feature (1)..(199): Xaa is any amino acid
MQTKAPVKKAKKPSRKTKGMQTSGMKLVRKTVKKSVKKITWDEIKEGFKEIHQANKELHDSIFGSKNTFDSFVEQLMSPDILQKFRKFGFSFNILKKIKFAQDVYAEIDALFDNGIQAVVVKITTPLLQADIDDHILRMEKVRKHADEYNDKRQFMGAIAATITDKSTREYALXKGLFVIEPSGEDVKVTKPTVEPRVW

SEQ ID NO: 51435 - DNA, 597 bp, Unknown
  Obtained from environmental sample
  misc_feature (1)..(597): n is a, c, g, or t
atgattgatcccaattacgcggaagctttctataatcggggctgtgcatatcagaagaatggaaactatgatcaggctgttgcggactacaatgcggcgttaaaaataaatcccgcttttgcacaggcatacaccaaccgcggattactatatgccaataaagaaaattacgctcaggctataaaagattataatgaggcgctgaaaataaatcctgactttgaagaggcatatacaaacaggggaagcgcatataacattatgggaaattatgatcaggctatcaaagactgtaatacggcgttgaaaataaaccctgataacgtgtgggctttttttattcgagaaattgcatatatgcaaaaaggcaattatgaccgcgctattgaggattgtaatgcgaaaattaaaattgcacctgaccttgctattgccttttacgctcgcggattagcgtattactataaagacgattattacaataaagaaaataatgatcgtgccattgcggatcttagagaggcgttaaggctaggtcatacagacgcaaaagaagatctggaacaggcgctacaagcgcggaaagaaaaccggtaa

SEQ ID NO: 51436 - protein, 198 aa, Unknown
  Obtained from environmental sample
  DOMAIN (75)...(108): Tetratricopeptide repeat
  misc_feature (1)..(198): Xaa is any amino acid
MIDPNYAEAFYNRGCAYQKNGNYDQAVADYNAALKINPAFAQAYTNRGLLYANKENYAQAIKDYNEALKINPDFEEAYTNRGSAYNIMGNYDQAIKDCNTALKINPDNVWAFFIREIAYMQKGNYDRAIEDCNAKIKIAPDLAIAFYARGLAYYYKDDYYNKENNDRAIADLREALRLGHTDAKEDLEQALQARKENR

SEQ ID NO: 51437 - DNA, 1002 bp, Unknown
  Obtained from environmental sample
  misc_feature (1)..(1002): n is a, c, g, or t
ttggtgttttccctgaccataagcgtttatgagctgcggcaggacgggcaattctggccaatggtcataaagaacctccttttgatcaccggcatttcaatgctggtaatttgcattggggttctcgccactatcgctttcccccccgcgagaattcccgttatggccgaagaacagcttgatgttatccggcttgaaaccgtcagaaatatcaaagacctttttccctccaatatgctcagcgtccttgccggagagggcgtgtacctgtttcccgtatacgtgtttgcttttttccttggcatggggctttcctatgacaaaagctacagcaagccgattatttccataaccgattccctttcgcgtatcttcttccatatctcgtcgttctttatcgagattcttggcttcataatgattgtgctttcggcttactggatggtccgttttaagggtgttttgcaggcgggcatttttcttgacctggtatgtttgctgggggttatcgccgttgtgcttggttttgggattcttccgctgtttctctatattataaaaccaaaaatgaacccctggacaacgctgtacggatcgcttggcccggcaatagcggccttcttttccggcgatataaactttacgctgccggtactgatacggcacaccaaagaaaatttcggcgtaaggcgaaggagcaatgccgtcagcgtggcgctgtttagttctttgtgccgcgccggaagcgcgatggtcgcggccgtcgcctttatcgtcatttttaaatcctactccagcctggggataagtttttcacaagtcatgtcgatcagcgtccgcgcgtttatgatttcttcctgcttgcccgccatcccggcgacggggcattcacggctcttaccgtgctttgtctcggttatggccagggttttgaggccggctgccttatcctcaagccgatggcgttcttccttatcgccgtgggcactttccttgacgtga

SEQ ID NO: 51438 - protein, 333 aa, Unknown
  Obtained from environmental sample
  misc_feature (1)..(333): Xaa is any amino acid
MVFSLTISVYELRQDGQFWPMVIKNLLLITGISMLVICIGVLATIAFPPARIPVMAEEQLDVIRLETVRNIKDLFPSNMLSVLAGEGVYLFPVYVFAFFLGMGLSYDKSYSKPIISITDSLSRIFFHISSFFIEILGFIMIVLSAYWMVRFKGVLQAGIFLDLVCLLGVIAVVLGFGILPLFLYIIKPKMNPWTTLYGSLGPAIAAFFSGDINFTLPVLIRHTKENFGVRRRSNAVSVALFSSLCRAGSAMVAAVAFIVIFKSYSSLGISFSQVMSISVRAFMISSCLPAIPATGHSRLLPCFVSVMARVLRPAALSSSRWRSSLSPWALSLT

SEQ ID NO: 51439 - DNA, 2019 bp, Unknown
  Obtained from environmental sample
  misc_feature (1)..(2019): n is a, c, g, or t
atgcaggtgctgtcccggcgcaccaagaacaaccccatactgataggcgaacccggcgtaggcaagacagccattgtggagggtcttgcgcggcgcatagtcgccggggacgtgccggaaggcctaaaagacaaaaagctccttgcgctggatttgggccagcttgtcgcggggacaaagttccggggcgaattcgaggagcgcctcaaggcgctgatacacgaggttcagtccgccgaagggaagataatcctttttattgacgagctgcataccctggtcggggcgggcgccgcggaaggggcgaccgacgcttccaacctgctcaagcccgctctggcgcggggagaactgcgctgcataggcgccaccacgctggacgaataccgcaagcacattgaaaaagacgcggctctggaacgccgcttccagcaggtgtataccgccgagccctcggttgaggataccatcgcaatattgcgggggcttaaagaacgctacgaggtgcaccacggcgtgcggattaaagacgaggcgctggtcgccgcagcaacgctgtccagccgttatataaccagccgctttatgccggacaaggccatagaccttgttgatgaggcggcgagccgcctgaaaatggaactggacagccgccccacggaattggacaaactcgagcgcaaactgctgcagttttctattgaaaaacaggcgctttcccgcgaggaagatcccgcgtcaaaagaacgcctcgccaaactggaaaaagaaatcgccgatatttcggcggaacgcaatgccatgaaagcccgctgggaagctgaaaaagttgacatacagggcatacgtgaattaaagcagagaatcgaagaattaaaaatagaagaaacccgttacgagcgtgaaggaaatcttttaaaagccgccgaagtaaagcacggaaaaattcccgaagcccagaaacagcttgccgcgctcgcgaaccttatggaaaagaaacgggaacaagcgggatgctcaggcggagcggctttgcttagggaagaggtaagcgaggaggacattgccgccgtggtatcagcatggacggggattccggtttccaagatgctctccggcgaaatgcagaaataccttgaactggaaaaagctctggaacggcgtgtagtcggtcaggatcaggcgcttgccgcggttgctgatgcgatcaggagaaacaaggccggactctccgatgccgcgaagcctttgggcagcttccttttcctgggacctactggcgtgggtaaaacggaattggcaaagacccttgcggactttttattcaatgacgagaaagcccttgccagaattgacatgagcgagtacggagagaaacattcggtcagccgccttataggcgcgccgccgggctatgtgggctacgaacagggaggccaacttaccgaaattgtgcgcaggcgaccctacagcgtggttctttttgacgaaattgaaaaagcacacccggaagtgtttaatgtttttttgcagatcctcgacgacgggcgacttacagacggacagggccgtattgtggatttcaaaaatgttataatcattatgacaagcaacatcggctctgatttaattcttgaagaagaaaataccggtacaataagggattcacttttggaattgctcaagcgtaatttcaggccggagttcctcaaccgcattgacgagacggtgatcttcaaccggctgggcaaaaacgaaatcggcaaaatcgttgacattcagcttgatcgtctggcgcggcggatggccgaacgcaagattacgcttaacatatcagacgcggcaaaagaattccttgccgagcgtggctatgatcccatgtatggcgcgcgtccccttaaacgggcgatacaggcggaactggaaaaccccctggcaaaactcgtcatctccggaaagattcgcgaaggcgatgctgtcactgcggacaggaaagacggggaactggtttttaaatag

SEQ ID NO: 51440 - protein, 672 aa, Unknown
  Obtained from environmental sample
  DOMAIN (372)...(611): Torsin
  misc_feature (1)..(672): Xaa is any amino acid
MQVLSRRTKNNPILIGEPGVGKTAIVEGLARRIVAGDVPEGLKDKKLLALDLGQLVAGTKFRGEFEERLKALIHEVQSAEGKIILFIDELHTLVGAGAAEGATDASNLLKPALARGELRCIGATTLDEYRKHIEKDAALERRFQQVYTAEPSVEDTIAILRGLKERYEVHHGVRIKDEALVAAATLSSRYITSRFMPDKAIDLVDEAASRLKMELDSRPTELDKLERKLLQFSIEKQALSREEDPASKERLAKLEKEIADISAERNAMKARWEAEKVDIQGIRELKQRIEELKIEETRYEREGNLLKAAEVKHGKIPEAQKQLAALANLMEKKREQAGCSGGAALLREEVSEEDIAAVVSAWTGIPVSKMLSGEMQKYLELEKALERRVVGQDQALAAVADAIRRNKAGLSDAAKPLGSFLFLGPTGVGKTELAKTLADFLFNDEKALARIDMSEYGEKHSVSRLIGAPPGYVGYEQGGQLTEIVRRRPYSVVLFDEIEKAHPEVFNVFLQILDDGRLTDGQGRIVDFKNVIIIMTSNIGSDLILEEENTGTIRDSLLELLKRNFRPEFLNRIDETVIFNRLGKNEIGKIVDIQLDRLARRMAERKITLNISDAAKEFLAERGYDPMYGARPLKRAIQAELENPLAKLVISGKIREGDAVTADRKDGELVFK

SEQ ID NO: 51441 - DNA, 390 bp, Unknown
  Obtained from environmental sample
  misc_feature (1)..(390): n is a, c, g, or t
gtggtgcacctcgtagcgttctttaagcccccgcaatattgcgatggtatcctcaaccgagggctcggcggtatacacctgctggaagcggcgttccagagccgcgtctttttcaatgtgcttgcggtattcgtccagcgtggtggcgcctatgcagcgcagttctccccgcgccagagcgggcttgagcaggttggaagcgtcggtcgccccttccgcggcgcccgccccgaccagggtatgcagctcgtcaataaaaaggattatcttcccttcggcggactgaacctcgtgtatcagcgccttgaggcgctcctcgaattcgccccggaactttgtccccgcgacaagctggcccaaatccagcgcaaggagctttttgtcttttag

SEQ ID NO: 51442 - protein, 129 aa, Unknown
  Obtained from environmental sample
  misc_feature (1)..(129): Xaa is any amino acid
MVHLVAFFKPPQYCDGILNRGLGGIHLLEAAFQSRVFFNVLAVFVQRGGAYAAQFSPRQSGLEQVGSVGRPFRGARPDQGMQLVNKKDYLPFGGLNLVYQRLEALLEFAPELCPRDKLAQIQRKELFVF

SEQ ID NO: 51443 - DNA, 1032 bp, Unknown
  Obtained from environmental sample
  misc_feature (1)..(1032): n is a, c, g, or t
ttgaacagtatgccgcgaaactggaggatgaacttccccaggagattattgaacgggacaactgttatccaagccgccgccatcaaggccattcattttcccgcttctcttgcggaattggaactcgcaaagaaaactttaatttatgaagaattattttatcttgaggttatggtgggaaaaagggcagtcgagagaaagggactagggactagggaacagggaacaggggtagttgtttctgagcgtagcgagttaccattacgatcagatggcaaacaacaatccccactccctactccccactccccactttcctcccctttacaacaacgcttacttgagcgtctgccattctcgctgacacttgggcaacaagaagccatcgctgaaattaacgcggatatggccggtaatccgccgcattactccatggcgcgtcttttgcagggtgatgtcggttccggtaaaacgctggtgtcttttttggcggcattgcgggcggcggaaaacggcggacaaacggcgcttatggcgccgaccgaactgcttgcccgccaacacgcggaaaatgccgcccgcctgcttgaacccttgggactgcggatcgcgtacctcaccggaaacataaaagcggcgggcagaaaagacctgttgcaacatttggcgtcaggtgaaattgacattgccgtgggaactcacgcccttttttcaaaagatgtcagttataaaaatttgcggctggtggtggtggatgaacagcaccgctttggcgttactcagcgttcccttattatggcaaaaggaaacaatccccacctgttaatgatgagcgcaacgcccattccccgcacccttgccctgaccgtgtttggcgacatggacgtttcggttatccgtgacctgccgccgggcagaaagccggttatgactcatctggcaaaagaatccagtgaggctcgtgtgtatgattttgtgacgcaagaaacaagaggccggctgtcaggcgtatttggtgtatccgctagttga

SEQ ID NO: 51444 - protein, 343 aa, Unknown
  Obtained from environmental sample
  DOMAIN (118)...(283): Type III restriction enzyme, res subunit
  misc_feature (1)..(343): Xaa is any amino acid
MNSMPRNWRMNFPRRLLNGTTVIQAAAIKAIHFPASLAELELAKKTLIYEELFYLEVMVGKRAVERKGLGTREQGTGVVVSERSELPLRSDGKQQSPLPTPHSPLSSPLQQRLLERLPFSLTLGQQEAIAEINADMAGNPPHYSMARLLQGDVGSGKTLVSFLAALRAAENGGQTALMAPTELLARQHAENAARLLEPLGLRIAYLTGNIKAAGRKDLLQHLASGEIDIAVGTHALFSKDVSYKNLRLVVVDEQHRFGVTQRSLIMAKGNNPHLLMMSATPIPRTLALTVFGDMDVSVIRDLPPGRKPVMTHLAKESSEARVYDFVTQETRGRLSGVFGVSAS

SEQ ID NO: 51445 - DNA, 606 bp, Unknown
  Obtained from environmental sample
  misc_feature (1)..(606): n is a, c, g, or t
ttggccccgcgcgtggttccaaaacttgcgcggctgggcatacaaaatacagcgggtctgctctgccactacccccgcgattgggaagaccggacgatcaatgtccccattagtgaatttcaatccaggccagtctgcaccgaagttacggtaatagcccgcgactggatctgctttggcagaacgcggacacccaaagtatatgttgaggatgaaagcggcagggcggcgcttctgtgttttaaccgtccctggctggataaacaactggcgcacggcaagcgctttcgtctgtggtgccgtttttattacaagtacggtgaaattcaatccatctcttttgagatagaagcgctgtcaacaacggagagcgcgaactccgggagtatacttccggtttatcccctcagcgccggactgaatcaaacaatgctccgccgattggtaaacaacgcccttgaacagtatgccgcgaaactggaggatgaacttccccaggagattattgaacgggacaactgttatccaagccgccgccatcaaggccattcattttcccgcttctcttgcggaattggaactcgcaaagaaaactttaatttatga

SEQ ID NO: 51446 - protein, 201 aa, Unknown
  Obtained from environmental sample
  misc_feature (1)..(201): Xaa is any amino acid
MAPRVVPKLARLGIQNTAGLLCHYPRDWEDRTINVPISEFQSRPVCTEVTVIARDWICFGRTRTPKVYVEDESGRAALLCFNRPWLDKQLAHGKRFRLWCRFYYKYGEIQSISFEIEALSTTESANSGSILPVYPLSAGLNQTMLRRLVNNALEQYAAKLEDELPQEIIERDNCYPSRRHQGHSFSRFSCGIGTRKENFNL

SEQ ID NO: 51447 - DNA, 594 bp, Unknown
  Obtained from environmental sample
  misc_feature (1)..(594): n is a, c, g, or t
atgagggcggaactttccggcctgcatctgcgccttaacgcgaccataatctatgtcacccatgaccaggtggaagccatgaccatggcgagtaagatcgtcgtcatgaaggatggaagaatacagcagattggaacgcccctgtatctgtacaacaatcccaccaacaaattcgtcgccggattcatcggctctccgccaatgaacttcctcaccgtaagggtactggaagaaggcagctcaattgtgctggatgaagggtcgttcaaggttaaggcggatccgtctcacgttccccacctgaaatcgtatgtgggcaaagaaatattcttcggcattcgccccgaggatatgaactatgcggaatccggcggggacaacagctttgccacaaaagtaaccgtggtcgagccgctgggcgcggatatccacctttggcttgctaccggtatgcagcaacccctggttgcccgcaccgagccgaaccacgtgttcacggtcggcgagactgccagattcattcccaagatggaaaaggcccgctattttaacagggaaaatgaagaagccatcctgcccggaccctcaaaataa

SEQ ID NO: 51448 - protein, 197 aa, Unknown
  Obtained from environmental sample
  DOMAIN (123)...(182): TOBE domain
  misc_feature (1)..(197): Xaa is any amino acid
MRAELSGLHLRLNATIIYVTHDQVEAMTMASKIVVMKDGRIQQIGTPLYLYNNPTNKFVAGFIGSPPMNFLTVRVLEEGSSIVLDEGSFKVKADPSHVPHLKSYVGKEIFFGIRPEDMNYAESGGDNSFATKVTVVEPLGADIHLWLATGMQQPLVARTEPNHVFTVGETARFIPKMEKARYFNRENEEAILPGPSK

SEQ ID NO: 51449 - DNA, 576 bp, Unknown
  Obtained from environmental sample
  misc_feature (1)..(576): n is a, c, g, or t
atgtcggttcacngtttttccaaaaacctcaccgatcaagcggggattctgatagcctgtaccctgctgttggtattgatttacgcgtccatccgctttaagccgcaatacgccattggcgcggtacttggcattatccatgactgccttgttataacatcctttgttgtctggaccagaatggaattcaacaccaccaccatcgccgccattctcacgatactcggttattcgatcaacaacactattgttattttcgacaggatgagggaaaaccgccgcctttaccccgaagatgtttttgtaaccatacttaatcgttccctgacggaaacgctgagcagaacaattataacaacattaacaaccatgctggcagtcgtttccctgttcatctttacaaccggttccatgaaggattttgccctggccctgcttgtgggccttgtctcaggcgtttatacgacaactttcattgctaccggctttgtgtatctctgggataaagaaaaagtaaaacgggcgaagaaaaagattgttgcgcctgcggctaaagccgcgcttgcaaaagcgtaa

SEQ ID NO: 51450 - protein, 191 aa, Unknown
  Obtained from environmental sample
  DOMAIN (2)...(170): Protein export membrane protein
  misc_feature (1)..(191): Xaa is any amino acid
MSVHXFSKNLTDQAGILIACTLLLVLIYASIRFKPQYAIGAVLGIIHDCLVITSFVVWTRMEFNTTTIAAILTILGYSINNTIVIFDRMRENRRLYPEDVFVTILNRSLTETLSRTIITTLTTMLAVVSLFIFTTGSMKDFALALLVGLVSGVYTTTFIATGFVYLWDKEKVKRAKKKIVAPAAKAALAKA

SEQ ID NO: 51451 - DNA, 489 bp, Unknown
  Obtained from environmental sample
  misc_feature (1)..(489): n is a, c, g, or t
gtgaccgtatggtcaaaaattttttccaatgaaaccgccgttgaattcggcatagaaaaagcggactacgccattgacgccattgacacatttccccataaactcgatttgattgagtttttattcaacgcgggagttacatttttttcgtcaatgggaatggcatgtaaaatggatccaacccgcattaaaaccggcagtatatgggaatccaggggctgcgctctggcaaggctggtacggcagcgtttacgtacacgcggctttaccggcgactttaccgtggtgtacagcgacgaaccgccggttaacgccggacagaacccggcggtgcaagacacagacaaaggcgattctgcagataagaaaagaatcaacggcagttgtgtcaccgttaccgcgccggcgggcatggcgctggcaagccttgtgttacgcgacattgcgggccagggcccggcgggtaaaggccagacggagaagcgatga

SEQ ID NO: 51452 - protein, 162 aa, Unknown
  Obtained from environmental sample
  misc_feature (1)..(162): Xaa is any amino acid
MTVWSKIFSNETAVEFGIEKADYAIDAIDTFPHKLDLIEFLFNAGVTFFSSMGMACKMDPTRIKTGSIWESRGCALARLVRQRLRTRGFTGDFTVVYSDEPPVNAGQNPAVQDTDKGDSADKKRINGSCVTVTAPAGMALASLVLRDIAGQGPAGKGQTEKR

SEQ ID NO: 51453 - DNA, 741 bp, Unknown
  Obtained from environmental sample
  misc_feature (1)..(741): n is a, c, g, or t
atgagccagaggtttatgcgaaaggcaagccctgtcgccgtaatacagaaattaacgataaaagcggtgatggaacggaatctgatccgcgacaacgacaggatactcatagcggtatcgggcggcaaggattccaccgtgcttgcctgggcgctttcttcgatacgcccagcggtaaaggcagattacgaacttgccgccattcacatttccaccgatttttgctcctgctgtaaaaaatcaatactctcacagcggcttgaagaatggggcatacccttcaacgacctctttgtgcccgtcatcggcaggctaaaagaaggcgaaaaaatgaactgctactggtgttccacgcagcgccgcgccgaactgctaaagtacgcggttgaaaatggttttaacaaaattgcgctggggcatcatcttgacgacattatcgaaacttttttcatgaacctttgcgccaaagccgaaatcagcgccatgcccattctgctcaattaccgcaagttccccgtcagccttatccgcccgcttgcatacattgaagaaaggcaggtcatcgcgtgcgccgacgcgcagaacatcctcaaggcggcctgcacctgcccctacggaatcaactccaagcgccgcgacatgcgccagcgcataacggccttaaccggcaactccggcgcggttaagcggcgcatactaaaggcgttggcaaacggggagcgggactttttaacggagtaa

SEQ ID NO: 51454 - protein, 246 aa, Unknown
  Obtained from environmental sample
  DOMAIN (34)...(238): PP-loop family
  misc_feature (1)..(246): Xaa is any amino acid
MSQRFMRKASPVAVIQKLTIKAVMERNLIRDNDRILIAVSGGKDSTVLAWALSSIRPAVKADYELAAIHISTDFCSCCKKSILSQRLEEWGIPFNDLFVPVIGRLKEGEKMNCYWCSTQRRAELLKYAVENGFNKIALGHHLDDIIETFFMNLCAKAEISAMPILLNYRKFPVSLIRPLAYIEERQVIACADAQNILKAACTCPYGINSKRRDMRQRITALTGNSGAVKRRILKALANGERDFLTE

SEQ ID NO: 51455 - DNA, 519 bp, Unknown
  Obtained from environmental sample
  misc_feature (1)..(519): n is a, c, g, or t
atggtacattccaccagcataaaactattccaggataggaacattcgtaccatttgggacgaggaacaggaaaagtggtatttctcaataattgatgtaatagctgttttaactgacagtgataatccccgtaaatattggagtgttctaaaaacaagactgaaaagtgaaggcagtcaactggctacaaattgtagccagttgaaaatgcccggagccgacggcaaaatgcgtgaaactgacgcggcggatgcggaacaaattctacgactcgttcaatccgtccccagtaaaaaagccgaaccatttaagttatggcttgccaaaatagggaatgaccggatagatgaaatggcagaccctgaacttgcaataaatcgagccttggatttttacgccaaaaaaggctattcattagattggataaaccaacgtcttaaaacaatagaagtccgtaaactcttaactgatgaatgggacaaaggaggtattaaaaaaggatggaatacgctttattga

SEQ ID NO: 51456 - protein, 172 aa, Unknown
  Obtained from environmental sample
  misc_feature (1)..(172): Xaa is any amino acid
MVHSTSIKLFQDRNIRTIWDEEQEKWYFSIIDVIAVLTDSDNPRKYWSVLKTRLKSEGSQLATNCSQLKMPGADGKMRETDAADAEQILRLVQSVPSKKAEPFKLWLAKIGNDRIDEMADPELAINRALDFYAKKGYSLDWINQRLKTIEVRKLLTDEWDKGGIKKGWNTLY

SEQ ID NO: 51457 - DNA, 1278 bp, Unknown
  Obtained from environmental sample
  misc_feature (1)..(1278): n is a, c, g, or t
ttgatgtatgatataaaaggaagcgataaaagcaacgggtttggcggtcttttaggatttggctacacttactttttcactccgaactggggcattggaagcggattggaaatggcattatataatgcagaattcgaattaaaaaaatacacccaaaaaccatattttctttacgaatacacagacgatgaaatagaattccgcagcacggtaaagggatacagagaagaacaaagcattatgctctttcaaattccgctcatgcttcaatttcaacaccgactcaatgaaaatcgccaattctatgcaatggctggcacaaaaataggcattcccttaaaaggagaaaacaaaatctccgccgattccgtaaggaattccggctatcgcggttttgagaaatacgaatacacaactcagaaattttggggattcggcacttatcctggggaaaaaggcgaaaagaaattatctttgcaaaccgcagttttgctctcggcagaaacaggcataaaatggaaactaaatgaagcactacggctttacaccggagcctatttagattacgggctgaattccgttacaaaaagaacccacaattccggcagagttatagaatatgaagaatggacaaaaaaacatttcacttttaacagtttaatagacgaagctacgccactggctataggtttaaaattgaaactctcatttgatgctggcaccaatgcgaaatcagaaatgcaaagcaaagccgccgaagaagaaattgcgcgtttagcagccgaaaaagtagccgaagcagaagcagctcgcatggcggcagaagccgaagccgcgcgtttagcagccgaggcagaagccgctcgcattgcttccattcaagatggcaaagccgcgcacttgcaagctagaatagattccattcaaaaccagattctaaacgactaccacatcactcaaacaaaaccaaacgaaaagcaaatacccgcattggatgcaatagtagctctgctaaaagaccaccccgaactgcgtttctatataaacgggcacacctgcgaccaaggcgacaaggaaataaataggatagttggatatgaacgtgccaaagcagccaaagactatgttattgccaaaggcattgacgaaaagcgcatacttggcataggttccaaactctactacgaaccattggttccaaacaccagcgaggaaaatcgcagaaagaacaggagagtggaatttgtgattgagaagtggttaccgccgagcgagtga

SEQ ID NO: 51458 - protein, 425 aa, Unknown
  Obtained from environmental sample
  DOMAIN (313)...(411): OmpA family
  misc_feature (1)..(425): Xaa is any amino acid
MMYDIKGSDKSNGFGGLLGFGYTYFFTPNWGIGSGLEMALYNAEFELKKYTQKPYFLYEYTDDEIEFRSTVKGYREEQSIMLFQIPLMLQFQHRLNENRQFYAMAGTKIGIPLKGENKISADSVRNSGYRGFEKYEYTTQKFWGFGTYPGEKGEKKLSLQTAVLLSAETGIKWKLNEALRLYTGAYLDYGLNSVTKRTHNSGRVIEYEEWTKKHFTFNSLIDEATPLAIGLKLKLSFDAGTNAKSEMQSKAAEEEIARLAAEKVAEAEAARMAAEAEAARLAAEAEAARIASIQDGKAAHLQARIDSIQNQILNDYHITQTKPNEKQIPALDAIVALLKDHPELRFYINGHTCDQGDKEINRIVGYERAKAAKDYVIAKGIDEKRILGIGSKLYYEPLVPNTSEENRRKNRRVEFVIEKWLPPSE

SEQ ID NO: 51459 - DNA, 1047 bp, Unknown
  Obtained from environmental sample
  misc_feature (1)..(1047): n is a, c, g, or t
atgttggagataaaaaacatagaaatcacgcctcaaatgctttccattatatcggaattggatacttttaaggctaattggactggatttagctcaatgcagcctgaacagctcaaaaaattgaaaaaaatttccactgtagaatccgttggttcttcaaatagaatagaaggcaataaactttctgacaatgaagtggaagagttgatgtctcgcattcaaaaaaagtctttcaaaaatagagacgaagaagaggttgctggttataccgaacttatgaatttgatttttgacagctatgaagttatccccttaacggaaaatcatataaagtacttgcacaaaattttgctgcaattttgcgaaaacgatgccgcacataggggtgaatacaaaaaactctcaaattccgtttcagcatttgatgtaaacggcaaagaaataggcatagtatttgaaactacttcgccttttgaaactccaattcttatggaagagcttgttgaatgggcaagaaaaaattttgacgataatttttaccacccattgcttgtaataggtattttcatagtccattttttggctatacatccatttcaagacgggaatggccgtttgtcaagggccttaaccactatgttattgttaaaaaaaggctatggctatgttccttacagttccatagaatccattatagaagccaataaagacggctattacagggcactccggcatacccaaaaaacgctcagaacagaaaaggctatttatgaaccttggcttcatttctttttaacaactctgcaaaaacaaaaaaggcatttggaagaaaaaataaaatctttcaaaaaatacgataccagcctttccaaactagcaacggatattttagccttgctagacaaacaccatcaattaacggttgcaaaagcagcagagattttgaatgtaaaaccagacactgtgaaaaaatccataaagaatctggtggataaaggttatctattgaaaaaaggaagcaccaaaggagcttggtatgagggataa

SEQ ID NO: 51460 - protein, 348 aa, Unknown
  Obtained from environmental sample
  DOMAIN (110)...(249): Fic protein family
  misc_feature (1)..(348): Xaa is any amino acid
MLEIKNIEITPQMLSIISELDTFKANWTGFSSMQPEQLKKLKKISTVESVGSSNRIEGNKLSDNEVEELMSRIQKKSFKNRDEEEVAGYTELMNLIFDSYEVIPLTENHIKYLHKILLQFCENDAAHRGEYKKLSNSVSAFDVNGKEIGIVFETTSPFETPILMEELVEWARKNFDDNFYHPLLVIGIFIVHFLAIHPFQDGNGRLSRALTTMLLLKKGYGYVPYSSIESIIEANKDGYYRALRHTQKTLRTEKAIYEPWLHFFLTTLQKQKRHLEEKIKSFKKYDTSLSKLATDILALLDKHHQLTVAKAAEILNVKPDTVKKSIKNLVDKGYLLKKGSTKGAWYEG

SEQ ID NO: 51461 - DNA, 1074 bp, Unknown
  Obtained from environmental sample
  misc_feature (1)..(1074): n is a, c, g, or t
ttggcacgagggacagtgacgactatcggtaactactacggtgcgggtattggcggtggattctgtaggaacggcggtacagtcactattactggagggacggtgacggcaaaaagctcccgtggttcaggcattggcggtggtggtcaaggcatcggtggcagttgcggtaacgatggtacatttacattaagcggcaatgctattgtgtttacaaatagcattggagatgcggacgagagtagaagaacgggtggcattttatttgtcggcaataaaggtacattctacggaaaaaatgttgcgataaacaataatgtgactatacccacagaccatacacttatcataccggacaacacaactttgactatccccaaaggcataacgcttaccaataacggtaaggtattaaaatttggcacgataaatcacggcggtaattacggcgagtgggtaggtactccatatattttgccaacagcaactattgatttgggcgaaaccaatcctctttcaggtattggttacacatttgcaaataatatttatactattttggataaaacgcatataatcgttacggggtcaagcactcaaagacgtattgaggttgaggctaacgccacgacagacattacgctaaacaatgtgactatagagcataaccaaaccaagctattgctcaacagcgggacaaatgtaacgcttaatcttgaaggagaaaatacgcttagaggaggaaattctgggatacaagtccctaacggtacaacgtttactatagatggcacgggtagtttggtggtaactacaaacggtagcggcggtgctgggattggcggtggtgatggcggtagtagcggtacaatcaacatcggtggcggaaccgtgacggtaactagcagttgcggtggtgcaggaattggcggtggcagagaaggtagcggtggcacaatcaacatcagcggtggaacagtgactgcgactggaggcagcaattgcggtggtgcaggaattggcggcggtagtggcggcagcggtggcacaatcaacatcagcggagggatgtga

SEQ ID NO: 51462 - protein, 357 aa, Unknown
  Obtained from environmental sample
  misc_feature (1)..(357): Xaa is any amino acid
MARGTVTTIGNYYGAGIGGGFCRNGGTVTITGGTVTAKSSRGSGIGGGGQGIGGSCGNDGTFTLSGNAIVFTNSIGDADESRRTGGILFVGNKGTFYGKNVAINNNVTIPTDHTLIIPDNTTLTIPKGITLTNNGKVLKFGTINHGGNYGEWVGTPYILPTATIDLGETNPLSGIGYTFANNIYTILDKTHIIVTGSSTQRRIEVEANATTDITLNNVTIEHNQTKLLLNSGTNVTLNLEGENTLRGGNSGIQVPNGTTFTIDGTGSLVVTTNGSGGAGIGGGDGGSSGTINIGGGTVTVTSSCGGAGIGGGREGSGGTINISGGTVTATGGSNCGGAGIGGGSGGSGGTINISGGM

SEQ ID NO: 51463 - DNA, 462 bp, Unknown
  Obtained from environmental sample
  misc_feature (1)..(462): n is a, c, g, or t
atgttgattgtgccaccgctgccgccactaccgccgccaattcctgcaccaccgcaattgctgcctccagtcgcagtcactgttccaccgctgatgttgattgtgccaccgctaccttctctgccaccgccaattcctgcaccaccgcaactgctagttaccgtcacggttccgccaccgatgttgattgtaccgctactaccgccatcaccaccgccaatcccagcaccgccgctaccgtttgtagttaccaccaaactacccgtgccatctatagtaaacgttgtaccgttagggacttgtatcccagaatttcctcctctaagcgtattttctccttcaagattaagcgttacatttgtcccgctgttgagcaatagcttggtttggttatgctctatagtcacattgtttagcgtaatgtctgtcgtggcgttagcctcaacctcaatacgtctttga

SEQ ID NO: 51464 - protein, 153 aa, Unknown
  Obtained from environmental sample
  misc_feature (1)..(153): Xaa is any amino acid
MLIVPPLPPLPPPIPAPPQLLPPVAVTVPPLMLIVPPLPSLPPPIPAPPQLLVTVTVPPPMLIVPLLPPSPPPIPAPPLPFVVTTKLPVPSIVNVVPLGTCIPEFPPLSVFSPSRLSVTFVPLLSNSLVWLCSIVTLFSVMSVVALASTSIRL

SEQ ID NO: 51465 - DNA, 1266 bp, Unknown
  Obtained from environmental sample
  misc_feature (1)..(1266): n is a, c, g, or t
atgcattcaagagcaggggcgcaggttcctttttccagtattaacttgggtactgacacaagcgaagctggcagaatggttacggagtgttttttactagcctacgagaaaggcttgggtaagggtgaatcgccgttattcccaaacgtatgttttaaaattaaggaagatgtcaactttgaagaaggcgatcccaattacgatttgtttcaattaagcatgcacgttgcctgtaagcggctgttcccgtctttttcttttcaggattcaagtttcaacaaaccgtaccgcgatgaagaagtagcatacatgggctgccgcactcgcgttatcgcaaactgcaacgggcctgccgtaaccaattcaagggggaatctgtcttttactacaattaatcttccgcgtctggggatacgcgctgacaaggatttatcccagttctggaagttcctggatgagataatcgatctttgtatcgaacagttattaacaaggtataacgtacagaaaaaactcaaggtaaaagattttccgttcttaatgggacaaaaactgtaccttgacagcgacgggctgtcagctaacgacacgattgaaaaggcaatccgccatggaacgctcagcattggatttataggacttgcggaatgtcttaccgcgctgacaggcaagcatcatggggaaagcgccgatgctcaggctctcggcattgccatcgtcagccatatatggcgcaggtgtgatgaagcgacaaaaaaacacagcctcaacttttctttgcttgctactcccgccgaacagttaagcggtaaatttacccagcttgatattgaacggtatggcgtaattaagggcataacggacaagaaatggtacaccaattcttttcatgtgcctgtagaatataatattaccgcgctggacaaaataaaaattgagggcgcgtatcacaagtattgcaacgcggggcatatatcctatgttgaattaaaatcggccccggagcataatcttgaggcctttgaaactttggtaagagaaatggcggaagcggatatgggatatgccgcagtgaatttccccgttgacatttgctgtgattgcggactaaacggcgtaattcagggaaatacctgtcctaaatgcggcagtaacaatataagccgcgtgcgcaggataaccggatatttgtccacgcttgaccgctttaacgacagcaaattggcggaagttcaaaatcgtcagatacatcagacatttaactga

SEQ ID NO: 51466 - protein, 421 aa, Unknown
  Obtained from environmental sample
  DOMAIN (300)...(401): Glycine radical
  misc_feature (1)..(421): Xaa is any amino acid
MHSRAGAQVPFSSINLGTDTSEAGRMVTECFLLAYEKGLGKGESPLFPNVCFKIKEDVNFEEGDPNYDLFQLSMHVACKRLFPSFSFQDSSFNKPYRDEEVAYMGCRTRVIANCNGPAVTNSRGNLSFTTINLPRLGIRADKDLSQFWKFLDEIIDLCIEQLLTRYNVQKKLKVKDFPFLMGQKLYLDSDGLSANDTIEKAIRHGTLSIGFIGLAECLTALTGKHHGESADAQALGIAIVSHIWRRCDEATKKHSLNFSLLATPAEQLSGKFTQLDIERYGVIKGITDKKWYTNSFHVPVEYNITALDKIKIEGAYHKYCNAGHISYVELKSAPEHNLEAFETLVREMAEADMGYAAVNFPVDICCDCGLNGVIQGNTCPKCGSNNISRVRRITGYLSTLDRFNDSKLAEVQNRQIHQTFN

SEQ ID NO: 51467 - DNA, 531 bp, Unknown
  Obtained from environmental sample
  misc_feature (1)..(531): n is a, c, g, or t
ttggcaatggaattaacgctggaagtgttaaaaaaaataaaacaacactataaagaagataattttaatgttgaagatgttcaggatattgtcgagaccattttaattgagaagggttacgcaaaagaagccaagtcgtacattttataccgtgaaaatcgttcgaggttgagagaagcgcgaagcgaactgatgaacgcggtttcggaaattttgcaggggacgaaccgtgataacgccaatgtaggcaattcgccttccgcgaaggtgctgcaaatatcggacatagcctccaaaaattactacttaaaacgcgtgcttcccgaaaaagaggccaaggagcatatcaacggcgatatttatattcacgatttatcatggtacggcaagacgctgacctgcctgcaaattcccctggctcgcttgttaggcgacgggtttaaacaaccgtcacggctatatacgtcctccaaaaggaataaaaacggcggcggcgctggcggcgataattttacagagcaatcagaatga

SEQ ID NO: 51468 - protein, 176 aa, Unknown
  Obtained from environmental sample
  misc_feature (1)..(176): Xaa is any amino acid
MAMELTLEVLKKIKQHYKEDNFNVEDVQDIVETILIEKGYAKEAKSYILYRENRSRLREARSELMNAVSEILQGTNRDNANVGNSPSAKVLQISDIASKNYYLKRVLPEKEAKEHINGDIYIHDLSWYGKTLTCLQIPLARLLGDGFKQPSRLYTSSKRNKNGGGAGGDNFTEQSE

SEQ ID NO: 51469 - DNA, 1479 bp, Unknown
  Obtained from environmental sample
  misc_feature (1)..(1479): n is a, c, g, or t
atgcatggcgggcagtccttcgcctatttcgacagagacatggcggtttatgttgaattggaaaaaggaaagcaggaaaaacttatacgccgtaacctgaaggaattgggattatcagcgcatgctgatgatgaaaaaattaaatcgcttgtctacgaatgtacaaaagaagaaacatttcaggcaatggaagggtttatttacaatctcaataccatgcactcaagggcgggagcgcaggttcctttttcaagcatcaatttaggaactgatacaacagaagcgggcagaatggttacggagtgttttttgcttgcctacgagaaaggtttaggcaaaggagaatctccgttattccccaatgtatgttttaaaattaaggaagatattaattttgaagaaggcgatccgaattacgatttatttcaactgagtctgcgcgttgcctgcaagcggcttttccccgctttttcttttcaggactcaagtttcaacaaaccgtttcgtgatcaggaagtcgcctacatgggctgccggacgcgcgttatttcaaactgcaacgggcctgaagtaaccgattcgaggggaaacctgtcttttacaaccattaatttgccgcgccttggcatacgcgcggacaaggatccttccctgttttggaaatatctcaacgagacaattgatctttgtattgaacaattattgacgaggtataacgtacagaaaaaactcaaggtaaaggattttccgtttttaatgggtcagaaactgtaccttgacagcgaggggctgtccgccaacgatacgattgaaaaagcaatccgtcatggatcgctaagtataggatttataggcctggcggaatgtcttaccgcgctgacaggtaaacatcacggggaaagcgccgaagcccaggctctcggcattgccattgtcagccacatggggcgcaaatgtgatgaagcgacaaaaaaacacagcctcaacttttcactgcttgcaacgcccgccgaacagttaagcggaaaatttacccagcttgatgttgaacggtatggcgtaattaaaggcataacggacaaggaatggtataccaattcatttcatgtgcctgttgaatacaacattaccgcgctggacaaaataaaaattgaaggggcgtatcacaagtattgcggcgcggggcatatatcgtatgttgaattaaaatcggctccggaacataatcttgaggcgtttgaatctttgataagggcaatggcggaagcggatatgggttatgccgcggtgaatttccctgtggatatttgtactgattgcgggttaaacggcgttattcctgaaaatacctgtcccaagtgcggcgggaagaacatcagccgtgtgcgcaggataaccggatacttgtctacgcttgaccgttttaatgacagcaaactggcggaagtccaacatcgccagatacatcaaacattttaa

SEQ ID NO: 51470 - protein, 492 aa, Unknown
  Obtained from environmental sample
  DOMAIN (372)...(473): Glycine radical
  misc_feature (1)..(492): Xaa is any amino acid
MHGGQSFAYFDRDMAVYVELEKGKQEKLIRRNLKELGLSAHADDEKIKSLVYECTKEETFQAMEGFIYNLNTMHSRAGAQVPFSSINLGTDTTEAGRMVTECFLLAYEKGLGKGESPLFPNVCFKIKEDINFEEGDPNYDLFQLSLRVACKRLFPAFSFQDSSFNKPFRDQEVAYMGCRTRVISNCNGPEVTDSRGNLSFTTINLPRLGIRADKDPSLFWKYLNETIDLCIEQLLTRYNVQKKLKVKDFPFLMGQKLYLDSEGLSANDTIEKAIRHGSLSIGFIGLAECLTALTGKHHGESAEAQALGIAIVSHMGRKCDEATKKHSLNFSLLATPAEQLSGKFTQLDVERYGVIKGITDKEWYTNSFHVPVEYNITALDKIKIEGAYHKYCGAGHISYVELKSAPEHNLEAFESLIRAMAEADMGYAAVNFPVDICTDCGLNGVIPENTCPKCGGKNISRVRRITGYLSTLDRFNDSKLAEVQHRQIHQTF

SEQ ID NO: 51471 - DNA, 642 bp, Unknown
  Obtained from environmental sample
  misc_feature (1)..(642): n is a, c, g, or t
gtgaacaccccggatctttgccagaaagctttagccctgcttgcgcaggagttcaccgttaatccccagcccggctggattagagaggacagaaccatcgacccgagcgtcgccaatgagctctcgcgcctgtgcagcgaaaacagtttcctcaggcggcattacggccacgaggatcatgaaattctcgcaaaaatgcaggacgaaaaaagacacgtcctgaaattgcttaccgtaaataaaatttcgcttagtttttattatactcccggtgaaaactgggagaacaccaggcatttccgttacatccgtatctttaaactcctcgttcccgaattggccctgggaaaaagcacggcggaaatttcccgcttcctgggcacggtgcttaaccccgatttggagaagacggttcgcaaggattatccgactccgtcaaatacgataaaaaaaatcatggctgattttgcgacgctaaagctggtcgggtgtatcagcggcgaaggcgggaacgggggtgatgagatctgggaaattacccagcatgggaaggacgttttctcaacatatcgcataacacagcttgagaaggcccttgagaataaaatggagaggaaaactgaggaaggagttaattcctaa

SEQ ID NO: 51472 - protein, 213 aa, Unknown
  Obtained from environmental sample
  misc_feature (1)..(213): Xaa is any amino acid
MNTPDLCQKALALLAQEFTVNPQPGWIREDRTIDPSVANELSRLCSENSFLRRHYGHEDHEILAKMQDEKRHVLKLLTVNKISLSFYYTPGENWENTRHFRYIRIFKLLVPELALGKSTAEISRFLGTVLNPDLEKTVRKDYPTPSNTIKKIMADFATLKLVGCISGEGGNGGDEIWEITQHGKDVFSTYRITQLEKALENKMERKTEEGVNS

SEQ ID NO: 51473 - DNA, 756 bp, Unknown
  Obtained from environmental sample
  misc_feature (1)..(756): n is a, c, g, or t
ttgaacggaagcgagcaggtgcttgagttcatggaagccaacgcccccacagcgctcattcccaaaatacgggatatgcttggggcctttctctttcgcggcgacgatgtatacaaacctgtctcagtgctttcaggcggggaaaaaagccgcctcgccctgctgtacatgctccttaagcccctgaacctcctgattctggacgagcctaccaaccaccttgatctccattcaaaagacgtactgctggagactctcaatcaattcaagggaactattatttttgtttcacacgaccgcgccttcatggaagctctatccaccaagactcttgaactttcacctgtcgccgacacttcgtcccgtgcgcggcttttctatgggaactatgcgtactacctggaaaaaatagggaatagggagtggggcataggtagtggagataagaatgacggcggtaacaataaaaccagtaataatattatagacaatcaaaagaccgcgatggaacagagggcgcagaacaagcagcgtcaggcggaattacggaaacttcagaagcaggaggccgaattgcttaacgccattgacgggcttgaaaacgaaaaatcccgattggaagcggaactgtcccttccggcagtttattcaaacggggaaaaggcaaaggccgtaaaacaaaaacttgacgaatgtaccgccgcgcttaaaacaaagacggctgaatgggaagcggtagcggcgttaataaattag

SEQ ID NO: 51474 - protein, 251 aa, Unknown
  Obtained from environmental sample
  DOMAIN (4)...(116): ABC transporter
  misc_feature (1)..(251): Xaa is any amino acid
MNGSEQVLEFMEANAPTALIPKIRDMLGAFLFRGDDVYKPVSVLSGGEKSRLALLYMLLKPLNLLILDEPTNHLDLHSKDVLLETLNQFKGTIIFVSHDRAFMEALSTKTLELSPVADTSSRARLFYGNYAYYLEKIGNREWGIGSGDKNDGGNNKTSNNIIDNQKTAMEQRAQNKQRQAELRKLQKQEAELLNAIDGLENEKSRLEAELSLPAVYSNGEKAKAVKQKLDECTAALKTKTAEWEAVAALIN

SEQ ID NO: 51475 - DNA, 432 bp, Unknown
  Obtained from environmental sample
  misc_feature (1)..(432): n is a, c, g, or t
atgaggggtggagtttatatgggtactgtatacgcggaattaacgttaaggaattcagaagatgttactctggcaaggcagggttttatgaggccagaaaaaatcaaaacggtaacggtaaccgccattgtggatacaggctcttattcattaatgcttgacgaacaaaccgctgaaaaactggggcttggaaaaacgggcggaaagcggattcgaatcgctaacggagagcggattgtatgccctgttactaccccggtagagattaactggaaagaccgccagtcggttatgagcgtaatttctgttcccggcctgccgcaaaatttacttggtttgcttccgcttgaggatatggaccttattgttcacccgcataaacatgaattggtaggcgcccatggcgacgagatggaatatatggcgtattaa

SEQ ID NO: 51476 - protein, 143 aa, Unknown
  Obtained from environmental sample
  misc_feature (1)..(143): Xaa is any amino acid
MRGGVYMGTVYAELTLRNSEDVTLARQGFMRPEKIKTVTVTAIVDTGSYSLMLDEQTAEKLGLGKTGGKRIRIANGERIVCPVTTPVEINWKDRQSVMSVISVPGLPQNLLGLLPLEDMDLIVHPHKHELVGAHGDEMEYMAY

SEQ ID NO: 51477 - DNA, 813 bp, Unknown
  Obtained from environmental sample
  misc_feature (1)..(813): n is a, c, g, or t
ttgatgacggagaataattcccgcatctatgtccttcctccagaagaggcaaggcgcattgccgcgggcgaagtagtagaccgccccgccgcgctggttagggaatttcttgacaacgcgatagacgcaaacgcggataacatagaaatctctgttgaggaaggcggctgtaaaaaagttgaagtttccgacgacggggacggaatgatccgcgaagacttggaactttgcacccttacccacgcgacaagcaagattcgcaagttagacgatcttgacactgccgtaacgcttggtttcaggggggaagccctttccgccgcggcggctgtcagcagggtggaaattataagcagtacggacggaagaacggcgtggctttttgaaacagggccgggagaaagccgcccttccaaagttgaacagacgcgccgcacaaagggaacgacagtaagagcgcttaacatttttgagagcatcccggcgcgaaaacgatttttaaaaagggaaggaagcgaagctgccctatgccgccaggtttttattgacaaagcgcttgccttcccctcaattaatttccgttttattcaagacggcaaattaaaagattttttccccgccgtttcttcaaaaaaggagcgttttgccgccgccttactgcaagcgcgggaaattaattttttacacgaaataaacgtaacaggcgcgggattttcagcaacagttgtaatcggcggcgcggagctttacaggaacgacaggcggcagctgtatgtttttgccacggcagaagagtacaggacttttcgctga

SEQ ID NO: 51478 - protein, 270 aa, Unknown
  Obtained from environmental sample
  DOMAIN (24)...(158): Histidine kinase-, DNA gyrase B-, and HSP90-like ATPase
  misc_feature (1)..(270): Xaa is any amino acid
MMTENNSRIYVLPPEEARRIAAGEVVDRPAALVREFLDNAIDANADNIEISVEEGGCKKVEVSDDGDGMIREDLELCTLTHATSKIRKLDDLDTAVTLGFRGEALSAAAAVSRVEIISSTDGRTAWLFETGPGESRPSKVEQTRRTKGTTVRALNIFESIPARKRFLKREGSEAALCRQVFIDKALAFPSINFRFIQDGKLKDFFPAVSSKKERFAAALLQAREINFLHEINVTGAGFSATVVIGGAELYRNDRRQLYVFATAEEYRTFR

SEQ ID NO: 51479 - DNA, 525 bp, Unknown
  Obtained from environmental sample
  misc_feature (1)..(525): n is a, c, g, or t
ttgtcaataaaaacctggcggcatagggcagcttcgcttccttccctttttaaaaatcgttttcgcgccgggatgctctcaaaaatgttaagcgctcttactgtcgttccctttgtgcggcgcgtctgttcaactttggaagggcggctttctcccggccctgtttcaaaaagccacgccgttcttccgtccgtactgcttataatttccaccctgctgacagccgccgcggcggaaagggcttcccccctgaaaccaagcgttacggcagtgtcaagatcgtctaacttgcgaatcttgcttgtcgcgtgggtaagggtgcaaagttccaagtcttcgcggatcattccgtccccgtcgtcggaaacttcaacttttttacagccgccttcctcaacagagatttctatgttatccgcgtttgcgtctatcgcgttgtcaagaaattccctaaccagcgcggcggggcggtctactacttcgcccgcggcaatgcgccttgcctcttctggaggaaggacatag

SEQ ID NO: 51480 - protein, 174 aa, Unknown
  Obtained from environmental sample
  misc_feature (1)..(174): Xaa is any amino acid
MSIKTWRHRAASLPSLFKNRFRAGMLSKMLSALTVVPFVRRVCSTLEGRLSPGPVSKSHAVLPSVLLIISTLLTAAAAERASPLKPSVTAVSRSSNLRILLVAWVRVQSSKSSRIIPSPSSETSTFLQPPSSTEISMLSAFASIALSRNSLTSAAGRSTTSPAAMRLASSGGRT

SEQ ID NO: 51481 - DNA, 996 bp, Unknown
  Obtained from environmental sample
  misc_feature (1)..(996): n is a, c, g, or t
atggaatacggctgtcaaggctggtttcctaacggagttcaccccgtaggcgcagtctatgtggaaatagacccgtccctcgccgatttcaacatccaccccgccaaacgcgaagtccgcttccgcgaccccggcgccatacatcacgccgtctcaggcggagtaaaaaatttcttccacacctatttcctaagaacctcacgcacaagcgcacaggcgaaagaaggcgaagagcaaaaagaaaatgaatttactttttataataaaatttttgaggcaaaacatagttccgaaaaactagaaaatatatcgaacaacgactctgcgcctccgcgcctctgcgtgaactcttttgagaacaataattcaccttcacgcattactgataattttataacggtatccatccgtcgccgcgagaattcttttgcgaatgattccgccgctatcgtctacggcgacatgcggtatataggcagagttttcgggctttttatattgatcgaatggggagataaactctacttaatcgatcaacacgccgcgcacgagcgtatcctttacaaccgtttccttgaagagcctatcccaaaacaggaactgctctctcctattcccttcacgacgcanagcgccgaagaagacgcttttcttgaagcaaagaaggaagaactgtcccgccttggcctggacatcgtaaaagacggcgacggctggaacattgaagccctgccggcgggctggaaaatgggcgacgcggagactgtaaaagaaatccttgaattgccctgtgcccgagaggacatggcagaacaatgggcggcaaccgtctgctgccgcgccgccattaaagacggcgactaccccgacgatgaaaccgccttttcgcttggcagggaggcgctggaacttcccgaccctcgatgcccccacggccgccctatatggacggaaatcagcaaaaaggcgctttttagggctgttcgccgggaatag

SEQ ID NO: 51482 - protein, 331 aa, Unknown
  Obtained from environmental sample
  misc_feature (1)..(331): Xaa is any amino acid
MEYGCQGWFPNGVHPVGAVYVEIDPSLADFNIHPAKREVRFRDPGAIHHAVSGGVKNFFHTYFLRTSRTSAQAKEGEEQKENEFTFYNKIFEAKHSSEKLENISNNDSAPPRLCVNSFENNNSPSRITDNFITVSIRRRENSFANDSAAIVYGDMRYIGRVFGLFILIEWGDKLYLIDQHAAHERILYNRFLEEPIPKQELLSPIPFTTXSAEEDAFLEAKKEELSRLGLDIVKDGDGWNIEALPAGWKMGDAETVKEILELPCAREDMAEQWAATVCCRAAIKDGDYPDDETAFSLGREALELPDPRCPHGRPIWTEISKKALFRAVRRE

SEQ ID NO: 51483 - DNA, 690 bp, Unknown
  Obtained from environmental sample
  misc_feature (1)..(690): n is a, c, g, or t
atgtgtataatactgctgcgtttagccatagcaaaagcgcaagccgtagaaaaatccatcagccttgaacacgctctgataaaaacaatggcggaactggtagaatgcagagattgtataacaggcggacacatagacagaacacagcgcggaatgaaaatattgttagacgcaatccgaaagaaaggcgtttatagggaaaaaacaaaagactgggatatagatctgataatccaatccagccagttacatgacataggaaaaatctccattgaagacaggatattaaagaaacccggcaggcttgatgaagatgaatttaacgaaatgaaaaagcacgctatattcggagagcaaataataataaaaattgaatccatgacaaaagaaagcgaatttttggaatacgcaagaattctcgccgtcagccaccatgaaaaatgggacggcacaggttacccgcacgggttaaaggaaaatgaaatccccttattgggacgcatcatggcgatagccgacgtatacgacgcgcttgtttccgtaagatcatataaaaaaccgtttacgcacgaggaagccgtaaaaataattgtggacagcaaaggaaaacaatttgacccctgccttattgatatgtttctggaagttgccgacaagtttaaaaaaactattcccggcgaacagccctaa

SEQ ID NO: 51484 - protein, 229 aa, Unknown
  Obtained from environmental sample
  DOMAIN (41)...(178): HD domain
  misc_feature (1)..(229): Xaa is any amino acid
MCIILLRLAIAKAQAVEKSISLEHALIKTMAELVECRDCITGGHIDRTQRGMKILLDAIRKKGVYREKTKDWDIDLIIQSSQLHDIGKISIEDRILKKPGRLDEDEFNEMKKHAIFGEQIIIKIESMTKESEFLEYARILAVSHHEKWDGTGYPHGLKENEIPLLGRIMAIADVYDALVSVRSYKKPFTHEEAVKIIVDSKGKQFDPCLIDMFLEVADKFKKTIPGEQP

SEQ ID NO: 51485 - DNA, 444 bp, Unknown
  Obtained from environmental sample
  misc_feature (1)..(444): n is a, c, g, or t
atgcgttcttacataatagccggaaactggaaaatgaacaaaaccgttgctgagagcattgctcttgcgcaggaaattgttgcaaaagccaagggcatttcaaaaaccgaagtggttattgcacccacatatttagctgctgcaaaagtggcagatgtgataaagggcagcaatgtgaaactcgccgttcaagacattcattgggaaaaccagggagcctacacaggcaaggtttccattgatatggtaaaagaaattggtgcggaatatgttattatagggcattccgaacaaaggcagtattttcacgaaacagacgaaactgtcaacaaaaaagccaaaaaagttttaagcgcaggcttaaagcccattatctgcattggcgaaactctggaacagcgcaatggtggcaaattggaaactgttttaacaacacaggtttaa

SEQ ID NO: 51486 - protein, 147 aa, Unknown
  Obtained from environmental sample
  DOMAIN (4)...(147): Triosephosphate isomerase
  misc_feature (1)..(147): Xaa is any amino acid
MRSYIIAGNWKMNKTVAESIALAQEIVAKAKGISKTEVVIAPTYLAAAKVADVIKGSNVKLAVQDIHWENQGAYTGKVSIDMVKEIGAEYVIIGHSEQRQYFHETDETVNKKAKKVLSAGLKPIICIGETLEQRNGGKLETVLTTQV

SEQ ID NO: 51487 - DNA, 348 bp, Unknown
  Obtained from environmental sample
  misc_feature (1)..(348): n is a, c, g, or t
atgagtgcttttttttgggttttgattgttgcgcacgttgctttatgcgtgttgcttatattgctcgttcttgttcagaacgataaaatgggcggtttagccggcctaggtggaatgacagcgcaatctgctttttcaacggcaggtgctgctacattcattcaaaagctcactcgctacgttgcgctcgctttgtttgcggttgtgctaacactgagcgttatggcaacaaaacaagattctggcgttcagagttcggttttaagagaagctctgaataccggcggtcaaggtgctgttttggatgatggttttatacctgctggaccagctcctgctcaagaatga

SEQ ID NO: 51488 - protein, 115 aa, Unknown
  Obtained from environmental sample
  DOMAIN (5)...(77): Preprotein translocase SecG subunit
  misc_feature (1)..(115): Xaa is any amino acid
MSAFFWVLIVAHVALCVLLILLVLVQNDKMGGLAGLGGMTAQSAFSTAGAATFIQKLTRYVALALFAVVLTLSVMATKQDSGVQSSVLREALNTGGQGAVLDDGFIPAGPAPAQE

SEQ ID NO: 51489 - DNA, 621 bp, Unknown
  Obtained from environmental sample
  misc_feature (1)..(621): n is a, c, g, or t
ttgctaaaaaatatgattactggaaaaatatttctgaggggcagagctttgcacagccccgttgctttagtggaagacagggataattttgaatatttgtatttgcgaacagacttggcagaactccccggaaaaaattttcaaaaaaagagaaatttggtaaatgcttttataaaaacttattctttggaaaacgtggaaaaaaaactcattgacagcgaaacaataaaagatgctttgtttgttttagatgaatgggaaaaaagcaaagaggagcacagcgattacgcttctgcaaaagaggctttgaatttgcactccgaactcggttttgtcggtttcgttttttatgtgagcggaaaaccggttgcctattgccaaggtgaaactcttgctaacgaaagaagttttgcggtgcattttgaaaaagcaatagagagctacaaaggcatttatcagtacataaatcaggaatttgcaaagagcattccaaagagcataatctgcataaacagagagcaagatttggggcacgagggtctgcgccaagccaaaatcacttaccgccctgttgattttgttaggcttttttccagcaatgtttctaccaaagttgggtaa

SEQ ID NO: 51490 - protein, 206 aa, Unknown
  Obtained from environmental sample
  misc_feature (1)..(206): Xaa is any amino acid
MLKNMITGKIFLRGRALHSPVALVEDRDNFEYLYLRTDLAELPGKNFQKKRNLVNAFIKTYSLENVEKKLIDSETIKDALFVLDEWEKSKEEHSDYASAKEALNLHSELGFVGFVFYVSGKPVAYCQGETLANERSFAVHFEKAIESYKGIYQYINQEFAKSIPKSIICINREQDLGHEGLRQAKITYRPVDFVRLFSSNVSTKVG

SEQ ID NO: 51491 - DNA, 711 bp, Unknown
  Obtained from environmental sample
  misc_feature (1)..(711): n is a, c, g, or t
atgcgtaaaatagttttcgtgtttatgggtggaccaagcgttgagcatcctgtttctcttgtaagcggaacaggaattgcccgagccttagacccccataaatacgacattcaccctgtactcatctcacaagacgattattggacttgggggcgcaaaccgctcaccccgtatcaatgccagaactttaacgtaaatttctttacaagcgcagaaaatgatatgcaaaaaaaactgcgcccctctttagaagaattaaaacctatggacattgcgtttttagccctgcacggccgctttggcgaagacggtcatattcaagctatgctggattatgcgggcattccatatacaggcagcgggatgctctccagcgcactcgctatggataaaataaagagcaaagagatttacagagcaaatggtattcccactgctgagtttagggtttggcaaagggaaaatttttcaaaggaaaccatagaagaggcgtttgagcatttgggctcgcctattgttattaaagaccccctcggcggttcttcgctggatatgggctttgcaaaaaatattgaagaggctggcaagatttgcgaaaagctttttgaaaaaagcggcaggcttttggcagagcaatttatagcgggtatggaagcgagctgcggttatattgagggttgcgagccgctcccacaacagaaagtagaatga

SEQ ID NO: 51492 - protein, 236 aa, Unknown
  Obtained from environmental sample
  DOMAIN (3)...(129): D-ala D-ala ligase N-terminus
  misc_feature (1)..(236): Xaa is any amino acid
MRKIVFVFMGGPSVEHPVSLVSGTGIARALDPHKYDIHPVLISQDDYWTWGRKPLTPYQCQNFNVNFFTSAENDMQKKLRPSLEELKPMDIAFLALHGRFGEDGHIQAMLDYAGIPYTGSGMLSSALAMDKIKSKEIYRANGIPTAEFRVWQRENFSKETIEEAFEHLGSPIVIKDPLGGSSLDMGFAKNIEEAGKICEKLFEKSGRLLAEQFIAGMEASCGYIEGCEPLPQQKVE

SEQ ID NO: 51493 - DNA, 1452 bp, Unknown
  Obtained from environmental sample
  misc_feature (1)..(1452): n is a, c, g, or t
atgaaagacgtagatactgcctacgctcaatacatggatgaagccgttaaggccgttcaaaacggcgactcttttgcttgcaatagttatgctccggctttgaaatcaaacatagaaattaccatacaatctttcccaatgggcaattcgggcaggtcatggagtgtaatgattgcggcgacggaatcgtacattttaagagaagtaaattttctgaccaagattacgatcattattgcggcaatagccattgtaatagcggcggtaattatttactttgtccttcaaagcaccacaaatccgattgtcaaagtggcggatacgctcagagacatttccgaaggcgaaggcgatcttacacggaccatagcagtcagttccaatgacgaaattggcgaccttgccaagtactttaataaaacgctcgataaaataaaaaaccttgtgctcctaataaaaaagcaggcgggattattgaaagacataggcaacgacctcgccagcaacatgaccgaaacggccgcggcggtaaaccaaatcaccgccaacattcaaagcgtcaagggcagggtcataaaccagagcgccagcgtaaccgaaaccaacgcgacaatggaacaggtcatcgccaacataaacaaactcaacggccacgtggaaaaccagagcagaaacgtttcacaggcttcatccgccatcgaggaaatggttgccaacatcggttccgtaaccaacacgctgataaacaacgccaccaacgtaaaatcattgcaggaggcgtccgaagttggaaggaccggactgcaggaagtggcgtccgacattcaggaaatatcccgtgagtccgaaggcctgttggaaataaactcggtaatggaaaacatagccagccagaccaacctcctttcgatgaacgccgccattgaagccgcccacgccggggatgcgggcaaaggtttcgcggttgtagccggggaaatccgcaagctggcggaaagctccagcgagcagtcaaaaacagttgtcgccgtgctaaataaaattaaaggttccattaataaaatttccgattccaccggcagcgcgctggaaacatttgaagccattgagggcggaatcaagacggtgtctgatcaggaaggaaacatccgcggcgccatggaagaacagggcgagggaagcaagcagatacttgaagccatcggccagctcaatgaaattacgcggcaagtcagaaatagttccgtagagatgcttgagggcgcgaaggaaattatctgcgaaggcaggaacctggaaagggctaccggggaaattactggcgggatgaccgaaatggcggcaagcgcgggccagatcaacgcagccatgaacgaagtaaacagcatcagcggacagaataaagaaattattgacaacctcgttgtggcggtatctcggtttacagtttaa

SEQ ID NO: 51494 - protein, 483 aa, Unknown
  Obtained from environmental sample
  DOMAIN (227)...(440): Methyl-accepting chemotaxis protein (MCP) signaling domain
  misc_feature (1)..(483): Xaa is any amino acid
MKDVDTAYAQYMDEAVKAVQNGDSFACNSYAPALKSNIEITIQSFPMGNSGRSWSVMIAATESYILREVNFLTKITIIIAAIAIVIAAVIIYFVLQSTTNPIVKVADTLRDISEGEGDLTRTIAVSSNDEIGDLAKYFNKTLDKIKNLVLLIKKQAGLLKDIGNDLASNMTETAAAVNQITANIQSVKGRVINQSASVTETNATMEQVIANINKLNGHVENQSRNVSQASSAIEEMVANIGSVTNTLINNATNVKSLQEASEVGRTGLQEVASDIQEISRESEGLLEINSVMENIASQTNLLSMNAAIEAAHAGDAGKGFAVVAGEIRKLAESSSEQSKTVVAVLNKIKGSINKISDSTGSALETFEAIEGGIKTVSDQEGNIRGAMEEQGEGSKQILEAIGQLNEITRQVRNSSVEMLEGAKEIICEGRNLERATGEITGGMTEMAASAGQINAAMNEVNSISGQNKEIIDNLVVAVSRFTV

SEQ ID NO: 51495 - DNA, 2259 bp, Unknown
  Obtained from environmental sample
  misc_feature (1)..(2259): n is a, c, g, or t
gtgactcccgtaacaaacccgacttccaccactttgtttaaatcgttaatttgcgcgaaaacccgcaaccctgtagtcttcgcgtttcatccgaacgcgcaaaaatgttcgatagaagccgcgcgggttgtaaaagacgccgccattgcccacggagcgccgaagaactgcatacagtgggtagaacatccttctatggaaacgacttctcttcttatgaaccatccgggtgtttctttaattttggctacaggcggcgcgggcatggttaaatccgcttacagcgcgggaaagccggcgctcggcgtaggaccgggtaacgtaccctgttacatcaacaaaaatgttcatgttacccgcgcttgtacagacctgatgatttcaaaaacttttgatcacggaatgatctgcgcttcagaacaagcggtaattgtcgatgaggaaattgagcgggaatttgaacgcattttaaccgagaataattgttatttcttaaacgagagtgaaataaaaaaagttaccgactttgtaatcaaccgcgaaaaaatgaacgccaaccccgccgccgtaggacagagcgccgattggatagcggaacaatcggggattaaagttccgccgaaaacaaaaattctgctcgctaaattgcctgagccttcgtttaaatatccgttgtcgatagagacattaatgccggtactggcatactttgttgttaaggacgaagaacaaggttttgcttacgcgaaaaaaatgcttgagcttggcggcttgggacattcggcggtaattcacagcgacaataaagagctatgcgtgcgttacggacaggaaatgaaagtcgggcgcgtgattatcaactctccttcttctcagggagctatcggagatatttacaatactaacactccttctttgacattgggatgcggttccttcgggcacaactccacaacatcaaacgtatccagcgtcaatttatttaataaaaaacgaatcgcccaacggaggaataatatgcaatggtttaaaataccgcctcgtatttattttgaaaaagggtcgattcaatatttagaaaaaatgccgaacattaaacgcgcttttatagttaccgatcctgttatggtcaagctgggttatgttgagaaagctctttactatctgcgaaaacggagcgacagagtgcattgcgaaatatttgccgatgtagaaccagatccgtcagtcgaaacaattcgccgcggagtaagcgccatgaatctgttcaccccggacgtgatcatcggtatcggcggcggctcggctattgacgcggcaaagggtatgtggctcttctacgaaaatcccgacacggactttgacggtctgcgtttaaaatttcttgatatccgcaaacgcgcgtttcactttcccaacttgggcaaaaaagcgcagatggtcgccgtcccgacaacttccggcacaggcagtgaggtgacatctttctcggttatcacggacaaagagcacggcaatattaaatacccgctcgccgattatgagcttactcccgatgtggcgattatcgatccgcagtttgtcactaccatgcctaagtctatcgtagccgacacaggcatggacgtacttacccacgcgatagaggcgtatgtatccgtgcttgcctctgattttacaagcgggcttgcaatgaaagcctgcgcgttggtttttaaatatctcccgcgcagttacgccaatgaaaatgacgaaatagcgcgtgaaaaaatgcataacgcttcctgtatcgcaggcatggcgtttacaaacgctttcctgggcattaaccattcgcttgcgcataaactcggaggcgagttccatgttccgcatggaagggcaaacgccgttctgctgccgcatacgattgcctacaacgcgcaaaaaccggaaaaattcccaatcttcccgaaatacagcgagtttaaagccgattaccgttatgcgcaaatcgcaaatcaactgcgtttgggcggtaattcgcaggaagaagaaattgccgctttgatcaattccgtatggaagttaatggaaacattgaacgttcccacaagtataaaagcctgcggcattgatgaaaaagaattcttcagcaaagtagatgtattggctgaacacgcgtttgaggatcaatgcacaacagccaatccaagatatccgttaattactgatttagtagagatttaccgcaaagcatactatggagaaaggagttaa

SEQ ID NO: 51496 - protein, 752 aa, Unknown
  Obtained from environmental sample
  DOMAIN (346)...(739): Iron-containing alcohol dehydrogenase
  misc_feature (1)..(752): Xaa is any amino acid
MTPVTNPTSTTLFKSLICAKTRNPVVFAFHPNAQKCSIEAARVVKDAAIAHGAPKNCIQWVEHPSMETTSLLMNHPGVSLILATGGAGMVKSAYSAGKPALGVGPGNVPCYINKNVHVTRACTDLMISKTFDHGMICASEQAVIVDEEIEREFERILTENNCYFLNESEIKKVTDFVINREKMNANPAAVGQSADWIAEQSGIKVPPKTKILLAKLPEPSFKYPLSIETLMPVLAYFVVKDEEQGFAYAKKMLELGGLGHSAVIHSDNKELCVRYGQEMKVGRVIINSPSSQGAIGDIYNTNTPSLTLGCGSFGHNSTTSNVSSVNLFNKKRIAQRRNNMQWFKIPPRIYFEKGSIQYLEKMPNIKRAFIVTDPVMVKLGYVEKALYYLRKRSDRVHCEIFADVEPDPSVETIRRGVSAMNLFTPDVIIGIGGGSAIDAAKGMWLFYENPDTDFDGLRLKFLDIRKRAFHFPNLGKKAQMVAVPTTSGTGSEVTSFSVITDKEHGNIKYPLADYELTPDVAIIDPQFVTTMPKSIVADTGMDVLTHAIEAYVSVLASDFTSGLAMKACALVFKYLPRSYANENDEIAREKMHNASCIAGMAFTNAFLGINHSLAHKLGGEFHVPHGRANAVLLPHTIAYNAQKPEKFPIFPKYSEFKADYRYAQIANQLRLGGNSQEEEIAALINSVWKLMETLNVPTSIKACGIDEKEFFSKVDVLAEHAFEDQCTTANPRYPLITDLVEIYRKAYYGERS

SEQ ID NO: 51497 - DNA, 1725 bp, Unknown
  Obtained from environmental sample
  misc_feature (1)..(1725): n is a, c, g, or t
atgaaaatattgtggcgtattgcaaaagaagctgtcagatataaaggttggctgttgctgtcgatgtttggcacgcttatgatgacgacagtcaacctgattgcccccagaataatggcttccatgacaggactcgtggcagccggcatgacgcgggaaaattttatcacggtgctgtggatggcgggtggattgttatgcctgtacctgacacgcatcctcttccggtttttatccaattactgctcacaccgggcggcatggcggctggtacttgaactgcggattaaagcttataacgcaattcagtctttttccatggactattttcacaacaagcaaacaggcgaactgttaagccgggtaatgaatgatgtggcgacatttgaactgatatacgcccacatcactcccgatgttattaccaattttgttacccttgccggagtaacaataatactcttaaatttaaacgcgcgtcttgcgcttatcacctgcattcccattccgctcattctgttatccgggtggtttttcatccgcaaggtgcggcccaactttcagaaaacgcaaaaagcgcagggggaactatccgcgcagttacaggataatttatcaggcatacaggaaatacaggcttttggccgccaaacctatgcgtccgaaaaggttttgaacaaaggccgggattttacgcataatatgcttcgcgccctgaagttaagcgccatatttcatcccagcgtggaatttttaacttccattggcagcgttatcgttgtcggcttcggcggatttttggcgtataaaaaccagctttccgtttccgaaattgtcggttttatgctttaccttgcccttttttacgcgccgattaccggcgttgcccagcttctcgaatcggcccaacaatcgcttgccggcgctgagcgtgtcatcgagattttagacgcgccgcacagtgtcaaggacagccccacggcaaaatcaatcgggaaagcgaagggacacattacttttgagaatgtcagtttttcatatattgagggtgtccccgttcttgacaacgtatcgtttgacattaaaccggggcaaatggccgcgctggtaggggcgaccggcgtaggaaaaaccacgttaagcaaacttatatcaaggttttatgatccaacagccggaagagtttgccttgacgggcacgatctgcgggacattactctggaaagtctgagaagcaatatctctttggtgctgcaagacacgtttttatttaacggaactatcgaagaaaacatcgcctttgccagacccgatgcctcgttagatgaaattagaacggcggcgcataccgcgaggatacatgacgacataatgcanatgcccgaagcttatcagacgcagataggggaacgcggcgttaagttatccggcggccaaaaacagcgcatagcgatagcacgggcggtactctgccaggctccggtgcttattcttgatgaagcgaccgcctctgtggacgtacataccgaagagaaaatacagcaggcgatcaatgaaatagccggaagccgcacaatagtaactatcgcgcacaggctttcaactattcgcaacgcggatgttatttatgtttttgaaaaaggccgcattatccagtcaggtactcatgccgagttgattgaacaggaaggcctttaccggagtttgtgcagaacaggaaaataa

SEQ ID NO: 51498 - protein, 574 aa, Unknown
  Obtained from environmental sample
  DOMAIN (18)...(292): ABC transporter transmembrane region
  misc_feature (1)..(574): Xaa is any amino acid
MKILWRIAKEAVRYKGWLLLSMFGTLMMTTVNLIAPRIMASMTGLVAAGMTRENFITVLWMAGGLLCLYLTRILFRFLSNYCSHRAAWRLVLELRIKAYNAIQSFSMDYFHNKQTGELLSRVMNDVATFELIYAHITPDVITNFVTLAGVTIILLNLNARLALITCIPIPLILLSGWFFIRKVRPNFQKTQKAQGELSAQLQDNLSGIQEIQAFGRQTYASEKVLNKGRDFTHNMLRALKLSAIFHPSVEFLTSIGSVIVVGFGGFLAYKNQLSVSEIVGFMLYLALFYAPITGVAQLLESAQQSLAGAERVIEILDAPHSVKDSPTAKSIGKAKGHITFENVSFSYIEGVPVLDNVSFDIKPGQMAALVGATGVGKTTLSKLISRFYDPTAGRVCLDGHDLRDITLESLRSNISLVLQDTFLFNGTIEENIAFARPDASLDEIRTAAHTARIHDDIMXMPEAYQTQIGERGVKLSGGQKQRIAIARAVLCQAPVLILDEATASVDVHTEEKIQQAINEIAGSRTIVTIAHRLSTIRNADVIYVFEKGRIIQSGTHAELIEQEGLYRSLCRTGK

SEQ ID NO: 51499 - DNA, 366 bp, Unknown
  Obtained from environmental sample
  misc_feature (1)..(366): n is a, c, g, or t
atgagcagaaagctgaatgtatatctttgcggaaaaaagaccggcgtattatccgaagatgatctattacagctcacttttcaatatgataataacgcctctcctttatctgtccgcttgcctgtaagagcggaaagttatcctcacgccgcaacttatcctttttttgaaaatttaactcctgaaggcgagccttttgaaatactcacaaaagagcatgtttccggcaataatattttttccattcttaacaaattcggcggagattgcgccggcgcggtggctttatatgaaacaacgccggataatagncgatacgcacataagcgaaatatcttcccggaaaatagcgcaaataatagataa

SEQ ID NO: 51500 - protein, 121 aa, Unknown
  Obtained from environmental sample
  misc_feature (1)..(121): Xaa is any amino acid
MSRKLNVYLCGKKTGVLSEDDLLQLTFQYDNNASPLSVRLPVRAESYPHAATYPFFENLTPEGEPFEILTKEHVSGNNIFSILNKFGGDCAGAVALYETTPDNXRYAHKRNIFPENSANNR

SEQ ID NO: 51501 - DNA, 729 bp, Unknown
  Obtained from environmental sample
  misc_feature (1)..(729): n is a, c, g, or t
atgaccgtatggaaaagttttggcgcaagtgttatcggcccggggcatatccgcagcggcaaaccaaatcaggatgcttgggcggcgttccatcatacatggacagacggcgtcgttgtctccgatggcctcggctcaaaacctttttctgatttaggcagttctgccgtttgccgcgcggtggcttgcaccgttcatgcctgccgctataaaacagaattagatcaaacctttttatctgacaaaattaaaagcaactggctttcatttattgccccgcttgatccccgtgattgttccgccacctgtttgttcgcctttcggtttaccgacggtttaattagagttgggatgctcggcgacggcttgatcggagttttaaaaatcgacgatgctgttatgtctcttaccgaagacaagatggacgggttttccaatattacgactgcgctttcaactaataccacaggcaagtcgtggcgttttttaaccttacaggaaaatctctgcagcgccgttctgctctgcacggacggagtttccgatgatttgacggatactgaaagatttacccgtgaatttataatatcacacaccggtaatttagcctgtgtttccgcttcacgtaacgcgcggataatgctcgaaaactggccgacccccaagcacagtgatgacaagaccatcgtgtgtcttttccgtaaaggagcagatgatgagcgatcctga

SEQ ID NO: 51502 - protein, 242 aa, Unknown
  Obtained from environmental sample
  misc_feature (1)..(242): Xaa is any amino acid
MTVWKSFGASVIGPGHIRSGKPNQDAWAAFHHTWTDGVVVSDGLGSKPFSDLGSSAVCRAVACTVHACRYKTELDQTFLSDKIKSNWLSFIAPLDPRDCSATCLFAFRFTDGLIRVGMLGDGLIGVLKIDDAVMSLTEDKMDGFSNITTALSTNTTGKSWRFLTLQENLCSAVLLCTDGVSDDLTDTERFTREFIISHTGNLACVSASRNARIMLENWPTPKHSDDKTIVCLFRKGADDERS

SEQ ID NO: 51503 - DNA, 420 bp, Unknown
  Obtained from environmental sample
  misc_feature (1)..(420): n is a, c, g, or t
atgggggaagcgttttcaatagcaaagctcttgattgaagacaaagagatcataccgtcccgcgcgtaccgtccgacagtggtgctggtttcagacggagcgccgaccgatcaatgggagcaaccgcttgaatctttaatcaatgaagaccgctcttccaagtgttttttcatggcaatgggtatagggcaagatccgggcacaaaggttcttgaaaagtttatctcccaaaccccggtactggctgaagtaaacggcaataaagtcccgaataaagtgtttcaagcggcggatgctaaaagtatacgtgagttcttccgaaaggtgacaatgtcggtaaccacccgcagcaaatcgcaaaatccgaataatattccggcatcatcaaatccgtctgaagaagccggggggtactggtaa

SEQ ID NO: 51504 - protein, 139 aa, Unknown
  Obtained from environmental sample
  misc_feature (1)..(139): Xaa is any amino acid
MGEAFSIAKLLIEDKEIIPSRAYRPTVVLVSDGAPTDQWEQPLESLINEDRSSKCFFMAMGIGQDPGTKVLEKFISQTPVLAEVNGNKVPNKVFQAADAKSIREFFRKVTMSVTTRSKSQNPNNIPASSNPSEEAGGYW

SEQ ID NO: 51505 - DNA, 357 bp, Unknown
  Obtained from environmental sample
  misc_feature (1)..(357): n is a, c, g, or t
atgggagtttcaaaacggttaaaagaaatcgattcatctattcaaatcatacttatgcagccggattcgccgtttcacggacttgaaggaatgaagcatatggaatctacgataactccgaaaatatttgataaaagtattgccgatttgcacatgacggttaaaacggaagatgcttacaaaacggcgcgtcggcttgccgctgaagaaggcatatttgtcgggataagttccggggcaaacgtgtacgcggcaatggaattggcaaaaacgttgccggcgggctcacggatagcaacgatactgtgtgataacggcaaccgatatctgtcgcagccgttatggaaagaaatataa

SEQ ID NO: 51506 - protein, 118 aa, Unknown
  Obtained from environmental sample
  misc_feature (1)..(118): Xaa is any amino acid
MGVSKRLKEIDSSIQIILMQPDSPFHGLEGMKHMESTITPKIFDKSIADLHMTVKTEDAYKTARRLAAEEGIFVGISSGANVYAAMELAKTLPAGSRIATILCDNGNRYLSQPLWKEI

SEQ ID NO: 51507 - DNA, 402 bp, Unknown
  Obtained from environmental sample
  misc_feature (1)..(402): n is a, c, g, or t
atggaaagaaatataatgcttcaactttcttttgaattggaaaaaataataaggaaagacggcgaaacggcttatccgaatgaatgctgcggtgttttaatcggcgaagttgacaatgcgggagtaaaaacggtcaagagtacgctgaccatagataacgcgagggaagacagcgaacaataccaccgttttctaataacacctgaagatatgatgagagcggaacaaaccgcaagaataatgaaatatgatgttataggtttttaccactcgcacccagaccatccttcaactccgtcaggttatgataaagatcacgctttgcctttttactcgtatgtgattgtgtcggtggacagcggcaaggcgcagattcttaccaagctgggaacttaccgctga

SEQ ID NO: 51508 - protein, 133 aa, Unknown
  Obtained from environmental sample
  misc_feature (1)..(133): Xaa is any amino acid
MERNIMLQLSFELEKIIRKDGETAYPNECCGVLIGEVDNAGVKTVKSTLTIDNAREDSEQYHRFLITPEDMMRAEQTARIMKYDVIGFYHSHPDHPSTPSGYDKDHALPFYSYVIVSVDSGKAQILTKLGTYR

SEQ ID NO: 51509 - DNA, 906 bp, Unknown
  Obtained from environmental sample
  misc_feature (1)..(906): n is a, c, g, or t
ttgataaaagttcttattccttacgcgcttagagcatttaccgagcgtaacgcggaggtggaagtaaacggcggcactgcgggtgacgcgattaacgctcttgcaaacgcctacccctctcttaaaacccacctgttcacggaagacggtcagcttcgcgactttatcaacttgttcgtaggcggcgcaaatatcaacagtttgcaaggactgaatacgcctatcgcggataacggcgaattgatgattgtaccggcaatcgcgggcggtagtgacgcagagcttaccaatgaagaaatcgggcgttacagccgccatttgcttttgccggaaatcggcgtcgaggggcaaaaaaaattaaaggcggcgaaggttctcattgtcggcacgggggggcttggcgctccccttgccttgtaccttgcggcggcgggcgtggggacaatcgggctggtggattttgatgtagtagacgaatcaaatcttcagcggcaaattattcacagcacgcgcgatgtgggcagaccgaaagttgcttcggcaaaagacagaatcaagggaataaatcctctggtgaatgtggtaacgcataacgaaatgcttacaagcaaaaacgcgctggaactttttgccgactacgacattatcgccgacggaacggataatttccaaacacgctatcttgtaaacgacgcctgcgtttttttgggcaaacttaacgcctacggttccgtgtttcagttcgacggacaggcgacagttttcggtgcgaaagacggtccgtgttnacgttgtttgtacccttccccgcgcctccggggacttgtccttcatgtgcggaaggccgaagttatgggcgtactgcccggtattatcggaaccattcaagcggcgggaaacgattaa

SEQ ID NO: 51510 - protein, 301 aa, Unknown
  Obtained from environmental sample
  DOMAIN (4)...(90): ThiS family
  misc_feature (1)..(301): Xaa is any amino acid
MIKVLIPYALRAFTERNAEVEVNGGTAGDAINALANAYPSLKTHLFTEDGQLRDFINLFVGGANINSLQGLNTPIADNGELMIVPAIAGGSDAELTNEEIGRYSRHLLLPEIGVEGQKKLKAAKVLIVGTGGLGAPLALYLAAAGVGTIGLVDFDVVDESNLQRQIIHSTRDVGRPKVASAKDRIKGINPLVNVVTHNEMLTSKNALELFADYDIIADGTDNFQTRYLVNDACVFLGKLNAYGSVFQFDGQATVFGAKDGPCXRCLYPSPRLRGLVLHVRKAEVMGVLPGIIGTIQAAGND

SEQ ID NO: 51511 - DNA, 651 bp, Unknown
  Obtained from environmental sample
  misc_feature (1)..(651): n is a, c, g, or t
gtgcgaaagacggtccgtgttnacgttgtttgtacccttccccgcgcctccggggacttgtccttcatgtgcggaaggccgaagttatgggcgtactgcccggtattatcggaaccattcaagcggcgggaaacgattaaactcatcgtaggcggcgcaaaaccgcttgtcggccgtctccttatatttgacgcatggcgcatggcgttccgcgagttaaaacttgataaaaatcccgattgtcccgtatgcgggaaagctccttccattcacgaacttattgattacgaacaattttgcggtttgaaaaaaaacgccgacagcaaaccgatagatacgataaccgccctcgatttaaaaaaacgccttgataacggagataaaattcaatttatagatataagagaacctcatgaacgcgccattgtaaaatttccggacgcgaaagtaattcctctgggccagcttgaaaggcgcatggaagaattagacccgtcctgcgacgcggtgttcctgtgcaaaatcggacaacgcagtattttgggaatacgcacattacaggatgcgggatacaaaggcaaacttctgaatctgcaagatggactaaacgcgtgggcccgcgatgtagataaaagtatgccggtttattaa

SEQ ID NO: 51512 - protein, 216 aa, Unknown
  Obtained from environmental sample
  DOMAIN (115)...(208): Rhodanese-like domain
  misc_feature (1)..(216): Xaa is any amino acid
MRKTVRVXVVCTLPRASGDLSFMCGRPKLWAYCPVLSEPFKRRETIKLIVGGAKPLVGRLLIFDAWRMAFRELKLDKNPDCPVCGKAPSIHELIDYEQFCGLKKNADSKPIDTITALDLKKRLDNGDKIQFIDIREPHERAIVKFPDAKVIPLGQLERRMEELDPSCDAVFLCKIGQRSILGIRTLQDAGYKGKLLNLQDGLNAWARDVDKSMPVY

SEQ ID NO: 51513 - DNA, 834 bp, Unknown
  Obtained from environmental sample
  misc_feature (1)..(834): n is a, c, g, or t
atgaccaatcagaggatgctgtcgtacattgatgaagattctcccgtccattctctttgcggcgccacaaagtttatcatcttccttttatggtctatcctggttatggttagtttcaaaacccccattttacttgcatgggcaattctggggattgttttttttgccgtttcaaaaatccgtttttccgatatttcttttattgtaaaaataatggctctgtttctgggcttgaaccttgcggcaatttaccttttttcgccggaacagggcgtaaaaatttatcaaaccagacacattatattggaaggacagggacgttttaccctgaccgcagaacaacttttttacgaattcaacatactgctcaagtatatttcaatcattcctccggcgattctgttgattgttaccactaatccaagcgaatttgccgcgtctctgaatcgtatcggcgtttcctacacggcggcttacgcagtcagtttaacattacgctacattcccgacatacaacgtgattttgaggcaatttcccagtctcaacaggctcgcggactggaactttcccgcaaggcatcgtgggtaaaacggctcaaaagaatgacgcctctgctcttccctctgatcttttcatctttggatcgtatcgacgttataagccgcgccatggaactgcgcaggttcggcaaaaacaaaaaacgcagttggtattcggcgcggtctttcagtccggcggataaaactgccatgattataagcgcactgttgtttgccgccggaatttggtataccttctgcggcgggagcaggtttttcaatccgtttgaatag

SEQ ID NO: 51514 - protein, 277 aa, Unknown
  Obtained from environmental sample
  DOMAIN (12)...(238): Cobalt transport protein
  misc_feature (1)..(277): Xaa is any amino acid
MTNQRMLSYIDEDSPVHSLCGATKFIIFLLWSILVMVSFKTPILLAWAILGIVFFAVSKIRFSDISFIVKIMALFLGLNLAAIYLFSPEQGVKIYQTRHIILEGQGRFTLTAEQLFYEFNILLKYISIIPPAILLIVTTNPSEFAASLNRIGVSYTAAYAVSLTLRYIPDIQRDFEAISQSQQARGLELSRKASWVKRLKRMTPLLFPLIFSSLDRIDVISRAMELRRFGKNKKRSWYSARSFSPADKTAMIISALLFAAGIWYTFCGGSRFFNPFE

SEQ ID NO: 51515 - DNA, 699 bp, Unknown
  Obtained from environmental sample
  misc_feature (1)..(699): n is a, c, g, or t
ttggccaagtgcatctgcgggtttgtgcttccggattcaggggctgtttactatagaggacaggaccttgcggcgctttcgattatggaaagggccgaaaaaataggttatgttatgcaaaaccccaaccagatgatttcatctccgatgatcttcgatgaagtcgccttggggctgcggacaagaaacattcctgaggccgatgtgaaaacaagggtatacgaagcgcttaaggtatgcggattgtaccctttcagaaactggccggtgaacgccctgagctacggccagaagaagcggctgacaatcgccgctatcctggtgctgcgcccttccctcatgatccttgacgaaccgaccgcggggcaggattaccggcattacgccgaatttatggaattcctgttgggccttaaccgggatatgggaatatccctccttctgattacccatgacatgcacttgatgcttgagtatacctcaagggcggtggttctttccgaaggggcatgcattgccgacgaggagccgtttgaggcgcttaccaatgacgggattattgaaaaagcaagccttaaacggacaagcctttactctctggcgttgaaagccgaactcccggatccgcggggttttgtgggtcggtacatcgcctttgagaggcagagggcctttgacaaacaagggggcgggatatga

SEQ ID NO: 51516 - protein, 232 aa, Unknown
  Obtained from environmental sample
  DOMAIN (2)...(169): ABC transporter
  misc_feature (1)..(232): Xaa is any amino acid
MAKCICGFVLPDSGAVYYRGQDLAALSIMERAEKIGYVMQNPNQMISSPMIFDEVALGLRTRNIPEADVKTRVYEALKVCGLYPFRNWPVNALSYGQKKRLTIAAILVLRPSLMILDEPTAGQDYRHYAEFMEFLLGLNRDMGISLLLITHDMHLMLEYTSRAVVLSEGACIADEEPFEALTNDGIIEKASLKRTSLYSLALKAELPDPRGFVGRYIAFERQRAFDKQGGGI

SEQ ID NO: 51517 - DNA, 378 bp, Unknown
  Obtained from environmental sample
  misc_feature (1)..(378): n is a, c, g, or t
ttgcgtttttccagatgcaccctcaaaattgcctcgcgcccaaccaaatccggaagcccaacaacaacctgcctgtcaaagcggccaggtcttagcaatgctttatccaaaacatcggggcggtttgtggctgcaactaaaataactccttcgtttggagcaaaaccatccatttcaacaagcaattggttcaaggtttgctcgcgctcatcgtgcccgccgccaagccctgcgccgcgctgcctgccaaccgcgtcaatttcgtctatgaacaaaatacaaggggcattcttttttcctgtttcanataaatccctaactcggcttgcaccaacgcccacaaacatctcaacaaaatcagaaccgctcatactgtaa

SEQ ID NO: 51518 - protein, 125 aa, Unknown
  Obtained from environmental sample
  misc_feature (1)..(125): Xaa is any amino acid
MRFSRCTLKIASRPTKSGSPTTTCLSKRPGLSNALSKTSGRFVAATKITPSFGAKPSISTSNWFKVCSRSSCPPPSPAPRCLPTASISSMNKIQGAFFFPVSXKSLTRLAPTPTNISTKSEPLIL

SEQ ID NO: 51519 - DNA, 891 bp, Unknown
  Obtained from environmental sample
  misc_feature (1)..(891): n is a, c, g, or t
gtgtcggaagagagctggcgcctgatacctgaaaagctccttacccctgccatggaaggaattttacaggtagtaacaggctttatcgccaaagacgcaatgggaaacatcactaccctgggcaggggcggctccgatttttccgcagccatgatcgccgccgcctgcggtgcggaagaactgcagatctggaaggacgtagacggcattctgacagccgatcccaggatagtgagcggcgcaagggtggtcgagaccataacttacgaggcagccagggaaatggccttttacggcgctcaggtcctccatccgcaatcaatgctaccgtgcatgaagaccaatactccagtgataataaaaaattcctacaaccccgaagcgcccggtaccaggatcgtccgttcccttgaggggaagaaaagccccatccaggccatagcttcccgaaaaaacataaccttggtagacatagtttcatcccgcatggtgggccactacggatttttggccgaagtttttgcctgttttgccaaatacggcgtttcagtggacatggttgccaccagcgaagtgtcaatttctcttaccctggacgcttttcacgacctaaaagagctgaaaaaagagctttcccgaatcgccagcgtagagataaaaaccaaaaaggcaattgttacgattatcggggacgtaggccgttcctcggagatacttgcccgctcatttaatacctgtaaactcctgggggtacaggttcaaatggtttcccagggggcaagcaagataaacataagctttattgtggacgataacgaagcccctaatgtaatcaagggcctccacgcggacttttttgaatcatttaaagcggattatcgacgaaactga

SEQ ID NO: 51520 - protein, 296 aa, Unknown
  Obtained from environmental sample
  DOMAIN (1)...(122): Amino acid kinase family
  misc_feature (1)..(296): Xaa is any amino acid
MSEESWRLIPEKLLTPAMEGILQVVTGFIAKDAMGNITTLGRGGSDFSAAMIAAACGAEELQIWKDVDGILTADPRIVSGARVVETITYEAAREMAFYGAQVLHPQSMLPCMKTNTPVIIKNSYNPEAPGTRIVRSLEGKKSPIQAIASRKNITLVDIVSSRMVGHYGFLAEVFACFAKYGVSVDMVATSEVSISLTLDAFHDLKELKKELSRIASVEIKTKKAIVTIIGDVGRSSEILARSFNTCKLLGVQVQMVSQGASKINISFIVDDNEAPNVIKGLHADFFESFKADYRRN

SEQ ID NO: 51521 - DNA, 930 bp, Unknown
  Obtained from environmental sample
  misc_feature (1)..(930): n is a, c, g, or t
atgaacgacgcccctccctccaccaagagcgtgaacctctacctaatggatggtgtcccaaacggccgcgttgaatgtaaactcggcgactggatgggcgtggcatacagaatcccgcgcgtcaggctcccggaatgcaaggacatgcctcgcctggaccagagtggggtttatttcctgttcggcagggacgacgacgatgaaccattcgtctatgtgggtcaggccaatgtgatattgaagcgctgggcacaacaccacgctaaccctaaggagggctggaaagactggacagaggccatagcgttcacggacacaagcggcgactggatgagcgccacggaaataagctggctcgaaaattacttctacaaccttgccaagagcactggccgctgtgtagtcaagaacggcaacgagcccaacaagcccccagtcggtcaggcgaaagagagtgaaatcatggcgtatgcggccaatgcaagaatcgtcatgggtgttctgggggcgcgctatcaggtattcgaaccgctccccaccaagcgaatccccgcgccagcggacagcggtcagaccacgtcagaccctgaggcaaagcagggcgattttgagataaagcaaggtgacatagcagcatacggtcagcgcaccagcgatggctttgtcgtgttcaaggacagcaagataaagacaacggttgctcaaacttgccccaagagcgcgataaggcagcgcgaacgccacgccgcgaaaatctcaccagacggcatcctgcaagaggacatccttttcgacagcccaagcggagccgcatatttcgtcaccggcaactccataagcggcaatgtcgcttggaagaccgcagatggcaggacactgaaagaagttgaggcgagtgaaacggctggactgactgaaggaggggcatga

SEQ ID NO: 51522 - protein, 309 aa, Unknown
  Obtained from environmental sample
  misc_feature (1)..(309): Xaa is any amino acid
MNDAPPSTKSVNLYLMDGVPNGRVECKLGDWMGVAYRIPRVRLPECKDMPRLDQSGVYFLFGRDDDDEPFVYVGQANVILKRWAQHHANPKEGWKDWTEAIAFTDTSGDWMSATEISWLENYFYNLAKSTGRCVVKNGNEPNKPPVGQAKESEIMAYAANARIVMGVLGARYQVFEPLPTKRIPAPADSGQTTSDPEAKQGDFEIKQGDIAAYGQRTSDGFVVFKDSKIKTTVAQTCPKSAIRQRERHAAKISPDGILQEDILFDSPSGAAYFVTGNSISGNVAWKTADGRTLKEVEASETAGLTEGGA

SEQ ID NO: 51523 - DNA, 561 bp, Unknown
  Obtained from environmental sample
  misc_feature (1)..(561): n is a, c, g, or t
atgaggcaggtgattcttaaaaacctgccctctttcatggaaaagatggaagtgttttccggggtagtgctcagcgaagactatgaaatgataccggcgctgcatattccgactgtgatcaggatggcgcggcgcacaaagaccattgacatgaaaaaacgccatgtcgattacgagcgtatgcgcaaatcaattctggtggtggacgattcccgtccgacgcgggatatagagcgggatattctggaggccgagggctacaaagtggatgtcgccgcggacggttccgaagcgcttgccgctgcgaaaaacgcgcaatacgatttgatctgtaccgatattgtaatgccgaatatggacggatttatgctggcggagaacatacgcaagaacgaccgtttgaaaaatatccctattatcgccatttcgtccaaaagcggcgagaaagatcaaaacaaagccgcgcttctcgggataaaccgctttatcgcgaaaaactcgtttaacgtccacaatttaacggccattgtgcgggaactaatcggagaagccaatggataa

SEQ ID NO: 51524 - protein, 186 aa, Unknown
  Obtained from environmental sample
  DOMAIN (63)...(178): Response regulator receiver domain
  misc_feature (1)..(186): Xaa is any amino acid
MRQVILKNLPSFMEKMEVFSGVVLSEDYEMIPALHIPTVIRMARRTKTIDMKKRHVDYERMRKSILVVDDSRPTRDIERDILEAEGYKVDVAADGSEALAAAKNAQYDLICTDIVMPNMDGFMLAENIRKNDRLKNIPIIAISSKSGEKDQNKAALLGINRFIAKNSFNVHNLTAIVRELIGEANG

SEQ ID NO: 51525 - DNA, 867 bp, Unknown
  Obtained from environmental sample
  misc_feature (1)..(867): n is a, c, g, or t
atggcggttgacaaatccaagtacattaaccaattcgccgaagaagggctcgagaatatctcgaccgtgcaaaagctgctttttgaaattaaagagggctcttccgtacaggatgatcttgtcacgctgatgcgcgcacttcataccttaaagggttcggcgcgtatgctggaatttaaaaacattgaaaccgtctctcacgcgctggaaacggcgttcgcttccttaaaagaagaaagaatatccctcaatgacaaagcggtaaagctgtttcttgccggactggacgaagttaaaaccggcgtcgagaaaatcaaagccggcggaaaagacgacataagggcggctgtttttcagaaggaactgtcgtccctcgccgcgaatgaggaatacgttataccagaagccgagacggaagagaaaactcagcagaaacagaaacccgaggacgcaaaacagactaaagaagatttaaaatccgaaagcataagaataccgcttgaacggatcgacgaagttatccacgacatggcggcgcttcaatcgctggaaatcatcgccagaaatatcgcgcgggacaccgaagctctcagcttggcctcaagaaagttttcaaaactgatggctaccagcctgccctggaattcccccataatccaggaattccgccccatagaattgatgacgggcaaactcggctccctcgtaagaaattactcccttgacgttggcaatcacatcagaaacgcttatgacagcataatctccttaaggatgctgcccctttccacggtgcttgacgaatacccgcgccagggtttttaccatcgcctccgatttaggcaagaaggtaaaaatacagattga

SEQ ID NO: 51526 - protein, 288 aa, Unknown
  Obtained from environmental sample
  DOMAIN (7)...(108): Hpt domain
  misc_feature (1)..(288): Xaa is any amino acid
MAVDKSKYINQFAEEGLENISTVQKLLFEIKEGSSVQDDLVTLMRALHTLKGSARMLEFKNIETVSHALETAFASLKEERISLNDKAVKLFLAGLDEVKTGVEKIKAGGKDDIRAAVFQKELSSLAANEEYVIPEAETEEKTQQKQKPEDAKQTKEDLKSESIRIPLERIDEVIHDMAALQSLEIIARNIARDTEALSLASRKFSKLMATSLPWNSPIIQEFRPIELMTGKLGSLVRNYSLDVGNHIRNAYDSIISLRMLPLSTVLDEYPRQGFYHRLRFRQEGKNTD

SEQ ID NO: 51527 - DNA, 1008 bp, Unknown
  Obtained from environmental sample
  misc_feature (1)..(1008): n is a, c, g, or t
ttgacgaatacccgcgccagggtttttaccatcgcctccgatttaggcaagaaggtaaaaatacagattgagggcgctgaaaatgaaaatgataaaaacctgatcgaatctttatccgaggtattcctgcacatgataaggaattccatagatcacgggattgaatcccctcaggaacggctggcggcggggaaaaatgaaaccggccttttaacaattaactgcgtccgtgaaagcggaaacatgaaggttacgattaccgacgacggaaaaggcattgatatagaaggaataagaaaaaagatcgtagataaaggcattgtttccaaagaagaggcggccgaccttgaggaaggggaattaataaattatatattccaaagcgggttttcaaccgcggagaaactttccagcgtatcggggcggggcgtcggaatggatgccgtaagaagcaatattgaacggatgaaaggcagtatcgccatacaaaccaaagcaggcgaggggacgacatttacaatttccgtcccgctgtcgcttgccgcccttatgggcttccccattacttcgggcagcatgaaatttattatccccgccaacttcgtggatacggtcatgcttatcaatacaaaggatattattaccgtagtggacagaccgggtataaaatacaacgggagaataatcaagcttttttatctgcatcatgttttaaagatccctatagacgaaaaaaaggaaacaggcgattcaatctttgtcgccatagtccaggcttatgaggaaactgtggcgctggctgtaaatcaagtcagcagcatgaggcaggtcattcttaaaactttgccttctttcatggaaaagatggaagttttttcgggagtggtgttaagcgaggactatgaaatgattcccgcgcttcacattcccacggtaataaggatggcgcggcgcacaaaaactatagatatgaaaaaacgccatgttgattatctcgtccgaatctga

SEQ ID NO: 51528 - protein, 335 aa, Unknown
  Obtained from environmental sample
  DOMAIN (182)...(317): CheW-like domain
  misc_feature (1)..(335): Xaa is any amino acid
MTNTRARVFTIASDLGKKVKIQIEGAENENDKNLIESLSEVFLHMIRNSIDHGIESPQERLAAGKNETGLLTINCVRESGNMKVTITDDGKGIDIEGIRKKIVDKGIVSKEEAADLEEGELINYIFQSGFSTAEKLSSVSGRGVGMDAVRSNIERMKGSIAIQTKAGEGTTFTISVPLSLAALMGFPITSGSMKFIIPANFVDTVMLINTKDIITVVDRPGIKYNGRIIKLFYLHHVLKIPIDEKKETGDSIFVAIVQAYEETVALAVNQVSSMRQVILKTLPSFMEKMEVFSGVVLSEDYEMIPALHIPTVIRMARRTKTIDMKKRHVDYLVRI

SEQ ID NO: 51529 - DNA, 516 bp, Unknown
  Obtained from environmental sample
  misc_feature (1)..(516): n is a, c, g, or t
atggacgcagaagaattcgatgcagagggtcgcatggtcgttagccgactgggtgacttgacgctgttcggcggctacttccccaatgccagccaagggctagtgcgacttccatacaaaagggctttcgccaaaaaaatagcaaggctggtcagcgacgaacattcagccgacagacaagttattttggtgggcgacatgaacgtggccccgcaggagattgacttggcccgccccaaggataacgttggcaacccaggctttacgctggaagagcgggaagatttccaaggctacttgcgggcagggctggtggacgtgctgcgcgagcgcaaccaaggcgtacccagtctgtacacttggtggacccagagaggcggggcgcgggcgagaaacgtgggatggaggattgatttatttttagccagcgcggcccttgtggaacggataaaaaatgcggcgatccacagtgacgtgtttgggtctgaccactgccccataagcatcgagctataa

SEQ ID NO: 51530 - protein, 171 aa, Unknown
  Obtained from environmental sample
  DOMAIN (1)...(171): Endonuclease/Exonuclease/phosphatase family
  misc_feature (1)..(171): Xaa is any amino acid
MDAEEFDAEGRMVVSRLGDLTLFGGYFPNASQGLVRLPYKRAFAKKIARLVSDEHSADRQVILVGDMNVAPQEIDLARPKDNVGNPGFTLEEREDFQGYLRAGLVDVLRERNQGVPSLYTWWTQRGGARARNVGWRIDLFLASAALVERIKNAAIHSDVFGSDHCPISIEL

SEQ ID NO: 51531 - DNA, 372 bp, Unknown
  Obtained from environmental sample
  misc_feature (1)..(372): n is a, c, g, or t
gtgcttcacccccttgtaatgccgatctgcagaaaaaagcagggacgtattattaccatttcttcggtatcgggaatcatgggaaacaggggacaggtaaattacagcgcggcaaaagctggtattatcggagcgacaaaagctttggcggcggaactcgcaagccgttccataaccgtaaattgcattgcgcccggcattatcgaaaccgaaatgatccgcgatgtgccgatggacatagttcttccgtcaattccaatgggccgcaccggaaaaccggaagaagtcgcggctttagccgtattccttctttctgaagaagcttcttatataacgcggcaggtaatttcagttaacggaggaatgttatga

SEQ ID NO: 51532 - protein, 123 aa, Unknown
  Obtained from environmental sample
  misc_feature (1)..(123): Xaa is any amino acid
MLHPLVMPICRKKQGRIITISSVSGIMGNRGQVNYSAAKAGIIGATKALAAELASRSITVNCIAPGIIETEMIRDVPMDIVLPSIPMGRTGKPEEVAALAVFLLSEEASYITRQVISVNGGML

SEQ ID NO: 51533 - DNA, 1224 bp, Unknown
  Obtained from environmental sample
  misc_feature (1)..(1224): n is a, c, g, or t
ttgagacgagtggtcgttaccggcggttcgatagtcagcgcattgggaagcgaatggaccgatatatttgcaaagctcaaagagaaaaaaaatcttgtccgcagaatggacgagtgggacagatacacccgcatgaatacaagacttgccgctcctgtagattttaccatgcccgattatcctcgtaaaaaaacccgaggactcggcagagtcgcccagcttgctctggtttcagcggacagagcgctgactcatgctggttttaacgctgaagatcccgaattaaaaaacggacgctgcggcgtcgcttatggttcatcaatgggcagcgttgattctcttatggatttttacagtatgcttgtgttagacgatctaaccaatatgagcgccaccacctacattaaagcgatgcctcaaacctgcgccgctaatatcggcgtatttttcggcctgaccggaagaattattacaactaacacagcctgcacatcaagcagtcaggcgattggttttgcttatgagacggtaaagcggggtattcaggacattatgctggcgggcggcgccgaagaattaagcgcggcggacgccgcggtctttgatactctnttcgccgcaagttcaaaaaatgacagccccggaaaaaccccggccgcttatgataaaaaccgcgacggtcttgttataggcgaaggggcgggaacattaatcctggaagaatacgaacacgcggtaaagcggggagcaaggataattgccgaaatcgtgggattcggaaccaataccgacggcactcacattacccagccaaaccgcggtactatgggcatagccatgaaactcgccttggaagacgcggggctggatccggcggccattgtttatgtaaatacccacggaaccgccaccgatacgggcgatgtcgccgaaagctgggctaccacggatattttccggaggcctgttccggcaagtacgctaaaaagttatataggccacactctgggagcgtgcggcgttattgaagcgtggattgcaattaacatgatgaaggaaaaatggttctgccccaaccttaaccttgaagaacttgatccccgctgcggcccgcttgattatattaccggaaacgggcgtgagattggcggagaatatattatgtccaataatttcgcctttggcggggttaacacctcgcttatcttcaggaatctgccatga

SEQ ID NO: 51534 - protein, 407 aa, Unknown
  Obtained from environmental sample
  SIGNAL (1)...(16)
  DOMAIN (2)...(245): Beta-ketoacyl synthase, N-terminal domain
  misc_feature (1)..(407): Xaa is any amino acid
MRRVVVTGGSIVSALGSEWTDIFAKLKEKKNLVRRMDEWDRYTRMNTRLAAPVDFTMPDYPRKKTRGLGRVAQLALVSADRALTHAGFNAEDPELKNGRCGVAYGSSMGSVDSLMDFYSMLVLDDLTNMSATTYIKAMPQTCAANIGVFFGLTGRIITTNTACTSSSQAIGFAYETVKRGIQDIMLAGGAEELSAADAAVFDTLFAASSKNDSPGKTPAAYDKNRDGLVIGEGAGTLILEEYEHAVKRGARIIAEIVGFGTNTDGTHITQPNRGTMGIAMKLALEDAGLDPAAIVYVNTHGTATDTGDVAESWATTDIFRRPVPASTLKSYIGHTLGACGVIEAWIAINMMKEKWFCPNLNLEELDPRCGPLDYITGNGREIGGEYIMSNNFAFGGVNTSLIFRNLP

SEQ ID NO: 51535 - DNA, 744 bp, Unknown
  Obtained from environmental sample
  misc_feature (1)..(744): n is a, c, g, or t
ttgcgcaaaaacatagacgcgcttaaagccgagcttaaaaacaactccaagccgaccgcaaaacttcttgtttcgctggccgactattttgtaaaacgttcagtgtgggcgttcggcggcgacggctgggcttacgacatcggtttcggcggtttggatcacgttatcgcttccggcaagaacgtaaaccttttgtgcatggacacggaagtttattccaacaccggcggacagatgtccaaagcgacgcctgtcggcgcaatcgcgaaattcgccaatgccggaaaggatattaccaagaaagacctcggcgcaatagcgatgagctacggttatgtgtatgtcgccaaagtttcaatgggcgcgaacatgaatcaggtaatcaaagcgttccgcgaggcggaatcctacgacggcccgtcgcttataattgcgtactcgcactgtatcaaccacggaatcgacatgagcaagggattggagcagggcaaggcagttgttacaagcggtctttggccgttgttccgttacgatccgagacttaaggatcaggggaaaaacccgttccagcttgactccaaagaggcgaccacaagcattgaagactttatgtacaaggaagtccgtttcaagagcctgaaagccgccagcccggaccgcgccgatgcgctgcttgcaaaagcaaaagcgcatgctgaacgggtatggaaagagtacaagtatattgcggatagaccgttctaa

SEQ ID NO: 51536 - protein, 247 aa, Unknown
  Obtained from environmental sample
  DOMAIN (18)...(145): Thiamine pyrophosphate enzyme, C-terminal TPP binding domain
  misc_feature (1)..(247): Xaa is any amino acid
MRKNIDALKAELKNNSKPTAKLLVSLADYFVKRSVWAFGGDGWAYDIGFGGLDHVIASGKNVNLLCMDTEVYSNTGGQMSKATPVGAIAKFANAGKDITKKDLGAIAMSYGYVYVAKVSMGANMNQVIKAFREAESYDGPSLIIAYSHCINHGIDMSKGLEQGKAVVTSGLWPLFRYDPRLKDQGKNPFQLDSKEATTSIEDFMYKEVRFKSLKAASPDRADALLAKAKAHAERVWKEYKYIADRPF

SEQ ID NO: 51537 - DNA, 567 bp, Unknown
  Obtained from environmental sample
  misc_feature (1)..(567): n is a, c, g, or t
atggcaaaagaaatcggcagtttcgctaaaaccatgtctgatctaatcaatactttcggagagctttcggcgcaaagcggcgagattaccgccgcgctggacagtcttaacagccagagtgaaatggtaaaaaccgactatgtcgagatactgtcaatgacggataaactgcgcgcggcaatgtataatttgactatgctgtcaaagaaaaaggtcattgtagttgacgatgaagaaaccgtccttaccatgacaaaaaacacgctgaaagacggttataacgttacaacagccaattccggcaaagaagctttggacttgttcttaaaggggtatgtccctcatttgattttactggatttgtatatgcctgaaatggacggctgggatgcctttgtcagaataagcaacataggccaattacacaacatcccgatagctatatacacgacgtcgaacgaccagaaagacaaagacaaagcggaagaacttggcgcggttgaatacataaacaagccgatcaataaaaccgaactgcttgaaaaagtatcaaaattgttggggtaa

SEQ ID NO: 51538 - protein, 188 aa, Unknown
  Obtained from environmental sample
  DOMAIN (70)...(184): Response regulator receiver domain
  misc_feature (1)..(188): Xaa is any amino acid
MAKEIGSFAKTMSDLINTFGELSAQSGEITAALDSLNSQSEMVKTDYVEILSMTDKLRAAMYNLTMLSKKKVIVVDDEETVLTMTKNTLKDGYNVTTANSGKEALDLFLKGYVPHLILLDLYMPEMDGWDAFVRISNIGQLHNIPIAIYTTSNDQKDKDKAEELGAVEYINKPINKTELLEKVSKLLG

SEQ ID NO: 51539 - DNA, 648 bp, Unknown
  Obtained from environmental sample
  misc_feature (1)..(648): n is a, c, g, or t
gtgataaccagcgacaaggggcttgccggcggttataacgcgaatgtcttccgaagcgtaaacgagttatgcgcgaatattaaaaatccgctgctgatacttatcggcggcaatgtcggttaccgctattttgttcattctccgtatacaattcttgaaaatttttcttttcatccggagatacccaccgtggaacacgccgcggatgtttcagagtatgtggtttcccagtacctttccggggtttttgattctatacatatcgtgtacacgcacatgttcagcatggtaagactcgtgccgaccgtacatcagattatcccccttgtgaaggaaaaaatacagaatgatctttttgaaataggcggcgaaaaaagggtggatttaaaatttgaatttctgccgtctatgggggcggtttttgacgcgctggttccccagtatataaagggcgtaatttacggggcgatggtggaatcgcacgccagcgaacagagcgcgcgcatgaaggcgatggacgaggcttccaaaagcgcggaagatatgctcgtctctttgcggataagttacaaccgcgcgcgtcaggcgggcattacccaggaaatgtcggagataacgggcgggtccacggcgttggccgacaaatga

SEQ ID NO: 51540 - protein, 215 aa, Unknown
  Obtained from environmental sample
  DOMAIN (2)...(212): ATP synthase
  misc_feature (1)..(215): Xaa is any amino acid
MITSDKGLAGGYNANVFRSVNELCANIKNPLLILIGGNVGYRYFVHSPYTILENFSFHPEIPTVEHAADVSEYVVSQYLSGVFDSIHIVYTHMFSMVRLVPTVHQIIPLVKEKIQNDLFEIGGEKRVDLKFEFLPSMGAVFDALVPQYIKGVIYGAMVESHASEQSARMKAMDEASKSAEDMLVSLRISYNRARQAGITQEMSEITGGSTALADK

SEQ ID NO: 51541 - DNA, 1413 bp, Unknown
  Obtained from environmental sample
  misc_feature (1)..(1413): n is a, c, g, or t
gtggttcaggtcggcgattccgtcgccacggtctacggccttaacgacgcggtttacggggagttagtcgaatntgcatcaggcgcccacgggatcgttttcaaccttgaagaagaaaacgcgggctgcgtaattttaacgggcgagtccctagtcaaagacggcgaggaagtaaaaagaaccggcaaggttgtgtccattccttcgggaagcggatttttcggcagagtggtaaaccccctgggcgaagctcttgacggcaaggggcctgtaacggccgaagtttccatgcctatggagtcccccgccgcgcccgtgatcgacaggggaagcgttgacacaccgcttcaaacaggctgcgtctccattgacgcgatgatccccatagggcgcggccagcgcgagcttataataggcgaccgccagacgggaaagacctcaatcgccattgacacgataatcaaccagaaagggaaaaacgtcatctgcatatactgcgccatcggacagaaagcttcttccatagtggcgattgtcaacagccttgaaaaacacggcgcgatggactacacatttgtggtgcttgcggcggcttccgattcggcggcccttcaatatatcgcgccctactcggccgtcgccatggcggaatattttttgcgtcagggaaaagacgtgcttgtggtttacgacgatctttccaagcacgcggtcgcttaccgcgcggtcagcctgcttctgcgcaggccgccgggccgcgaggcttttcccggcgacgtgttctaccttcattcgcggcttttggagcgcgcggtaaaactttcaaaggcaaagggcggcggttcaatcaccgcgctgccgattgttgagactcaggccggcgacatttcggcatacattcccacaaacgtaatctcaattacggacggacagatattcctggattccgagttgtttaattcaggttttcgtccggccatagacgtagggctttctgtaagccgcgtcggaggttcggcgcagacaaaggcgatgcgcaaaatttcaggccgcatcaggctggacctggcgcagtaccgggagatggcggccttcgcccagttcggcagcgatttggacaaggccacccaggacaaactggcgcagggcgaaagactcatggaagtgctgaaacagccacagctttcgccgtacccgctggcggaacagatcgccattctttttctcgcgatagaaggttaccttcttgatatcaagactgaaaatgtttccgcgtttgtaaaagactttttggcgcaccttaaagaccagaaacaggatctgatgaggggcataactgaaacaggagtagtttcaaaagaaatggaagacgaattgcgcttaacggttgaaaattttaaaggaaaaaagtaa

SEQ ID NO: 51542 - protein, 470 aa, Unknown
  Obtained from environmental sample
  DOMAIN (1)...(62): ATP synthase alpha/beta family, beta-barrel domain
  misc_feature (1)..(470): Xaa is any amino acid
MVQVGDSVATVYGLNDAVYGELVEXASGAHGIVFNLEEENAGCVILTGESLVKDGEEVKRTGKVVSIPSGSGFFGRVVNPLGEALDGKGPVTAEVSMPMESPAAPVIDRGSVDTPLQTGCVSIDAMIPIGRGQRELIIGDRQTGKTSIAIDTIINQKGKNVICIYCAIGQKASSIVAIVNSLEKHGAMDYTFVVLAAASDSAALQYIAPYSAVAMAEYFLRQGKDVLVVYDDLSKHAVAYRAVSLLLRRPPGREAFPGDVFYLHSRLLERAVKLSKAKGGGSITALPIVETQAGDISAYIPTNVISITDGQIFLDSELFNSGFRPAIDVGLSVSRVGGSAQTKAMRKISGRIRLDLAQYREMAAFAQFGSDLDKATQDKLAQGERLMEVLKQPQLSPYPLAEQIAILFLAIEGYLLDIKTENVSAFVKDFLAHLKDQKQDLMRGITETGVVSKEMEDELRLTVENFKGKK

SEQ ID NO: 51543 - DNA, 354 bp, Unknown
  Obtained from environmental sample
  misc_feature (1)..(354): n is a, c, g, or t
atgaaggtagaacacgtcgccgggaaaagcctcgcggcccggcggcctgcgcagaagcaggctgaccgcgcggtaagcgaccgcgtgcttggaaagatcgtcgtaaaccacaagcacgtcttttccctgacgcaaaaaatattccgccatggcgacggccgagtagggcgcgatatattgaagggccgccgaatcggaagccgccgcaagcaccacaaatgtgtagtccatcgcgccgtgtttttcaaggctgttgacaatcgccactatggaagaagctttctgtccgatggcgcagtatatgcagatgacgtttttccctttctggttgattatcgtgtcaatggcgattga

SEQ ID NO: 51544 - protein, 117 aa, Unknown
  Obtained from environmental sample
  misc_feature (1)..(117): Xaa is any amino acid
MKVEHVAGKSLAARRPAQKQADRAVSDRVLGKIVVNHKHVFSLTQKIFRHGDGRVGRDILKGRRIGSRRKHHKCVVHRAVFFKAVDNRHYGRSFLSDGAVYADDVFPFLVDYRVNGD

SEQ ID NO: 51545 - DNA, 1587 bp, Unknown
  Obtained from environmental sample
  misc_feature (1)..(1587): n is a, c, g, or t
gtgattgggccggagatacgcttaaggcttgccgaatccgttgaaaccgcgctgcaaacctcagacgggctgctgttggtattgagccaaaaccccgacagttccgccaaaggcggaattcatgaaaatttcttttcacaaaaaaacgcctgccccgactgcggcgtttccattcccgaattgcagccgcgcctcttttcgtttaacaaccccttcggggcctgcccaagctgttccggcctcggttccaagctggagtttgaccctgatctggttattcccaacccctcgctttcttttaacgagggcggcattgttccctataacccggacagcgcctggcacagcagccgctttgaaagcctcgcgaaacattataaattcagcctggacacgccgctgaagacattaccaaaaaaaatcatggacgcgattctgtggggaagcagagatgaaataaaagttcgttacaacaatcgggaaggaaccggtcattttgaataccagtcgagattccccggagtgctggaagatttgaaacggcgctatctggaaacccagtcgccgggcgtaaaggaatggcttgagaaattcatgagccagaagcactgcgaagactgcgaaggcaagaggctgaaaccggaagtgctgggcgtgaccgtcgccggcaagaacatctgggagctttccagtctttccgtaaccgactcattaaaattttttgaatcggtaaaatttaacaaaaacgaaaaaaagatcgcctaccagatattaaaggaaattacggcgcggctgggctttatgcgtaatgtcgggcttgactacttaagccttgagcgcaaggcgtctacgctttcaggcggcgaagcccaaaggataaggctggcgacgcagattggatcaagccttgtgggggtgctgtatatccttgacgagccgtccataggcctgcaccagcgggacaaccggcggctcatagacacgcttctgtatctgcgcgatcttggcaacacccttatcgttgtggagcatgacgagcagaccctgcgcgtagccgaccatatcgtagacctggggcccggcgcgggcgtgcacggcggcaggatcgtagcgcagggcagccccgaagaagtaatgagggtgccggaaagccttaccgggcagtacctggcgggaaccctcgctattgagatccccaaagaacgcagaaagggaaacggaaaatttataaagatgaggggggtaagcgagcataaccttaaaaacatcaatgtggatattccccttggggttttcacctgcattacaggcgtgtcaggatcaggcaagtccacgctaatgtccgacgtgctgtacccggcgctggcgaacagggtgtacggctccaaccatcccgagggaagctataaagatattaaaggcgtggaatttattgacaaggttattgacattgatcagagccccataggcaggacgcccagatccaatccgattacctatgtcggaggttttaccgcgataagggacatattcgcgaacctgcccgagtcgaaaatgcgcggctacaggcccgggcgttttcattaa

SEQ ID NO: 51546 - protein, 528 aa, Unknown
  Obtained from environmental sample
  DOMAIN (209)...(361): ABC transporter
  misc_feature (1)..(528): Xaa is any amino acid
MIGPEIRLRLAESVETALQTSDGLLLVLSQNPDSSAKGGIHENFFSQKNACPDCGVSIPELQPRLFSFNNPFGACPSCSGLGSKLEFDPDLVIPNPSLSFNEGGIVPYNPDSAWHSSRFESLAKHYKFSLDTPLKTLPKKIMDAILWGSRDEIKVRYNNREGTGHFEYQSRFPGVLEDLKRRYLETQSPGVKEWLEKFMSQKHCEDCEGKRLKPEVLGVTVAGKNIWELSSLSVTDSLKFFESVKFNKNEKKIAYQILKEITARLGFMRNVGLDYLSLERKASTLSGGEAQRIRLATQIGSSLVGVLYILDEPSIGLHQRDNRRLIDTLLYLRDLGNTLIVVEHDEQTLRVADHIVDLGPGAGVHGGRIVAQGSPEEVMRVPESLTGQYLAGTLAIEIPKERRKGNGKFIKMRGVSEHNLKNINVDIPLGVFTCITGVSGSGKSTLMSDVLYPALANRVYGSNHPEGSYKDIKGVEFIDKVIDIDQSPIGRTPRSNPITYVGGFTAIRDIFANLPESKMRGYRPGRFH

SEQ ID NO: 51547 - DNA, 354 bp, Unknown
  Obtained from environmental sample
  misc_feature (1)..(354): n is a, c, g, or t
atgctcgcttacccccctcatctttataaattttccgtttccctttctgcgttctttggggatctcaatagcgagggttcccgccaggtactgcccggtaaggctttccggcaccctcattacttcttcggggctgccctgcgctacgatcctgccgccgtgcacgcccgcgccgggccccaggtctacgatatggtcggctacgcgcagggtctgctcgtcatgctccacaacgataagggtgttgccaagatcgcgcagatacagaagcgtgtctatgagccgccggttgtcccgctggtgcaggcctatggacggctcgtcaaggatatacagcacccccacaaggcttga

SEQ ID NO: 51548 - protein, 117 aa, Unknown
  Obtained from environmental sample
  misc_feature (1)..(117): Xaa is any amino acid
MLAYPPHLYKFSVSLSAFFGDLNSEGSRQVLPGKAFRHPHYFFGAALRYDPAAVHARAGPQVYDMVGYAQGLLVMLHNDKGVAKIAQIQKRVYEPPVVPLVQAYGRLVKDIQHPHKA

SEQ ID NO: 51549 - DNA, 537 bp, Unknown
  Obtained from environmental sample
  misc_feature (1)..(537): n is a, c, g, or t
ttgataatacggtcattgtattttatttcaagtttgtcttccgatgaaattatctcatcgcgttttataagcattatcgcttctacaaagttagccggtataatgaatttcattccgttgcattctataggaacgcccataagcgccgctatagacagcggaatcataatcgtaaattttgagcccttgccttgttcgctgtcaacgacaatactgccttttaaggcttctatactgtcgcggactacgtccattcctacgcctctgcctgaaatattgcttgttttttccgatgttgaaaatccgctctggaaaataaaatctgtaagttcttctttagaaagattttttgaagcttcttcgtcaattaacccctcttttacaatcttttgccggattttctcggtatcaatgccttttccgtcgtcggaaattataatcttcatattgccgctttcacgcgaacaaataattgatattttaccagtttcttcttttcccgcggcaatgcgttcctgcggcgtttcaataccatga

SEQ ID NO: 51550 - protein, 178 aa, Unknown
  Obtained from environmental sample
  misc_feature (1)..(178): Xaa is any amino acid
MIIRSLYFISSLSSDEIISSRFISIIASTKLAGIMNFIPLHSIGTPISAAIDSGIIIVNFEPLPCSLSTTILPFKASILSRTTSIPTPLPEILLVFSDVENPLWKIKSVSSSLERFFEASSSINPSFTIFCRIFSVSMPFPSSEIIIFILPLSREQIIDILPVSSFPAAMRSCGVSIP

SEQ ID NO: 51551 - DNA, 1380 bp, Unknown
  Obtained from environmental sample
  misc_feature (1)..(1380): n is a, c, g, or t
atgacagacaaagaaacaaatgaaaaaatcagacgcgatgaatacgacggtgaaaaattaataaacaaattcagatttgttcttgctttgatttttgttttttgtattattcttgtttctttcatcagaaaggcgaacggattggagcattttccattacgcgcatattcatttacgggcggttttttgctttattcatgttttttatatttttatataagaaggaaagaaactcttccctcttattttaaatacgcctgcgtaactttagacgcgttatttattaccggcgcaatttgggtaggatgcacatatcctgaaatatcccctcccataacttttatttcgatagaggctcttttttacatagttcttattatggcgggctctttcagatacagcgttccatgcgcctatttttccgggattttttccagtatctgttatttgattgtcgttatagttaacggacatgttcttgatttaccctattcttttacacttaacaacaaagtaatacctgtcagttttcctttgtacaacgaatcattacgcgttcttgcaatgatggtcgccggttttaccgcagggctttcaagtaaacgccatctaaaattattcaaaaacatgatagaatctcaagccgaagccgccgattccgctctggcgacagtggaacaaacccgttcaatcgctaaaattattaaaaattccactgatgatatatttctttcatccaaagaaatttttattaacgcaaacaatcaggcggcaagtattcatgaaattgaaactacaattaaagaaaacacccaaatagccggagatatttccgaaaaaacatccaacgtatcgaatattgccaacaaaatggaaaatgacgttattcacggattttccgtcttggaacacaatattaaccagcttgaggatattaagaaaaagaacgacagcgtaattacaagcattataaatcttggaaacaagatattaaaaatacgcgatattgtaaaaaatattaatacgataacggatcaaacaaaagttatagcgttcaatgcgggactggaagccgcaagcgcgggagaacacggcaagcgttttgccgttgtagcanacgaagtaaaccgtcttgcggatgacgtcgcttctcttaccatgcaaattcgcgatcaagttgaagaaattcaaaattcttcctcatcattgataatttccagcgaagaaagcacgnataanatcagggaaggcaataaccttatcaaggaacttgacgatatnttcccgcgagatcgctcgggggcggaaataacggctaatcangcgcaaacaatcactttatcnnactcaaagcagtttaaatcancaagagcaaattaa

SEQ ID NO: 51552 - protein, 459 aa, Unknown
  Obtained from environmental sample
  DOMAIN (240)...(456): Methyl-accepting chemotaxis protein (MCP) signaling domain
  misc_feature (1)..(459): Xaa is any amino acid
MTDKETNEKIRRDEYDGEKLINKFRFVLALIFVFCIILVSFIRKANGLEHFPLRAYSFTGGFLLYSCFLYFYIRRKETLPSYFKYACVTLDALFITGAIWVGCTYPEISPPITFISIEALFYIVLIMAGSFRYSVPCAYFSGIFSSICYLIVVIVNGHVLDLPYSFTLNNKVIPVSFPLYNESLRVLAMMVAGFTAGLSSKRHLKLFKNMIESQAEAADSALATVEQTRSIAKIIKNSTDDIFLSSKEIFINANNQAASIHEIETTIKENTQIAGDISEKTSNVSNIANKMENDVIHGFSVLEHNINQLEDIKKKNDSVITSIINLGNKILKIRDIVKNINTITDQTKVIAFNAGLEAASAGEHGKRFAVVAXEVNRLADDVASLTMQIRDQVEEIQNSSSSLIISSEESTXXIREGNNLIKELDDXFPRDRSGAEITANXAQTITLSXSKQFKSXRAN

SEQ ID NO: 51553 - DNA, 849 bp, Unknown
  Obtained from environmental sample
  misc_feature (1)..(849): n is a, c, g, or t
atggcgctgaatgtaaagggcttggtcaatatccaatacatattgtacgacaacgatatctacgtgatagaggtcaacccgcgagcgtcgcgtaccgtcccgtacatcagcaaggttacaagcgtccccatgtgcgagcttgccacaagcgtgagcgtagggaaaacgctttccgaactcaaccgcaagccgggtttcgcgaaaatccctccatacgtggcggtcaaagtccccgtgttctcctttgaaaaattgaccggcgtagacacgcacctcggcccggaaatgaaatcgaccggcgaggttttggggctaggcaaaaatttacaggaggccctgtacaagggtcttatagccgccggttacaagatgaataagaagggcggcgcattgattaccgtccgcgacggcgacaaaggggaaattatcgacgtcgccgaaaagctggacaaatgcggattctccctccacgcgacacggggcacggcgcggttcctcaacgaaaaaggattcaaagtcaacgcggtggacaagatcagcgccaacacggaaaacaacaccgcggcgctcttggaaagcgggaaaatcagctacatcatctcaacatcggaaaaaggcagagacccggcgttcgacgatgtaaagatccgccggaaagcctgctccctcggcatcccatgtctgacatccattgacaccgcanacgccttagccgacagcctgctctccaagtacagcgaaagcaataccgaattagtagatataaacaagttgagggataaacctatgaaactgccgtcaccaaaatgcacggatgcggcaacgactacatctacattaactgcttag

SEQ ID NO: 51554 - protein, 282 aa, Unknown
  Obtained from environmental sample
  DOMAIN (141)...(229): MGS-like domain
  misc_feature (1)..(282): Xaa is any amino acid
MALNVKGLVNIQYILYDNDIYVIEVNPRASRTVPYISKVTSVPMCELATSVSVGKTLSELNRKPGFAKIPPYVAVKVPVFSFEKLTGVDTHLGPEMKSTGEVLGLGKNLQEALYKGLIAAGYKMNKKGGALITVRDGDKGEIIDVAEKLDKCGFSLHATRGTARFLNEKGFKVNAVDKISANTENNTAALLESGKISYIISTSEKGRDPAFDDVKIRRKACSLGIPCLTSIDTAXALADSLLSKYSESNTELVDINKLRDKPMKLPSPKCTDAATTTSTLTA

SEQ ID NO: 51555 - DNA, 783 bp, Unknown
  Obtained from environmental sample
  misc_feature (1)..(783): n is a, c, g, or t
atggaaatcaactctcccgaatcgctctccatgctgctctccaacaggcacacgggaatcggcagcgagggcgtggtgttcatactgccncccgacgctccggaagccgccgcgagaatgcgcgtgttcaataccgacggaagcgaaagcggtatgggcggcaacgccatccgttgcgttggcaagtacctctacgacaacggttttgtcaaaaaacatcacataaagatcgaaacgcgcagcggcatcaaaaacctctacctgaccatcagaaacaagaatgtgtcgtcggtcatggtagatatgggcccggccgaactgcaccccgaaaagatcccggtcaatttgccgggagaccgcataatcgcggagaaggtaaccatcggcgaaaaggagtacaaaatcacctgcgtttctatgggcaaccctcacgccgtagtcttcgacgacgatgtgggcaaactcaacttggccgaaatcgggccgctgtttgaacacaacgaacagttgtttccggataaaatcaacaccgagtttgtggaaattatggacagaaaccacttgaaactgcgggtttgggagcgcggcagcggcgagacccaagcctgcggcaccggggcttgcgccgcggcggtggccgccgttttgaacggccactgcgacaaaaacgccgacataaaagttcaactgcccggcggcgagctcatcataaaatataccgacgagaccgtctacaaaacaggcgcctgcatcaaggtttttgaggggacggtggagatttaa

SEQ ID NO: 51556 - protein, 260 aa, Unknown
  Obtained from environmental sample
  DOMAIN (2)...(108): Diaminopimelate epimerase
  misc_feature (1)..(260): Xaa is any amino acid
MEINSPESLSMLLSNRHTGIGSEGVVFILPPDAPEAAARMRVFNTDGSESGMGGNAIRCVGKYLYDNGFVKKHHIKIETRSGIKNLYLTIRNKNVSSVMVDMGPAELHPEKIPVNLPGDRIIAEKVTIGEKEYKITCVSMGNPHAVVFDDDVGKLNLAEIGPLFEHNEQLFPDKINTEFVEIMDRNHLKLRVWERGSGETQACGTGACAAAVAAVLNGHCDKNADIKVQLPGGELIIKYTDETVYKTGACIKVFEGTVEI

SEQ ID NO: 51557 - DNA, 693 bp, Unknown
  Obtained from environmental sample
  misc_feature (1)..(693): n is a, c, g, or t
ttgtttttctggttttccttcggtataatgcagcgcgaaaatatgcagatagaagaaacggtaatttatcttgcgtattttatcactacgggaattttcacccgcgtattaattcattactcgatagcaaaagtttttggtccgcttatttggggcaggggtttttgcggctgggcttgttatacggcggcattgcttgaatggctgccgataaaagaaaataaacccattccaaaaaaatatacatacataagaatacctgttttaatcatatctatattaattccttttattcttattcaaagcggatatgattatttctcaagacatatagattcttccatcacttctttcatagaaagcaaaaaattcgatcaatttatctggtttcttaccggatatatattgtactacatagtaggaataatattggcttttgtcttcaggaaaaaacgggccttctgtaaaatattctgccctgtctcgcttgttatgaaactgccaaccagcgtttcactgttaaaaataaaaccaagcggaaacaaatgtattaaatgcggaaaatgcaacgatgtgtgtccaatggacatagatgtcagaaaatacattgaaagcgggaaaaaagtattatcgactgaatgtatcctttgcagaaattgcgcgaatatatgtccggttaaagctgttgtgtaa

SEQ ID NO: 51558 - protein, 230 aa, Unknown
  Obtained from environmental sample
  DOMAIN (176)...(199): 4Fe-4S binding domain
  misc_feature (1)..(230): Xaa is any amino acid
MFFWFSFGIMQRENMQIEETVIYLAYFITTGIFTRVLIHYSIAKVFGPLIWGRGFCGWACYTAALLEWLPIKENKPIPKKYTYIRIPVLIISILIPFILIQSGYDYFSRHIDSSITSFIESKKFDQFIWFLTGYILYYIVGIILAFVFRKKRAFCKIFCPVSLVMKLPTSVSLLKIKPSGNKCIKCGKCNDVCPMDIDVRKYIESGKKVLSTECILCRNCANICPVKAVV

SEQ ID NO: 51559 - DNA, 453 bp, Unknown
  Obtained from environmental sample
  misc_feature (1)..(453): n is a, c, g, or t
atggagtcaaatatgttcaggaaattacttttcttttgcgttttgtttttagctgtcgtaagcctctttgcggacgaaattaatacaaccatagagattaacggagtaattgttaacggcggtttggtatatgttgccgtatactcaaatgaaaatgattacaaagatgaaaaagcttttacccaatttatcttacagcccgtgaattccggcttaaaatattctctggatttacccgaaggcgaatatgtggtttccgcgtatcaggataaaaacggtgatgaaaaactcaattcaggccttttcggaataccgtcagagcctgtcggaataacaaactacaacctaagaggagcgccgggcgggtttaacaaattgaaagcgccaataaacaaaaattccgcaaaacttattataaacatgggaaaagtaaaagcgttggggataatatga

SEQ ID NO: 51560 - protein, 150 aa, Unknown
  Obtained from environmental sample
  SIGNAL (1)...(24)
  misc_feature (1)..(150): Xaa is any amino acid
MESNMFRKLLFFCVLFLAVVSLFADEINTTIEINGVIVNGGLVYVAVYSNENDYKDEKAFTQFILQPVNSGLKYSLDLPEGEYVVSAYQDKNGDEKLNSGLFGIPSEPVGITNYNLRGAPGGFNKLKAPINKNSAKLIINMGKVKALGII

SEQ ID NO: 51561 - DNA, 504 bp, Unknown
  Obtained from environmental sample
  misc_feature (1)..(504): n is a, c, g, or t
atgatgaccgtctactgcatccatccggtgaacccgcaaaagcgcagcatggagtccgccgcccgcgttctgtccgtagacggcggcatagcggtctatcccacagactcactctacggcatgggggcctgcgtcaccaatccgcgggggatagacaggatagcgcacctgcttgaaaaggacaaaaaccgccctttttcattcatttgcagcgatttttcgcagataagccgctacgtccgcctctcaaacgcgcactaccggctgatgaagcgctacctccccggcccctacaccttcatcctaaacgcgaccaacttagtccccaaacgcatatcccccaagcggcggacggtcggcatactcatcccggactccgtcgtgacgctggagctcgtcaaactgctgggagagccgctggccaacacgtccgtcaacatctccggcgaacccatgaacgaccctgatgagatcaagaggcgctgcgccacgaggcggacgtga

SEQ ID NO: 51562 - protein, 167 aa, Unknown
  Obtained from environmental sample
  DOMAIN (23)...(167): yrdC domain
  misc_feature (1)..(167): Xaa is any amino acid
MMTVYCIHPVNPQKRSMESAARVLSVDGGIAVYPTDSLYGMGACVTNPRGIDRIAHLLEKDKNRPFSFICSDFSQISRYVRLSNAHYRLMKRYLPGPYTFILNATNLVPKRISPKRRTVGILIPDSVVTLELVKLLGEPLANTSVNISGEPMNDPDEIKRRCATRRT

SEQ ID NO: 51563 - DNA, 537 bp, Unknown
  Obtained from environmental sample
  misc_feature (1)..(537): n is a, c, g, or t
gtgggcggaagagttgtgacgacgaccgaccagaccttcaccgccctaagcctgggttcgaatctcggcgaccgcctattcaacatcaatttcatggaacaagcgctgcgcgcggttttagtcgacggcagcgtccggtcgtcgcgcctgatggaaaccgccccggtgggcgtcggcgccggccagcccgcgtacctgaacaaggtaatcgccggatattaccgcggcggcgcgtacgaactcttagacacatgcttatcaatagaaaccgccctaggcagaacccgcccgtcgcccaaagcgccgcgcacggcggacgcggatatcctattattcggcgatatggagataaacgacccgcccaagcttataatcccgcaccctgaactgccgaacaggcgtttttgcatagaaggccttatgaacatcgacccgtcaatcataataacgggccggccgttcacagtaagcgagttgtacaaaaatatgaccgacgaagtcttagcgcagaatatatcttttggggagggtttttaa

SEQ ID NO: 51564 - protein, 178 aa, Unknown
  Obtained from environmental sample
  DOMAIN (15)...(144): 7,8-dihydro-6-hydroxymethylpterin-pyrophosphokinase (HPPK)
  misc_feature (1)..(178): Xaa is any amino acid
MGGRVVTTTDQTFTALSLGSNLGDRLFNINFMEQALRAVLVDGSVRSSRLMETAPVGVGAGQPAYLNKVIAGYYRGGAYELLDTCLSIETALGRTRPSPKAPRTADADILLFGDMEINDPPKLIIPHPELPNRRFCIEGLMNIDPSIIITGRPFTVSELYKNMTDEVLAQNISFGEGF

SEQ ID NO: 51565 - DNA, 720 bp, Unknown
  Obtained from environmental sample
  misc_feature (1)..(720): n is a, c, g, or t
ttgcccgcggggttttgcgatatgtcggttatgagcgtctttgtcaacccgacgcagtttggcccaacggaggatttcaacaagtacccgcgagacttagacaaggattgcgcgctcgccgaatccgcaggatgcggctgcgtcttcgctccgtccgccgatgagatgtaccccgccggctacggcacctacgtgaacgtaggcccggtgggcgacacgctctgcggcgccgcgcgccccgggcactttagaggcgtggcgacggtcgtccttaaactgtttaatatagtaactccggacgcggcggtcttcggcgccaaagacgcgcagcaggtggcggtcataaaacgcgtggtaagcgacctgaaccttcccgtgcgcatagtaaccgccccgataatccgcgaaccggacggcttagccatgagctcacgcaacgcctacctaacgccggcggagagagaacaagcggtaaatatctctaagagcttatttgaagctaaaaagctgtttgacgatggggaacaatcggcggagcggataaaggaacgtatcgtatcgataatggacggcggtttgataaaaacggaatatgcggaaatagtagacccggtatcgctacatccgattgtcaatatagagcagaccgcgctaatagcggtggcttgccgtactttggagagtaagacgaggttgattgataatattgttatggggtga

SEQ ID NO: 51566 - protein, 239 aa, Unknown
  Obtained from environmental sample
  DOMAIN (1)...(238): Pantoate-beta-alanine ligase
  misc_feature (1)..(239): Xaa is any amino acid
MPAGFCDMSVMSVFVNPTQFGPTEDFNKYPRDLDKDCALAESAGCGCVFAPSADEMYPAGYGTYVNVGPVGDTLCGAARPGHFRGVATVVLKLFNIVTPDAAVFGAKDAQQVAVIKRVVSDLNLPVRIVTAPIIREPDGLAMSSRNAYLTPAEREQAVNISKSLFEAKKLFDDGEQSAERIKERIVSIMDGGLIKTEYAEIVDPVSLHPIVNIEQTALIAVACRTLESKTRLIDNIVMG

SEQ ID NO: 51567 - DNA, 1002 bp, Unknown
  Obtained from environmental sample
  misc_feature (1)..(1002): n is a, c, g, or t
ttgaatcgaatctccgggcgttccacaattctggtgtttacagaatcccgccgccgcgctgaacggctctgttatttcatcaataatgaagcggcgcttcatgaaacggcgcttcaaaaagccggcgttaacggcactgtcgcctttacccatcacggttcgctttcaaaagagctgaggcaaagtgtggagaggcggcttgcggcgggcagcctgttctgcgtggttgccacagcatcgctggaattgggcatagacataggcagcgttgacgaggtggtgctggcgggaagcccgggctccgtgtcccaggccttgcagcgtatcgggagatccggtcatggcgtgggaatggtcagccggggcacgctctttccctttcacggaatggacctgctgctcgccacggcccttaaaggcgctgttgaggatcgggacatcgaagaaatacgccccattgaaaatcccctggacattctcgcccagatgatccttgctctctgcatcgaaaaaaaacggaacattgacgagctttacaaactgctaaaaggattctacatattcagaaacctcaaccgcgaggcgtatttgcggacagtgcgcatgcttgccggattatcatctaacggggaggggaaaatcaggctgagggatgtaaagccccgtatatggctggataacatagcgggtgaaatcggagctcttgacggcagtttgctcctgctgtattcatccggcggggttatcgccaaccgggggctgtactcgctgcggcttgccgacgggacaaaaatcggggaactggacgaggaatttgtctgggaacgccgccctggggaccgcttccatttttgcggggcgaggctggagaatcaccgctatagaggcggagtccgtgcaagccgcgcctctggaaacatcgtcagactttattccgttctggaaagcggacacggtttttcgcagtcccaggcttacggaacgggtgctggcaatacttga

SEQ ID NO: 51568 - protein, 333 aa, Unknown
  Obtained from environmental sample
  DOMAIN (40)...(116): Helicase conserved C-terminal domain
  misc_feature (1)..(333): Xaa is any amino acid
MNRISGRSTILVFTESRRRAERLCYFINNEAALHETALQKAGVNGTVAFTHHGSLSKELRQSVERRLAAGSLFCVVATASLELGIDIGSVDEVVLAGSPGSVSQALQRIGRSGHGVGMVSRGTLFPFHGMDLLLATALKGAVEDRDIEEIRPIENPLDILAQMILALCIEKKRNIDELYKLLKGFYIFRNLNREAYLRTVRMLAGLSSNGEGKIRLRDVKPRIWLDNIAGEIGALDGSLLLLYSSGGVIANRGLYSLRLADGTKIGELDEEFVWERRPGDRFHFCGARLENHRYRGGVRASRASGNIVRLYSVLESGHGFSQSQAYGTGAGNT

SEQ ID NO: 51569 - DNA, 1032 bp, Unknown
  Obtained from environmental sample
  misc_feature (1)..(1032): n is a, c, g, or t
gtgaaatcggagctcttgacggcagtttgctcctgctgtattcatccggcggggttatcgccaaccgggggctgtactcgctgcggcttgccgacgggacaaaaatcggggaactggacgaggaatttgtctgggaacgccgccctggggaccgcttccatttttgcggggcgaggctggagaatcaccgctatagaggcggagtccgtgcaagccgcgcctctggaaacatcgtcagactttattccgttctggaaagcggacacggtttttcgcagtcccaggcttacggaacgggtgctggcaatacttgacggctataacggggattcatcttccgccgcgccggaaacccttgtcgcttttcttgattctcagcgaaacgcgcagagaagccttcccttaagcggcagtaatcgcataacggtagaaattatcgacagccctgaaaatcgcggggatttgtacgcggttgtgatgcacagcttccggggcggggctgtaaactatccgcttgtgctggccctggctcaggaactggaagaaaagcttaagctcagggtggaatcattttccaatgacgattcgcttctcctgttaatacctcggctgggtatcgaaggaaatgtaaagcagattgaaaatatttttcgcaaggctgttacagagcttaacaaaagcggcggaggcggtctttgccgtggggagaggctgttcagaaaccgtctggaagcgtccggcgtgttcggtacgaatttccgcgaggcggcggaaaggagcctccttctgcctaaagcgggttttgggaaacgaaccccgctgtggatcacaaggcagcgctccaagcggctttttgacgcggtacgcggcgaagaaggtttccctgttaccgctgaggcgtggcggagctgcctggtagatttatttgatatggaagatttccgcgagttgttaggtgcaattaacgataacacagttgccctgtcttttttttacagccagtatcccgcagcccctcgtgccgaattctga

SEQ ID NO: 51570 - protein, 343 aa, Unknown
  Obtained from environmental sample
  SIGNAL (1)...(19)
  DOMAIN (135)...(341): DEAD/H associated
  misc_feature (1)..(343): Xaa is any amino acid
MKSELLTAVCSCCIHPAGLSPTGGCTRCGLPTGQKSGNWTRNLSGNAALGTASIFAGRGWRITAIEAESVQAAPLETSSDFIPFWKADTVFRSPRLTERVLAILDGYNGDSSSAAPETLVAFLDSQRNAQRSLPLSGSNRITVEIIDSPENRGDLYAVVMHSFRGGAVNYPLVLALAQELEEKLKLRVESFSNDDSLLLLIPRLGIEGNVKQIENIFRKAVTELNKSGGGGLCRGERLFRNRLEASGVFGTNFREAAERSLLLPKAGFGKRTPLWITRQRSKRLFDAVRGEEGFPVTAEAWRSCLVDLFDMEDFRELLGAINDNTVALSFFYSQYPAAPRAEF

SEQ ID NO: 51571 - DNA, 843 bp, Unknown
  Obtained from environmental sample
  misc_feature (1)..(843): n is a, c, g, or t
atgccggcgattataattaacgggaaagcaattggacaaaaaatccgcgaagaggcgaagaggcgcgcagccgttcttaaggaaaaaggcgttactccctgtcttgcggttatcctggccggtgaagatccggcgagtctttcctatgtaggagcaaaaggaaaagcccttgcggaagccgggatggaaagccgggacttcctgtttccagcttcggtttccgaggcggaactgctcgctcttatcgcaaaattaaatcaggaggaaaaagtccacggcattctggtacaacttcccctgcccaaacacattgacgaaagcaaggtgattattgccatcgatccggcaaaagacgttgacggcttccatccggtttcgatcgggaatatggttatgggacgaccctcttttattccctgtacgcccaacggggtaatggtgttgctgcgtgagctaaatattcccctttccggcgcgcacgcagtagtagtcggcaggtcaaacatcgtgggcaagcctttggcgaatctgctttccagccggaatgttaacgcgacagtgacgatctgccataccggcaccaaagatatagcccgtcatacccagcaggccgatatattaatcgccgccgccgggaaacctgaattaatccgggcggagatggtgcgccccggcgcggtggtgattgacgttggggtgaaccgcgtaaaagacccgtcaacccaaaaaggctaccgcctgtgcggtgatgttgatttttccctggttgcggggaaaagccgcgttttttacgccggttcccggcggcgtcgggcttatgacggtcgccatgctgctgcataa

SEQ ID NO: 51572 - protein, 280 aa, Unknown
  Obtained from environmental sample
  DOMAIN (4)...(120): Tetrahydrofolate dehydrogenase/cyclohydrolase, catalytic domain
  misc_feature (1)..(280): Xaa is any amino acid
MPAIIINGKAIGQKIREEAKRRAAVLKEKGVTPCLAVILAGEDPASLSYVGAKGKALAEAGMESRDFLFPASVSEAELLALIAKLNQEEKVHGILVQLPLPKHIDESKVIIAIDPAKDVDGFHPVSIGNMVMGRPSFIPCTPNGVMVLLRELNIPLSGAHAVVVGRSNIVGKPLANLLSSRNVNATVTICHTGTKDIARHTQQADILIAAAGKPELIRAEMVRPGAVVIDVGVNRVKDPSTQKGYRLCGDVDFSLVAGKSRVFYAGSRRRRAYDGRHAAA

SEQ ID NO: 51573 - DNA, 1422 bp, Unknown
  Obtained from environmental sample
  misc_feature (1)..(1422): n is a, c, g, or t
ttgcccagagcaaacggtattgaggcgccgccattgacgtatttttttgaaacctacggctgtcagatgaacagcgccgaatcggcggctctggctttggtatgccgggagcggggctggacagttgcgcctaacggcgaaactgccgatctggtgctgattaacacctgctcggtgcggctgaccgccgaacaacgggcattgggacgtattgccctgtatgtaagcctcaagaaaaaacgcctcgcgcggggagaacattttgccctggtggtagcgggctgtatggcccagcggatgagaagtacgctcaaggaaaaataccccgcggttgattatgtaatgggaacggcaagccgctccctgtttccccttattctggaaacggttgaaaaaaatattaacaataatactttccccgaaattgccgttgaagaatcggctcaattttcattttcatcatcacatcttgaggaagggcagttccgcagttttgtccccattatgcacggctgtaacaatttttgctcttactgcatagtcccctatgtgcggggcagggaaatctcccgtgatccgcggttgatactcgaagagctccggctggttggcgaacgcggagtgcgggaaattaccctgctggggcaaaatgtcaacagctacaactggaacaatgaggagtgcccccccaaaggggggtgcccctccaaggagggggtgcacttcgccggactgctgcgaataatcgccgccgaagcggaaaaaagcggaatcaagtggctgcggttcctctccgccaaccccaagaacttttcgccggaaacgattcaagtaatggcggaaaaccgggtgttttgccgccacctgcacctctgcgtccagcacggttccaaccggatgcttgccgcaatgaaccggggctacacccgtgaacgctacctttccctggtcagcgagatacgctccgccatgccggaaataagcctttccaccgacattttgatcggttttcccggcgaaacagaggacgatgtgcgggaaaccctgtcgcttatggaagaagtacagtttttatacgcctatatgtaccattacaacccgcgggagggaacagccgcctgtaatttgccggacagaatcagcgaaaaggtcaagcgggaacggctttcccgggtgattaatctgcaaaagaagcataccgcggcgctgctcaaaaagcggataggagcgcgggaaacggtattagtagaggggatttcccgaaaaaatgccgatgaattagtaacacgcactgaaagagatgaaatggccgttgcccccggtccggcctccctcatcggttcttttgccgggcttaccctttcgggtctgcggggaaatacttttcgtgcaaaggaggtttatccatgccctggcgattaa

SEQ ID NO: 51574 - protein, 473 aa, Unknown
  Obtained from environmental sample
  DOMAIN (166)...(352): Radical SAM superfamily
  misc_feature (1)..(473): Xaa is any amino acid
MPRANGIEAPPLTYFFETYGCQMNSAESAALALVCRERGWTVAPNGETADLVLINTCSVRLTAEQRALGRIALYVSLKKKRLARGEHFALVVAGCMAQRMRSTLKEKYPAVDYVMGTASRSLFPLILETVEKNINNNTFPEIAVEESAQFSFSSSHLEEGQFRSFVPIMHGCNNFCSYCIVPYVRGREISRDPRLILEELRLVGERGVREITLLGQNVNSYNWNNEECPPKGGCPSKEGVHFAGLLRIIAAEAEKSGIKWLRFLSANPKNFSPETIQVMAENRVFCRHLHLCVQHGSNRMLAAMNRGYTRERYLSLVSEIRSAMPEISLSTDILIGFPGETEDDVRETLSLMEEVQFLYAYMYHYNPREGTAACNLPDRISEKVKRERLSRVINLQKKHTAALLKKRIGARETVLVEGISRKNADELVTRTERDEMAVAPGPASLIGSFAGLTLSGLRGNTFRAKEVYPCPGD

SEQ ID NO: 51575 - DNA, 330 bp, Unknown
  Obtained from environmental sample
  misc_feature (1)..(330): n is a, c, g, or t
atgccctggcgattaatcgaatttatcattctttttgcggttcttttcctgtttattatttttaacctggaaaacaagtgcaatattaattttggcttcaaatcgtacccggatgttccggtatttcttaccgtgttttcttcgttttttatcggtatgctgtgtacccttccctttatctttgcttccaaagcgcggaaaaaggcaaaagttgcccatgaaaaggggttactggccaaagcgtcaaaaaagcaaaaacaggataaaaattccggcgaaaattccgcagactcaggtctttttgacaaaaatcactatgggattgattaa

SEQ ID NO: 51576 - protein, 109 aa, Unknown
  Obtained from environmental sample
  misc_feature (1)..(109): Xaa is any amino acid
MPWRLIEFIILFAVLFLFIIFNLENKCNINFGFKSYPDVPVFLTVFSSFFIGMLCTLPFIFASKARKKAKVAHEKGLLAKASKKQKQDKNSGENSADSGLFDKNHYGID

SEQ ID NO: 51577 - DNA, 414 bp, Unknown
  Obtained from environmental sample
  misc_feature (1)..(414): n is a, c, g, or t
atgggtactgtttttgctgaaattatattgaaaaacggaagtgatcttgttcgattacaagatggaaaaatcacagataaagacgtccgttcgctcactggtaaacgcttggtggataccggcgcgatgacactggtcattaccgagaaactatacaaaacgcttgggctctctaaagtgggtgaaagaatggttcggacagccagcggccagcgcctggcctgtaccgttacggaaccggtggatattcattggaaaaaccgaggctcatcgacacgcgccgttgttgttccgggagcggaagatgtccttttaggggcaatcccccttgaagacatggatctgatggtcaatcccgttactcaggaactggttggcatccacggagacattgtcgagtgcatagttatgtga

SEQ ID NO: 51578 - protein, 137 aa, Unknown
  Obtained from environmental sample
  misc_feature (1)..(137): Xaa is any amino acid
MGTVFAEIILKNGSDLVRLQDGKITDKDVRSLTGKRLVDTGAMTLVITEKLYKTLGLSKVGERMVRTASGQRLACTVTEPVDIHWKNRGSSTRAVVVPGAEDVLLGAIPLEDMDLMVNPVTQELVGIHGDIVECIVM

SEQ ID NO: 51579 - DNA, 948 bp, Unknown
  Obtained from environmental sample
  misc_feature (1)..(948): n is a, c, g, or t
gtgtttctggcccacggttatttcaactttaaggacgagttaaaaaatatttatttcgatgacaggtttaactcccttgattttttgtacaagggacaaactggtgttggctttcggacaggcggctattgttcctggtataaccactacacgaacattgatgaaaagaccattctttctgatcttgaagggcttgtttcaacggataatctaatcgctttacgttatctgaaaaaggggctgccagggatctttcagattgacgacggctgggaactggctgttggagactgggaggttgacagcgtaaaatttcccggcggacttaaatacctcgtggagaggatcgaagccgccgggttaatccccggcctttggctcgcgccgtttttgttgacgcgccgatccaggcttttccgggaacgccccgaatggcttttaacagagcggggcaggccggtggaggcgggatggaaccccaactgggacggggttttctactgcctggatttatccagagacgatgtgacggaatacctgcgttccctaatgaaccgtatcattgatgactggggcttccgctacataaaactggattttctttacgccggatttttaagcggtgaaaataaccgcggcagagctgcggaatactatgaaaaggccatcgcgcttttaacagagcgcgccaaaaacgccgccgcccttccgcttgcctatcttggctgcggccttcccctgggcgcttcctaccggcatttccccctttcacggatcggaactgacaccaaagaaagctgggactggcctttggcaaatttatcgccacgaaggccgtcccagcagcctgctttccctaaggaaactatatccagatcatttatgaacgggactatttatataaatgatccggatgtagttttttgcggtctgcaaactgctcgttaa

SEQ ID NO: 51580 - protein, 315 aa, Unknown
  Obtained from environmental sample
  DOMAIN (25)...(314): Melibiase
  misc_feature (1)..(315): Xaa is any amino acid
MFLAHGYFNFKDELKNIYFDDRFNSLDFLYKGQTGVGFRTGGYCSWYNHYTNIDEKTILSDLEGLVSTDNLIALRYLKKGLPGIFQIDDGWELAVGDWEVDSVKFPGGLKYLVERIEAAGLIPGLWLAPFLLTRRSRLFRERPEWLLTERGRPVEAGWNPNWDGVFYCLDLSRDDVTEYLRSLMNRIIDDWGFRYIKLDFLYAGFLSGENNRGRAAEYYEKAIALLTERAKNAAALPLAYLGCGLPLGASYRHFPLSRIGTDTKESWDWPLANLSPRRPSQQPAFPKETISRSFMNGTIYINDPDVVFCGLQTAR

SEQ ID NO: 51581 - DNA, 753 bp, Unknown
  Obtained from environmental sample
  misc_feature (1)..(753): n is a, c, g, or t
atgtcaccccaatccgcagacgttaagcctatgccgtctgcggacgggcgctctgaagcaggcgtccgtcaggaaccccgggaaccgctgcgcaaaattaaaagctatgtcctgcggggcgggcgcctgacaccggcgcagaggcgttcatacgattccctttcgggaaagtttttggttccatacgggcctggaaaactggattttaccggaattttcggcaataacaaccctgtcatcgttgaaatcggctttggcatgggcagggcgaccgccgttattgccaatgaaaaccctgataagaactacatagggcttgagatacacaagccgggtataggccggctcctttgggaaatagaacaaaggccgctttcaaatgtcaggataatcgaacatgacgcgacagaagttttccggaacatgatcccggaaaattcccttggcggggtgcatatttttttccccgatccctggccgaaaaaacgacaccacaagcgaaggcttatacagcggccttttactgattgtatcgcctcaaaactggggtctcagggctatatttacatagtcagcgactggtcggattacgccgaccaggcattggagctgttaaccaatactgaagacatggttaacgtatataacggctttgcggaaccccaatcctggcggccgcagacaagttttgaaaagaaagggcttgacaagaaacatgaaataaaggaattgtttttcagacggagcctatga

SEQ ID NO: 51582 - protein, 250 aa, Unknown
  Obtained from environmental sample
  DOMAIN (60)...(249): Putative methyltransferase
  misc_feature (1)..(250): Xaa is any amino acid
MSPQSADVKPMPSADGRSEAGVRQEPREPLRKIKSYVLRGGRLTPAQRRSYDSLSGKFLVPYGPGKLDFTGIFGNNNPVIVEIGFGMGRATAVIANENPDKNYIGLEIHKPGIGRLLWEIEQRPLSNVRIIEHDATEVFRNMIPENSLGGVHIFFPDPWPKKRHHKRRLIQRPFTDCIASKLGSQGYIYIVSDWSDYADQALELLTNTEDMVNVYNGFAEPQSWRPQTSFEKKGLDKKHEIKELFFRRSL

SEQ ID NO: 51583 - DNA, 1032 bp, Unknown
  Obtained from environmental sample
  misc_feature (1)..(1032): n is a, c, g, or t
atgaagaataatcccaaacgcgtaaaagaacttgagcgggtcatacagaaataccaaaaatcgtattacggcggagaagcggaaatttcggacggggaattcgatctcctctgggatgagctgaaagccctggcccctaacagtcccgtaatccttgggataggggatagcgccgataatgttgacggctttccaaaggcgcgccatttgattcctatgggaagccaggaaaaggcttccgaccctcaggaattccttgtttgggcaaaaaaaatgggaatggaaggctcggataaggattcgttaaccgataaaaaaaataagttaacaaaaaagtttatcgttcaatataaattggacggcgcaagccttgagttacagtacgaaaaaggcaaactcatccgcgccgtaacacgcggggacggaattaccggcgacgagataaccgataacgcgcggcgcatgggcggcgttgttcaaaagatggacgtttcatttacaggcggcgtcaggggtgaggttattatgacccacgatgtctggaacggcaaataccccacaaaggcaaactgccgtaacgccgccaacgggcttatgcgccgcaaggacggcgaaggctgcgaggatttggaagtcattgtttatgacgcgtccgcttcggatgacgacaggtttttcaaggacgaatcgcaaaaactaaaatggctgggacagcggggttttaaaaccacggaaacaaagacctttaccacagcaaaagagataatcgcctacagagaaaaaatagccgccgaaagggataaacttccctttgacatagacggccttgtggtaaaggacatagagacggacatgtccgatctccgcaaggcacgggctgaaaagcagattgccttcaagtttgangtggaaacggcgttcagcgttttgcgcgaagttatttggagcgaattcggggcgacatacacgccatcgggcgtagtcgatcctgtgcgtcttgccgggactacggtaaaaagggggaacccttaa

SEQ ID NO: 51584 - protein, 343 aa, Unknown
  Obtained from environmental sample
  DOMAIN (2)...(304): NAD-dependent DNA ligase adenylation domain
  misc_feature (1)..(343): Xaa is any amino acid
MKNNPKRVKELERVIQKYQKSYYGGEAEISDGEFDLLWDELKALAPNSPVILGIGDSADNVDGFPKARHLIPMGSQEKASDPQEFLVWAKKMGMEGSDKDSLTDKKNKLTKKFIVQYKLDGASLELQYEKGKLIRAVTRGDGITGDEITDNARRMGGVVQKMDVSFTGGVRGEVIMTHDVWNGKYPTKANCRNAANGLMRRKDGEGCEDLEVIVYDASASDDDRFFKDESQKLKWLGQRGFKTTETKTFTTAKEIIAYREKIAAERDKLPFDIDGLVVKDIETDMSDLRKARAEKQIAFKFXVETAFSVLREVIWSEFGATYTPSGVVDPVRLAGTTVKRGNP

SEQ ID NO: 51585 - DNA, 957 bp, Unknown
  Obtained from environmental sample
  misc_feature (1)..(957): n is a, c, g, or t
atggaaggagtaaaattagaagacgctattttagacgatcaatttattgaaacttttaaggacataatcgccaaccgcgaaaaaataattgataaagaggtagaaatagatcagcaagagcgtagaaggttatattccgttaatgtcgtccctcttgttcataacaaaaaaattgctgggactcttatttacatagaagatattacggagaagagaaggggagaggcgcgtcttagaagggcagaaaatcttgcgagccttaccactttagccgccggtgtggcgcatgaaattaaaaacccgcttggttcgatatcgatacatcttcaacttttgcaaaaagcattggcaaaaaaaagcgagacttctgaaaagaaaacggataaatacttttctgttattaaggaagaaattgacaggcttaaccgcattgtagtagattttctttttgccgtgcgtccgatgaatcttgagctacgcgaaggcgatattaacgaattaatcgcgcagatcatggattttgtaaagtttgagatgaaacagtcaaatattgtctgtatgcttgaacttgataagaaacttccgaaaatattatttgacgagcggtatatgaaacaggctcttcttaaccttataaaaaacgcgcaggcggcaatgcctaaaggcggtgtttttaccgtagccactaaattcgccgataatgaaattagaatatcactttgtgacaccggagttggcataagcaaagaagaccttgcaaaaatatttgaaccgtattttacgacaagggaaacaggaacggggcttggtcttacgcaagtttataaaattataagggaacatcagggcgagataaccgtggactcgtctccagagacaggggccgagtttagaataattctgccggtaccgcaaaaagatacgcggctgattgcatataacggaggtaaatcatga

SEQ ID NO: 51586 - protein, 318 aa, Unknown
  Obtained from environmental sample
  DOMAIN (86)...(157): His Kinase A (phosphoacceptor) domain
  misc_feature (1)..(318): Xaa is any amino acid
MEGVKLEDAILDDQFIETFKDIIANREKIIDKEVEIDQQERRRLYSVNVVPLVHNKKIAGTLIYIEDITEKRRGEARLRRAENLASLTTLAAGVAHEIKNPLGSISIHLQLLQKALAKKSETSEKKTDKYFSVIKEEIDRLNRIVVDFLFAVRPMNLELREGDINELIAQIMDFVKFEMKQSNIVCMLELDKKLPKILFDERYMKQALLNLIKNAQAAMPKGGVFTVATKFADNEIRISLCDTGVGISKEDLAKIFEPYFTTRETGTGLGLTQVYKIIREHQGEITVDSSPETGAEFRIILPVPQKDTRLIAYNGGKS

SEQ ID NO: 51587 - DNA, 801 bp, Unknown
  Obtained from environmental sample
  misc_feature (1)..(801): n is a, c, g, or t
atgaaattccgtctgcttgtaattgacgatgaaaagaatatccgtaacggacttgccgaatctttgcaggaagacggatacgatgtcgtatgcgctgaaaacggcgatgagggttggaaccgtttttctaatggtgacatcgatcttgtaataacggaccttaaaatgccgggtttaagcggcgatgaactgttaaaaaaaatactcgcccaggctcccggttttcctgtcattgttttaacgggccacggaacggtggagaacgcagtcgccgccatgagggacggcgcgtgggactttcttacaaagccggtagatttggaccatctttccttaaaagtaaaacgcgcccttgacaaccgtgagctgtttttccagcaccgcagaatggaagaggaaattgagcgcaaaaagcaatttaattcaattattggcaactcacgcaatatgcgcgatgtttttgatttgatcaataaagccgctcccacaaaagcttcgattttaatcacaggcgagtctggcgtaggaaaagagttagtcgccgacgcgatacacgatctttccccgcgaaaggatcagccgcttgtaaaagtgcattgtgccgctcttgccccatcgttgcttgaaagcgaactttttggccatgaaaagggggcgtttacaggcgcagtaacacagcgcaaggggaggtttgaacttgcttcangcggaaccctatttttggacgagataggagagatagatcaaaacattcaaattaattactgcgcgtttacaggagaggaaattttgaaagagtag

SEQ ID NO: 51588 - protein, 266 aa, Unknown
  Obtained from environmental sample
  DOMAIN (143)...(265): Sigma-54 interaction domain
  misc_feature (1)..(266): Xaa is any amino acid
MKFRLLVIDDEKNIRNGLAESLQEDGYDVVCAENGDEGWNRFSNGDIDLVITDLKMPGLSGDELLKKILAQAPGFPVIVLTGHGTVENAVAAMRDGAWDFLTKPVDLDHLSLKVKRALDNRELFFQHRRMEEEIERKKQFNSIIGNSRNMRDVFDLINKAAPTKASILITGESGVGKELVADAIHDLSPRKDQPLVKVHCAALAPSLLESELFGHEKGAFTGAVTQRKGRFELASXGTLFLDEIGEIDQNIQINYCAFTGEEILKE

SEQ ID NO: 51589 - DNA, 450 bp, Unknown
  Obtained from environmental sample
  misc_feature (1)..(450): n is a, c, g, or t
gtggtaaacatcaatgtcccgccgttacgcgaaagaaaagacgatattcccttattagccgccgcttttttaaaggagtttgcccttgaaaacggcaaaaaaattgaaggaataaacgaaaaagcccgcgcccgcctgtacggttatgactggccgggcaatatccgcgaattgcgcaactgcatggaaagcgcggtcgttatgtgccaatcaaacgcgattaacgtaggcgaccttccgcccgctttccgtaatgccgaagacgacggttggattaacatcaggctaggttctagtatggaggagtgcgagaaaattattattcgcgatactctttctcactgcaaagggaataaaagcaagacggcggagactttggagattggcaggaagacgttgcttcgcaagcttgcggattatggacttggtgacaaggatgagggggagtga

SEQ ID NO: 51590 - protein, 149 aa, Unknown
  Obtained from environmental sample
  DOMAIN (1)...(59): Sigma-54 interaction domain
  misc_feature (1)..(149): Xaa is any amino acid
MVNINVPPLRERKDDIPLLAAAFLKEFALENGKKIEGINEKARARLYGYDWPGNIRELRNCMESAVVMCQSNAINVGDLPPAFRNAEDDGWINIRLGSSMEECEKIIIRDTLSHCKGNKSKTAETLEIGRKTLLRKLADYGLGDKDEGE

SEQ ID NO: 51591 - DNA, 312 bp, Unknown
  Obtained from environmental sample
  misc_feature (1)..(312): n is a, c, g, or t
gtgatacgattgaagtacggactgtcggagcgaacccttaatacgcttgattcaatttttagaaagtatcccgtgataaaggaagttattctttacggtagcagggcaaaagggaattaccgcgtcggttttgatattgatattactttaaaaaccacttccgctttttgttggaacgatctgttgcatatttccagtgattttgaagattcggatatgccttattttgttgatgtgtctatttatgacaaattgaataattctgatttgacggctcatattgatagggttgggaaagttttgtatccgtga

SEQ ID NO: 51592 - protein, 103 aa, Unknown
  Obtained from environmental sample
  misc_feature (1)..(103): Xaa is any amino acid
MIRLKYGLSERTLNTLDSIFRKYPVIKEVILYGSRAKGNYRVGFDIDITLKTTSAFCWNDLLHISSDFEDSDMPYFVDVSIYDKLNNSDLTAHIDRVGKVLYP

SEQ ID NO: 51593 - DNA, 369 bp, Unknown
  Obtained from environmental sample
  misc_feature (1)..(369): n is a, c, g, or t
atgtcatataaacttaatattgaaccagaagcgttgagaaaactctctgaagatgaacaaatcaaaattatgcgtgattggttttatgaaaattaccaagaccctgatgaagaatgtccttatgatcaagaagaaggtgattatgtctatatttggggaggtccttatatagcttatgaagaattagaatgtgaatttggggaatatataaataataaaataattaagaaattagcaaatgaactagaaaatatttgttatgaatggtctgcagtctcttcgcaagaatttgaatcttttgaagaaatattagaatggtcaaccaaatatgaaaatgcaatagataaattcaataaaatatatttatga

SEQ ID NO: 51594 - protein, 122 aa, Unknown
  Obtained from environmental sample
  misc_feature (1)..(122): Xaa is any amino acid
MSYKLNIEPEALRKLSEDEQIKIMRDWFYENYQDPDEECPYDQEEGDYVYIWGGPYIAYEELECEFGEYINNKIIKKLANELENICYEWSAVSSQEFESFEEILEWSTKYENAIDKFNKIYL

SEQ ID NO: 51595 - DNA, 498 bp, Unknown
  Obtained from environmental sample
  misc_feature (1)..(498): n is a, c, g, or t
atgaatgttgctactgccacaccaaaggtatttatttcctattcatggacaagcgaagagcgtgttattgaacttgctcaacgattgaagaatgatggaatagatgttgtattagataagtggaaattaaaggaaggtcaagataaatatgcttttatggaacaatgtgtgactgacgagtctattaacaaagttcttatggtatgcgacaaagcctacgcagaaaaagcaaacgagagaaagggtggagttggcgatgaaacaatgattatctctactgaagtttacggcaaagctaaacaggaaaaatttattcccataatttttgagcgagatgaaaatggaaatgagtacagccctgcatatttgaagtctcgcatttacatagatttaacagatagtgagcaatatgaaaaaaattatgaaagcctgttacgtaacctctataacaaaccagaatacagcgaacctccacttggtaaaatgccagaatggtaa

SEQ ID NO: 51596 - protein, 165 aa, Unknown
  Obtained from environmental sample
  DOMAIN (8)...(148): SEFIR domain
  misc_feature (1)..(165): Xaa is any amino acid
MNVATATPKVFISYSWTSEERVIELAQRLKNDGIDVVLDKWKLKEGQDKYAFMEQCVTDESINKVLMVCDKAYAEKANERKGGVGDETMIISTEVYGKAKQEKFIPIIFERDENGNEYSPAYLKSRIYIDLTDSEQYEKNYESLLRNLYNKPEYSEPPLGKMPEW

SEQ ID NO: 51597 - DNA, 447 bp, Unknown
  Obtained from environmental sample
  misc_feature (1)..(447): n is a, c, g, or t
atgagggtttatttggataattgttgttttaatcccccgtttgatgaccaacggcagattagggtgtttttggaaacacaggcgaagttgcatatacaggaacagattaagaatgagaaaatagagttggctgtgtcttttgtttctaggtatgagaatagcgaaaatcccgatgatgttagtggcggttctattgcggattttttccaaagggctaccatttatgtgggggctgaaaattacgatgagatatttgccaaggcaggtgaatttatgaaagctaatataaaaatgaaagatgccacgcatctcgcttgtgctataaaggcagggtgcgattattttttgacgactgatgataagttgataaagagatataatgaaaaagagattattgtttgtaatccaataacgtttttacaactagcaggagaccagtatgcgtag

SEQ ID NO: 51598 - protein, 148 aa, Unknown
  Obtained from environmental sample
  misc_feature (1)..(148): Xaa is any amino acid
MRVYLDNCCFNPPFDDQRQIRVFLETQAKLHIQEQIKNEKIELAVSFVSRYENSENPDDVSGGSIADFFQRATIYVGAENYDEIFAKAGEFMKANIKMKDATHLACAIKAGCDYFLTTDDKLIKRYNEKEIIVCNPITFLQLAGDQYA

SEQ ID NO: 51599 - DNA, 804 bp, Unknown
  Obtained from environmental sample
  misc_feature (1)..(804): n is a, c, g, or t
ttgcttatattaagccccggaatttttgacaggttttttgtttctaacgaggactatgaccctgaaaatgattgggttcgccgcgaaatagtttgcgctcttaaaacagggaaaaatatagttcctcttgctttagaaggttttgttttccctaaatccctgccaccagaagttaaagacataaaaaataaaaatgctatagacctttatccaaaatattttgaagctgcgtatgaaaaaatgaagtcttttttgatttcaaaaccgagctggttggttaggcataaaaagaaaattatttctggtgccgccatagtgcttttgatgtttgttgcttctttatattttgcaatatctgaaaaaaacttagaattgcaagaagtaaaaaccgcaatagaaattgagaaaatgtatgtactggactccatacagcaggtgagagaacaacggcggcgtgatagaacatttcactggaatggaacagatgatgagattagtcaggtgatttttgaaaaaatagcagaagcaggaattcaaaaaactgagtgttccaacaatggcaggctagcaagcctcagtgaagtccgttgcagaataaatgaagatacaaaaataacttgctcctatactccaagaataattttcacaacctgcgataacaagccaattactttttttgagaaaaaggagcgtttcaaaagttcgccgcaagcagattcggcatcagcgaaaaaagatttggcaaacaaattacgcaatgtggattttagcgactgggtttctgggataaaggggttgaagtga

SEQ ID NO: 51600 - protein, 267 aa, Unknown
  Obtained from environmental sample
  misc_feature (1)..(267): Xaa is any amino acid
MLILSPGIFDRFFVSNEDYDPENDWVRREIVCALKTGKNIVPLALEGFVFPKSLPPEVKDIKNKNAIDLYPKYFEAAYEKMKSFLISKPSWLVRHKKKIISGAAIVLLMFVASLYFAISEKNLELQEVKTAIEIEKMYVLDSIQQVREQRRRDRTFHWNGTDDEISQVIFEKIAEAGIQKTECSNNGRLASLSEVRCRINEDTKITCSYTPRIIFTTCDNKPITFFEKKERFKSSPQADSASAKKDLANKLRNVDFSDWVSGIKGLK

SEQ ID NO: 51601 - DNA, 585 bp, Unknown
  Obtained from environmental sample
  misc_feature (1)..(585): n is a, c, g, or t
atggatgatataggcaaacggatatcgttcaactatgacataaaacgccgcatcgcgaaggcggccgcggcaatggtggaggaaggggaaacggtaatgatcgaatcgggctcctgctgcgcccttctcgccgaggaactcgctctggcgcaaaaagacgttacaatcatcaccaattccgtgtatatcaccaattttctccgcaacgcgccccataccaagattatcctgctgggcgggtattttcagcccgcttcgcagaccgtcgtgggacccctgaccagaaaatacggggaagttttcttctcggacaaattctttgtgggaacgaacggcattatgccaaattacgggtttaccggaagggatcacatgcggtcgcagaccgtgatggatctggcggaatacgcgcgttatatttttgtcctgacggacgcggaaaaattcaaccgccagggcgtgctcggaatgctccgctttgaaaaggtgacaggcgttttcaccgacacccgtattcccgccgagactgaaaaactgctgctcgacaaaaaagtggtggtgaacaaagtcgcggagagagaatag

SEQ ID NO: 51602 - protein, 194 aa, Unknown
  Obtained from environmental sample
  DOMAIN (12)...(169): Bacterial regulatory proteins, deoR family
  misc_feature (1)..(194): Xaa is any amino acid
MDDIGKRISFNYDIKRRIAKAAAAMVEEGETVMIESGSCCALLAEELALAQKDVTIITNSVYITNFLRNAPHTKIILLGGYFQPASQTVVGPLTRKYGEVFFSDKFFVGTNGIMPNYGFTGRDHMRSQTVMDLAEYARYIFVLTDAEKFNRQGVLGMLRFEKVTGVFTDTRIPAETEKLLLDKKVVVNKVAERE

SEQ ID NO: 51603 - DNA, 1401 bp, Unknown
  Obtained from environmental sample
  misc_feature (1)..(1401): n is a, c, g, or t
atggttcccgatccctgggaccgcgattcaagttacgcccgccatcacgaggttgatgttgagagcagccttccaatcgtgggaatttttcccgagtttctccgccaggcggaacgttaccgctcctcgcgttacgcgcaagggatacgcagggcactggaacgccgggacgcgttgaaaaacatactcgataaattccgcgacgaggagcataaaatccagggcgagtggtggccggtcagcgtgttctgtggcgcgtgcaataaagacgaaacggagattgacggctgggacggggagtggggcttaagctaccattgcgcctgttgcggtcataaggaaaccgtggacatccgtaacgcgcgtgatgttaagctggtctggcgcgttgactggcccatgcgctgggaatacgagaaagtcgattttgaacccgcgggaaaggaacaccacagctctgggggcagttttgacaccgcgcgccttgtctgcaaagaagcgtacaactgggacgcgcctgtcagcttccgctatgattttatcagcattaagggaaagggggggaaaatatcaagctcttcgggcgatgtggtggatctggaagatatgctgaaagtgtacaccccccagcttgtgcgatacctgttcgcggggacaaggccaaataccgaattcgccgtttcttttgatctggacgttatcaaaatttacgaggactatgacaaaacggaacgcatcgcctggaagctggagcccgcgaagaacgacgaggcatatgcatgggagcggcgcatttacgagctttcccagccgcaaacagattcggacggaaagactctgcccctggaaaaaatggcaaagccttttcaaattcccttccggcatttatgcagccttatccagattgccgacggcgacgtggaaaaggcgttgtcttcagtcgcggcttcatctaacggcccttccgaggaacagcttcccccactgcgggcgagggcggaatgcgccaaatactgggtaacccactacgcgccggatgaattccgctttaagctgaggtcgcctgctacggcaggcgcaccgggcgcggcaggcgcgccttctacagaaggagcgctggacgaagcgaaccaaaggttcgatgccgcaacactttccccccaggaacaggccgcgataaagctgttatgcgaagatgtggtatcccgcattgaaacctttaccgacgacaaaccctgcgccgaggcgatctacaaggtcgcggaaaaagccggcattgaaggcaaggccttattccgcgccgcataccaggtcttgatcggcaaagaccagggcccccgccttgccagctttttgagggcaatagacaaacaaagactgctgcaaatactaaacaggtaa

SEQ ID NO: 51604 - protein, 466 aa, Unknown
  Obtained from environmental sample
  DOMAIN (1)...(464): tRNA synthetases class I (K)
  misc_feature (1)..(466): Xaa is any amino acid
MVPDPWDRDSSYARHHEVDVESSLPIVGIFPEFLRQAERYRSSRYAQGIRRALERRDALKNILDKFRDEEHKIQGEWWPVSVFCGACNKDETEIDGWDGEWGLSYHCACCGHKETVDIRNARDVKLVWRVDWPMRWEYEKVDFEPAGKEHHSSGGSFDTARLVCKEAYNWDAPVSFRYDFISIKGKGGKISSSSGDVVDLEDMLKVYTPQLVRYLFAGTRPNTEFAVSFDLDVIKIYEDYDKTERIAWKLEPAKNDEAYAWERRIYELSQPQTDSDGKTLPLEKMAKPFQIPFRHLCSLIQIADGDVEKALSSVAASSNGPSEEQLPPLRARAECAKYWVTHYAPDEFRFKLRSPATAGAPGAAGAPSTEGALDEANQRFDAATLSPQEQAAIKLLCEDVVSRIETFTDDKPCAEAIYKVAEKAGIEGKALFRAAYQVLIGKDQGPRLASFLRAIDKQRLLQILNR

SEQ ID NO: 51605 - DNA, 804 bp, Unknown
  Obtained from environmental sample
  misc_feature (1)..(804): n is a, c, g, or t
atgctgagaaaatttcggatcagaacgcgattattattttcgttttttattgtagttttatttacgctgattgtaggactgaccggctacgcaagaattacttccatgggaaaatcggcggttgagacgatacacaatgtttccatattgaacgatatttacgataacaatgtttttattgataccggtttatttaatatgctgtatatcagcgacagtacgctgaccagctatgttgtgcagacaacaaaagaacacacggaacatttattaatccggcttaacgaatatgtcgcaatgcaggatcaattcagcgatgtttttactcccggagaaatgcaggacatgacaaatttactggaaatatacacagaggcatatattcccatagcttatgagatttttgatctggtggagcaagggcgcagagaagaagcgctttccgtatatataagccggcttagccccgtttatagaacatttacttactacctcaacgtcggctttataaaaaatctggaacactctgacgacagaatgaaaaaaaacaacgataaagccgcgttaaacgcatatttaatgctggcgcttgtcgcgttatcgctgattgtatctattatgctggcgcttgccgtcaccaggtctatctccgtcccgctcgcggggctgggagaagcggcggaaaaagtagcaaacggagaccgtgatgttcagtttgaacaatcccaaaacaatgacgaaaattccccgttgtcaaacagactgcaggaaacgctgcataacctgaaatcagttcagcagtaa

SEQ ID NO: 51606 - protein, 267 aa, Unknown
  Obtained from environmental sample
  SIGNAL (1)...(29)
  DOMAIN (194)...(264): HAMP domain
  misc_feature (1)..(267): Xaa is any amino acid
MLRKFRIRTRLLFSFFIVVLFTLIVGLTGYARITSMGKSAVETIHNVSILNDIYDNNVFIDTGLFNMLYISDSTLTSYVVQTTKEHTEHLLIRLNEYVAMQDQFSDVFTPGEMQDMTNLLEIYTEAYIPIAYEIFDLVEQGRREEALSVYISRLSPVYRTFTYYLNVGFIKNLEHSDDRMKKNNDKAALNAYLMLALVALSLIVSIMLALAVTRSISVPLAGLGEAAEKVANGDRDVQFEQSQNNDENSPLSNRLQETLHNLKSVQQ

SEQ ID NO: 51607 - DNA, 432 bp, Unknown
  Obtained from environmental sample
  misc_feature (1)..(432): n is a, c, g, or t
ttgcactatagtaaaaatatgtatgtaggattttattccctcggcgcggccgaagaagtaaccggttccaagcatgtcctggaaattgacggacaaagttatcttatcgactgcggcgcttttcaggggtcaagggcggaagcggataaaaagaaccgggactttggcattgccgccgaccgcatcgaaagcgttattttgacgcacggtcatcacgaccattgcggtcttttgccgcttttggtaaaacatggttacaaaggaaatatatacgcgactcccgcgtcaagggatattgccagtcttataatgatggattccgccaatattcaagcgcgcgacgcaatttatttaaaagtcaggcgcaaaaaaagggggaaaaattcgactggacgcctctttacacggagcaggacgcaatcacggcggtag

SEQ ID NO: 51608 - protein, 143 aa, Unknown
  Obtained from environmental sample
  misc_feature (1)..(143): Xaa is any amino acid
MHYSKNMYVGFYSLGAAEEVTGSKHVLEIDGQSYLIDCGAFQGSRAEADKKNRDFGIAADRIESVILTHGHHDHCGLLPLLVKHGYKGNIYATPASRDIASLIMMDSANIQARDAIYLKVRRKKRGKNSTGRLFTRSRTQSRR

SEQ ID NO: 51609 - DNA, 993 bp, Unknown
  Obtained from environmental sample
  misc_feature (1)..(993): n is a, c, g, or t
ttgcggtcttttgccgcttttggtaaaacatggttacaaaggaaatatatacgcgactcccgcgtcaagggatattgccagtcttataatgatggattccgccaatattcaagcgcgcgacgcaatttatttaaaagtcaggcgcaaaaaaagggggaaaaattcgactggacgcctctttacacggagcaggacgcaatcacggcggtaggacagacaataggagtttcgtataacagaccgatgttcatgggtgaaaacgtaagttttgaattttacgacgcgggtcatattttgggctccgccattgcggaaataaagataaaaaaaggcggcgaagaactgaatatccttgccacaggagaccttggacgaaagggcaagccgattatccgcaaccctgaagtaccgaaatccgccccggactacataatccttgaaagcacctacggcgaccgccgtcacgactctacggacgacgctcttaaaaaactcgccgaaatagcaaagcggactgttcaaaacaaggggaaaattttaatcccctcttttgcgattgaacgcacgcaggaacttgtttactattttcacattttagtagacgagggcataattcccgaagtgccgatttatgtcgattcaccgatggcgactaacgcgacaacaatttttcaggttcaccctgaatgttacggcgaggaaataaaacaggcatttataaaacatcataaaaacccgtttggctttaacagtctgcattttacaacaagcgtagatgaatcaaaggctttaaacgaacaaaaggggccgcttataataatttcggcggacggaatgtgcgaagccgggcgcatacagcatcaccttatccacaatatacaggacccgaacacaacgataatgaccgtaggatacatggcggagaatacgcttgggcggcgtatccgtaaccgtgaaggcgaagtaaaatacacggcgaatggtttaagctaa

SEQ ID NO: 51610 - protein, 330 aa, Unknown
  Obtained from environmental sample
  misc_feature (1)..(330): Xaa is any amino acid
MRSFAAFGKTWLQRKYIRDSRVKGYCQSYNDGFRQYSSARRNLFKSQAQKKGEKFDWTPLYTEQDAITAVGQTIGVSYNRPMFMGENVSFEFYDAGHILGSAIAEIKIKKGGEELNILATGDLGRKGKPIIRNPEVPKSAPDYIILESTYGDRRHDSTDDALKKLAEIAKRTVQNKGKILIPSFAIERTQELVYYFHILVDEGIIPEVPIYVDSPMATNATTIFQVHPECYGEEIKQAFIKHHKNPFGFNSLHFTTSVDESKALNEQKGPLIIISADGMCEAGRIQHHLIHNIQDPNTTIMTVGYMAENTLGRRIRNREGEVKYTANGLS

SEQ ID NO: 51611 - DNA, 471 bp, Unknown
  Obtained from environmental sample
  misc_feature (1)..(471): n is a, c, g, or t
atgagcgaatattttaagtcgtctgaagatgtttttaattggttatccggttttatcaatcttgagaggggacagactccgaaaagtttcaggattgaccgaatggaatttttgacacaactggcgggggatccgcataagcttatgccttctattcatattgccggctctaaaggcaagggctctgtaacggggatgacagccgccatgttggcggcggcaggataccgcgttgcgcgttatatgtcgcctcatgtcatcgacatacgcgagaggatttgccttaatgattcttattttaacgaagatgtttactgtgccgcggggaatgaattgcgggatattgcggaaagactgcctttggcggcaaatcctctttttgacccttctgcttccgacgggtgcgagcctacttattttgaacttttaactcttttcttttttctttgcgccaaacacggggaactgtaa

SEQ ID NO: 51612 - protein, 156 aa, Unknown
  Obtained from environmental sample
  misc_feature (1)..(156): Xaa is any amino acid
MSEYFKSSEDVFNWLSGFINLERGQTPKSFRIDRMEFLTQLAGDPHKLMPSIHIAGSKGKGSVTGMTAAMLAAAGYRVARYMSPHVIDIRERICLNDSYFNEDVYCAAGNELRDIAERLPLAANPLFDPSASDGCEPTYFELLTLFFFLCAKHGEL

SEQ ID NO: 51613 - DNA, 420 bp, Unknown
  Obtained from environmental sample
  misc_feature (1)..(420): n is a, c, g, or t
atgttcctggtcgcctgcgggctttcgttcgccacaggaacttcctggggtacatttggcatacttatccccatcacaatttcggtctgcgacattgttgcgccgtggctttccattacatcgttgtccgcggttcttgccggttctgtgttcggggatcattgctcacccatttccgataccaccatactctcgtctaccggagcggcatgcaaccacattaaacatgttgcgacccagattccctacgcagtcaccgttgctgtggtttgcttaataggttatatagtggcgggccttacttcgagtatgggttatgcgggcagtgtagccatcaccctccctatatctttcgctctgctgattgcggctttaatcattttaccaaaggttttttcggcagctgaagaaaaggcttaa

SEQ ID NO: 51614 - protein, 139 aa, Unknown
  Obtained from environmental sample
  misc_feature (1)..(139): Xaa is any amino acid
MFLVACGLSFATGTSWGTFGILIPITISVCDIVAPWLSITSLSAVLAGSVFGDHCSPISDTTILSSTGAACNHIKHVATQIPYAVTVAVVCLIGYIVAGLTSSMGYAGSVAITLPISFALLIAALIILPKVFSAAEEKA

SEQ ID NO: 51615 - DNA, 1440 bp, Unknown
  Obtained from environmental sample
  misc_feature (1)..(1440): n is a, c, g, or t
gtggaggacacaatagcgattctccgcggactgcaagagcgctacgaggttcaccacggcgtgcggatcaaggacgaggcgcttgtggcggcggccacgctttccaaccgctatatcacaagccgcttcctccccgacaaggcgattgatcttgtggacgaagcggcaagccgcctgaaaatggaattggacagccgccccaccgagctggacaagcttgagcgaaagctgcttcagctttccattgagaagcaggcgcttacaagggaagaggacacggcttcccagtcaaggcttggcaagcttgaaaaagaaatcgccgacctaagcgccgagcgggacgccatgaacgcgcgctgggaaaaagaaaagaaagacgttcaaaagatccgggaaattaaacagcagatagaagaacttaaaatagaagaaacccgctacgagcgcgaggggaacctcgccaaagccgcagaagttaagcacggcagaattcctgaagcccagaaaaagctcaaagccctgaccgatcatatggaaggcagaacggagggaaaagaaggtaagcctgccttgcttcgcgaggaagtaagcgaagaagacatagcccgcgtggtgtccgtctggacaggcatacctgtctcgaagatgctctccggcgagttgcaaaaatacctggatttggaaaaggtgctggaacagcgggtggttggccagaaagcggcagtggaagcagtagccgacgcaatccggcgcaacaaggcggggctttcggacgcgagcaggccgctgggctctttcctctttttgggcccaacaggcgtagggaaaaccgagcttgccaaaacccttgcggactttctatttaacgacgaaaaggccctcacaaggattgacatgagcgagtacggggagaaacactcggtaagccgcctgattggcgcgccacccggctacgttggctacgagcagggcgggcagttgaccgaagccgtgcgccgcaggccttacagcgtcattctctttgacgagatcgaaaaggcgcatcctgaggtcttcaatgtttttcttcaaatactggacgatggcaggctcaccgacgggcaaggcagggtcgttgattttaaaaacgtcatcatcattatgaccagcaatttggggtccgatctaatccttgaggcaaaaaagctggacgcgataaaggacgcgctgatggagcttcttaagcaaagcttccgtccggagtttcttaatcgaattgacgagactgtgatcttcaaccgcctgggtaaggatgagatcggcaaaatcgtggacattcagctcgcccagctctgttcacgcctgaccgagcgcaaagtggagctaaagcttaccaaggcggcaaaggaactccttgccgaacggggctacgatccccttttcgggagcaaggccccttaa

SEQ ID NO: 51616 - protein, 479 aa, Unknown
  Obtained from environmental sample
  DOMAIN (218)...(457): Torsin
  misc_feature (1)..(479): Xaa is any amino acid
MEDTIAILRGLQERYEVHHGVRIKDEALVAAATLSNRYITSRFLPDKAIDLVDEAASRLKMELDSRPTELDKLERKLLQLSIEKQALTREEDTASQSRLGKLEKEIADLSAERDAMNARWEKEKKDVQKIREIKQQIEELKIEETRYEREGNLAKAAEVKHGRIPEAQKKLKALTDHMEGRTEGKEGKPALLREEVSEEDIARVVSVWTGIPVSKMLSGELQKYLDLEKVLEQRVVGQKAAVEAVADAIRRNKAGLSDASRPLGSFLFLGPTGVGKTELAKTLADFLFNDEKALTRIDMSEYGEKHSVSRLIGAPPGYVGYEQGGQLTEAVRRRPYSVILFDEIEKAHPEVFNVFLQILDDGRLTDGQGRVVDFKNVIIIMTSNLGSDLILEAKKLDAIKDALMELLKQSFRPEFLNRIDETVIFNRLGKDEIGKIVDIQLAQLCSRLTERKVELKLTKAAKELLAERGYDPLFGSKAP

SEQ ID NO: 51617 - DNA, 855 bp, Unknown
  Obtained from environmental sample
  misc_feature (1)..(855): n is a, c, g, or t
gtgaccggagcttctataggctcttcaataacttcatcaattattagagaagtattcgttacttcagttgtttcggccgcttcgataacttcggtgaccggagcttccgcaggctcttcaataacttcaacagttgtaagggaagtatcagtcgcttctgtcgcttccgttatttcgataacctcggcaaccggaacttccacaggctcttcaataacttcaacagttgtcaaggaagcatcagtcgcttccgtcgtttcgatagtctctgcgaccggagcttccgcaggctcttcaattacttcatcaattatcagggaagtattagtcgcttcagtcgtttcagtcgtaacgataacctcggcgaccggagcttccgcaggctcttcaatatcttcatcaaatatcagggaagtaagggtagcatcaagagcttcatcaaccttagtttcttcaggatcttcaataacttcattttgcgtaacgggagaaagttcaatagttaccgcaggacttacaggcgtttcttcgataatttcacaaatttcaatatcttcatcaaacattatagaagcatctgaatctatagcattggccgcttcgagagtctcagcgacaggagcttccgcaggttcttcattaacttcttttggtgtagggggcgaaggttcagaagttaccacaggacttaccggagtttccgctggctcttcaataacctcttttggcggcggcagagcagattcggtagtcactacaggacttacaggcgtttcttcgataatttcacaaatttcaatagcttcatcaaacgtcaggaaagcatctgattcttctgtcgcaacagttgcctag

SEQ ID NO: 51618 - protein, 284 aa, Unknown
  Obtained from environmental sample
  misc_feature (1)..(284): Xaa is any amino acid
MTGASIGSSITSSIIREVFVTSVVSAASITSVTGASAGSSITSTVVREVSVASVASVISITSATGTSTGSSITSTVVKEASVASVVSIVSATGASAGSSITSSIIREVLVASVVSVVTITSATGASAGSSISSSNIREVRVASRASSTLVSSGSSITSFCVTGESSIVTAGLTGVSSIISQISISSSNIIEASESIALAASRVSATGASAGSSLTSFGVGGEGSEVTTGLTGVSAGSSITSFGGGRADSVVTTGLTGVSSIISQISIASSNVRKASDSSVATVA

SEQ ID NO: 51619 - DNA, 1494 bp, Unknown
  Obtained from environmental sample
  misc_feature (1)..(1494): n is a, c, g, or t
gtgactaccgaatctgctctgccgccgccaaaagaggttattgaagagccagcggaaactccggtaagtcctgtggtaacttctgaaccttcgccccctacaccaaaagaagttaatgaagaacctgcggaagctcctgtcgctgagactctcgaagcggccaatgctatagattcagatgcttctataatgtttgatgaagatattgaaatttgtgaaattatcgaagaaacgcctgtaagtcctgcggtaactattgaactttctcccgttacgcaaaatgaagttattgaagatcctgaagaaactaaggttgatgaagctcttgatgctacccttacttccctgatatttgatgaagatattgaagagcctgcggaagctccggtcgccgaggttatcgttacgactgaaacgactgaagcgactaatacttccctgataattgatgaagtaattgaagagcctgcggaagctccggtcgcagagactatcgaaacgacggaagcgactgatgcttccttgacaactgttgaagttattgaagagcctgtggaagttccggttgccgaggttatcgaaataacggaagcgacagaagcgactgatacttcccttacaactgttgaagttattgaagagcctgcggaagctccggtcaccgaagttatcgaagcggccgaaacaactgaagtaacgaatacttctctaataattgatgaagttattgaagagcctatagaagctccggtcaccgaggctctcgaagcgacagaagcgacagaaacgactgatacatccctgacatttgataaagctaatgaaatttgtgaagttatagaagaaccgtcaataagtcctgagaaaactactgaactttcacccgttacgcaaaatgaagtaattaaagagcttgcggaagttcatgtcaccgtagtcttcgaaacgcccgaagcgatagaagcgattatcacacccctgacaactgatgaagttattgaagagcctacggaatctccaattgccgaggttttcgaaaatacagaagagacagatacttctctgaaaattgatgaagtaattgaacagcctgcagaagctccggtcgccgaagctcttgaagcgacagaagcgacggattcttctctgacaatcgttgaagtaattgaagaacctgcggaagctccggtcgctgaggttctcgaaacaaccgaatcgactgttacttccttgacaattgatgaagttatagaaatttgtgatgttattgaaggatgtgaaattatagaagaaccttcgataactactttgacaatttctgaactttctcccccagcacctattgaagtttttgaagagtctatggagatttcaagttcttcttcaataatacttgatgatgttattgaagtcattgatgaatctacaaggngttccgatcttttgacgattgatgaaactattgaaatttgtgatgataatgatgaaacttaa

SEQ ID NO: 51620 - protein, 497 aa, Unknown
  Obtained from environmental sample
  misc_feature (1)..(497): Xaa is any amino acid
MTTESALPPPKEVIEEPAETPVSPVVTSEPSPPTPKEVNEEPAEAPVAETLEAANAIDSDASIMFDEDIEICEIIEETPVSPAVTIELSPVTQNEVIEDPEETKVDEALDATLTSLIFDEDIEEPAEAPVAEVIVTTETTEATNTSLIIDEVIEEPAEAPVAETIETTEATDASLTTVEVIEEPVEVPVAEVIEITEATEATDTSLTTVEVIEEPAEAPVTEVIEAAETTEVTNTSLIIDEVIEEPIEAPVTEALEATEATETTDTSLTFDKANEICEVIEEPSISPEKTTELSPVTQNEVIKELAEVHVTVVFETPEAIEAIITPLTTDEVIEEPTESPIAEVFENTEETDTSLKIDEVIEQPAEAPVAEALEATEATDSSLTIVEVIEEPAEAPVAEVLETTESTVTSLTIDEVIEICDVIEGCEIIEEPSITTLTISELSPPAPIEVFEESMEISSSSSIILDDVIEVIDESTRXSDLLTIDETIEICDDNDET

SEQ ID NO: 51621 - DNA, 492 bp, Unknown
  Obtained from environmental sample
  misc_feature (1)..(492): n is a, c, g, or t
atgacttcaataacatcatcaagtattattgaagaagaacttgaaatctccatagactcttcaaaaacttcaataggtgctgggggagaaagttcagaaattgtcaaagtagttatcgaaggttcttctataatttcacatccttcaataacatcacaaatttctataacttcatcaattgtcaaggaagtaacagtcgattcggttgtttcgagaacctcagcgaccggagcttccgcaggttcttcaattacttcaacgattgtcagagaagaatccgtcgcttctgtcgcttcaagagcttcggcgaccggagcttctgcaggctgttcaattacttcatcaattttcagagaagtatctgtctcttctgtattttcgaaaacctcggcaattggagattccgtaggctcttcaataacttcatcagttgtcaggggtgtgataatcgcttctatcgcttcgggcgtttcgaagactacggtgacatga

SEQ ID NO: 51622 - protein, 163 aa, Unknown
  Obtained from environmental sample
  misc_feature (1)..(163): Xaa is any amino acid
MTSITSSSIIEEELEISIDSSKTSIGAGGESSEIVKVVIEGSSIISHPSITSQISITSSIVKEVTVDSVVSRTSATGASAGSSITSTIVREESVASVASRASATGASAGCSITSSIFREVSVSSVFSKTSAIGDSVGSSITSSVVRGVIIASIASGVSKTTVT

SEQ ID NO: 51623 - DNA, 618 bp, Unknown
  Obtained from environmental sample
  misc_feature (1)..(618): n is a, c, g, or t
gtgcaggatgtcgcgcgggcgatgggcaaagacgggaggataggttccaagtttctgcatccgggtcccgggtacggcggttcctgtttccccaaagacaccagcgccctgataaaaatcggcagggataataaagagattctgcatattgtagaaacaacaatagaaacaaatgaaaaacaaaaactgcgcgctgcgcaaaaaatagaatccgtccttggaacgcttaaaaataaaactttatgccttctgggactttcctttaaaccaaacaccgatgacatacgcaagtctcccgcgattacaatatgcaaataccttgtaagcaaaggggcctttttgcgcctctacgatcccgccgctatgaaggaagcgaaaaagaaatttaaggagatagaaaaatcagtttatttcgcgtccgatgaatatgacgccgccgccggcgccgacgctcttgttataataacagaatggaatcagtttagaaatcttgatcttttcaaaataaaaaaactgctttcttctccttttttctttgatctccgcaatatatataaaaagcaggaagcgcagagcgcgggctttatttatttcggaatcggaaacggtaaagaatga

SEQ ID NO: 51624 - protein, 205 aa, Unknown
  Obtained from environmental sample
  DOMAIN (1)...(61): UDP-glucose/GDP-mannose dehydrogenase family, central domain
  misc_feature (1)..(205): Xaa is any amino acid
MQDVARAMGKDGRIGSKFLHPGPGYGGSCFPKDTSALIKIGRDNKEILHIVETTIETNEKQKLRAAQKIESVLGTLKNKTLCLLGLSFKPNTDDIRKSPAITICKYLVSKGAFLRLYDPAAMKEAKKKFKEIEKSVYFASDEYDAAAGADALVIITEWNQFRNLDLFKIKKLLSSPFFFDLRNIYKKQEAQSAGFIYFGIGNGKE

SEQ ID NO: 51625 - DNA, 744 bp, Unknown
  Obtained from environmental sample
  misc_feature (1)..(744): n is a, c, g, or t
gtgaaaattttgactgtgtatgcaatatggcggctcatgccggagttcgttacagtcttgaaaaaccggcaaacctttatagacagcaatatttcaggttttcttaatattcttgaagcgtgcaggacatataaaataaaaaatcttgttttcgcttcaagttcgtcggtttacggcattaatgaaaaaattcctttttcagtgaatgacgccgttgatcatcctgtaagtctttacgccgcgaccaaaagagcaaatgaattaatggcctatgcttattcccgtctatttaacattaattcaacagggcttcgtttctttacggtatacggtccctggggcaggccggacatggcgtattataaattcgccgtatctattactaacaataaacctgttgaaatttacaataacggcaatatactgcgtgattttacttatattgacgatattatcgaaggtattttgtcggcaattgaaaatgtttccaaaaaagaatttgttatttacaaccttggcaataacaggtccgaaaaattaacggattttattgaaattcttgaaaatttacttggagccaaagcggaaaaaatttatcttggcatgcaaaccggcgatgttcccgtaacaatggcggacatcgaaattaccaaagctgaattaggctggcagccaaaaacgttaattttggacggattaaaattattcacggactggttttcggagtataacaataataaatga

SEQ ID NO: 51626 - protein, 247 aa, Unknown
  Obtained from environmental sample
  DOMAIN (8)...(173): NAD dependent epimerase/dehydratase family
  misc_feature (1)..(247): Xaa is any amino acid
MKILTVYAIWRLMPEFVTVLKNRQTFIDSNISGFLNILEACRTYKIKNLVFASSSSVYGINEKIPFSVNDAVDHPVSLYAATKRANELMAYAYSRLFNINSTGLRFFTVYGPWGRPDMAYYKFAVSITNNKPVEIYNNGNILRDFTYIDDIIEGILSAIENVSKKEFVIYNLGNNRSEKLTDFIEILENLLGAKAEKIYLGMQTGDVPVTMADIEITKAELGWQPKTLILDGLKLFTDWFSEYNNNK

SEQ ID NO: 51627 - DNA, 966 bp, Unknown
  Obtained from environmental sample
  misc_feature (1)..(966): n is a, c, g, or t
atgccttttatttctcttgcctcagatccgggacttctgctttcaggctggtacaaaaaagcgtttgatttttgccgaattgacggtttcgagtcctttataatggctttcggcgctgtaataattatcttttatttttttcgggccggttattcctctttacttacatattctatcaaccggttttctttcggaatttataaatacctgtccaaaaatatacttaaaacaattttatcaattccttataagctgtatgttcaaaaaaattccgcagaacaaatacgcgttattactgaagagacaaacgacgtcggaaaattaattctaagttttttaaaactgttatctgaattatttcctgttcttcttatttatattgttattattattttaaattggaaaatcactcttgttgtcacgttttttttattgatattattatttttattgcttcccttattaacaaaaacaaataaaaaactcggggaaaaacgggttgaatccggaaaatttatttttcgccttttaaaagaatcttttggaaacataaaatttataaaattaaaaggcaatgaagaagacgtactgcaaacttatgataccgcaacagccgttaaagcccgtactgaagttttaagcaatgtttacagcgccatgccgaaaggcatacttgaaagcgtcgggttttccctgcttatcgcggcggtaatgttttttatcagaatatatcatgacgcttccgcggctattccgataatttcgatgtatgctcttgctttttaccgcatactcccgtcaatttaccgtatgctgcaaaatctaggcgagatttcttattttcacaaaacgctggacagcgtaagtgacaatttacatcaacagcatgaaaatgaagaatcggcgccggtggattttaaccgctctatttcccttgataatatcagtttagctctgccgatctga

SEQ ID NO: 51628 - protein, 321 aa, Unknown
  Obtained from environmental sample
  DOMAIN (2)...(265): ABC transporter transmembrane region
  misc_feature (1)..(321): Xaa is any amino acid
MPFISLASDPGLLLSGWYKKAFDFCRIDGFESFIMAFGAVIIIFYFFRAGYSSLLTYSINRFSFGIYKYLSKNILKTILSIPYKLYVQKNSAEQIRVITEETNDVGKLILSFLKLLSELFPVLLIYIVIIILNWKITLVVTFFLLILLFLLLPLLTKTNKKLGEKRVESGKFIFRLLKESFGNIKFIKLKGNEEDVLQTYDTATAVKARTEVLSNVYSAMPKGILESVGFSLLIAAVMFFIRIYHDASAAIPIISMYALAFYRILPSIYRMLQNLGEISYFHKTLDSVSDNLHQQHENEESAPVDFNRSISLDNISLALPI

SEQ ID NO: 51629 - DNA, 1194 bp, Unknown
  Obtained from environmental sample
  misc_feature (1)..(1194): n is a, c, g, or t
atgccattagcggaaacggtaaaaaacgcgctttcatcttcttcaatgattcggaaaatgtttgaagagggaattgaactgaaaaaacggcacggagctgacaaggttttcgatttttcgctgggaaatcccgatatagaccccccgcccgctttccatgacatttttgtaaaacttgcagcggaagacgaaaaaggttcgcacggatatatgcctaacgcgggttatccctatgtaagggatgccttgtcaaaaaaaatcgcaagagagcagaatgttaatattgacggttcatgtgtaataatggcagctggcgcggccggagggcttaatacggtttttaaggcaatttgcaatccgggagacgaaattattgtaagccgtcccttttttatggagtaccgcgcctatgccgcaaatgctggggcaaaacttgtagaaacggacgcgctggaaaactttgatttggacgtacaggctgtaaaggcggctctttgcgaaaaaacagcagccgtgttaatcaattcacctaacaatccgacgggaaaaatttactcagcttccgtactggaaagtcttgcaaaaacgcttacggaacatggaaagaaaacaggaaggtttccgtaccttgtttcagatgagccgtatcgtgagattgcatatacatttactgtcccgccgttcttaagctgtantagtgaatctattgttgtcagttcctattcaaagaatctttcgctgccgggggaacgtatcggttatattgcagtaaatcccgcaatttcagacagggatgatcttgtaaacggcttaatttactgcgccagggtgcttggttttgttaatgcgcctgctctgatgcaaaggatagtagcctgccttacggaagagagtgttgacgtttcaatctatgcaagaagaagagccgcttttatgaaagcgctggatgaagcgtgcattacatacgcttttcccgaaggagcgttttatcttttttgtagggtacctgtgaagaaaaacggagagcagggtacagacaatgaatttgtcgaacacctgaaaaaataccttattttgggagtaccaggttccggcttcggaaaacccggctggctgcgttttgcatactgcgtagatgagaaaataataacagcctccgccaaggttttcaaaacggcaatagaaaactggtaa

SEQ ID NO: 51630 - protein, 397 aa, Unknown
  Obtained from environmental sample
  DOMAIN (34)...(390): Aminotransferase class I and II
  misc_feature (1)..(397): Xaa is any amino acid
MPLAETVKNALSSSSMIRKMFEEGIELKKRHGADKVFDFSLGNPDIDPPPAFHDIFVKLAAEDEKGSHGYMPNAGYPYVRDALSKKIAREQNVNIDGSCVIMAAGAAGGLNTVFKAICNPGDEIIVSRPFFMEYRAYAANAGAKLVETDALENFDLDVQAVKAALCEKTAAVLINSPNNPTGKIYSASVLESLAKTLTEHGKKTGRFPYLVSDEPYREIAYTFTVPPFLSCXSESIVVSSYSKNLSLPGERIGYIAVNPAISDRDDLVNGLIYCARVLGFVNAPALMQRIVACLTEESVDVSIYARRRAAFMKALDEACITYAFPEGAFYLFCRVPVKKNGEQGTDNEFVEHLKKYLILGVPGSGFGKPGWLRFAYCVDEKIITASAKVFKTAIENW

SEQ ID NO: 51631 - DNA, 915 bp, Unknown
  Obtained from environmental sample
  misc_feature (1)..(915): n is a, c, g, or t
atgcttactaccaaaggaaaagttgaaggcacttcagtgatagaaccaaacataaaaggggcgaccgaatttatcgaaaaaatgacgtcttttaaccttcccaattcatgcttttgcgattgcaccgcaagcgaggaaattgcgtccgtgtacgaaaaaattctgcgccgttccattccaattgttacgccgaataaaaaagcgaactccggttctttggattattaccgcaggcttacttcgtattcaagggagaggggaattccttatctgtatgaaacgacagtcggcgcgggactgccggttatttccaccatacacgatctcttcctttccggcgacaggattatcaggatagaagcggtgccgtccggaacgctaagttttatctttaacaattttgacggcaaaaagccgttttccgcccttgtacgcgaagcgaaggcaaaaggctacaccgagcctgatcctcgtgacgatcttaacgcgatggatgcggcgcgtaaggcgttaattctggcgagggaaattgggctgtctcttgaattttcagcggtaaaaatagagcctatacttcctccttcctgcttaaaagcgaaagatatcgactctttcttcagcgagcttgaaaaagcggacggcgtctttgaaaaacgccgcgcacaggaagcggcaaaagggaacgccctgcgttatgttgttgtaatagaaagcggaaaggcaaaactctctttgcgcggcgagcccgagggaagccccttcctgtctcttgtggacagcgacaatattgttgttattaccacagaacgttattcaaaactcccgatggttataaagggacccggcgcaggcgcgcaggtaacggcaggcggaattttcgccgacattgtccgcacagcgcggactcttgtttaa

SEQ ID NO: 51632 - protein, 304 aa, Unknown
  Obtained from environmental sample
  DOMAIN (101)...(297): Homoserine dehydrogenase
  misc_feature (1)..(304): Xaa is any amino acid
MLTTKGKVEGTSVIEPNIKGATEFIEKMTSFNLPNSCFCDCTASEEIASVYEKILRRSIPIVTPNKKANSGSLDYYRRLTSYSRERGIPYLYETTVGAGLPVISTIHDLFLSGDRIIRIEAVPSGTLSFIFNNFDGKKPFSALVREAKAKGYTEPDPRDDLNAMDAARKALILAREIGLSLEFSAVKIEPILPPSCLKAKDIDSFFSELEKADGVFEKRRAQEAAKGNALRYVVVIESGKAKLSLRGEPEGSPFLSLVDSDNIVVITTERYSKLPMVIKGPGAGAQVTAGGIFADIVRTARTLV

SEQ ID NO: 51633 - DNA, 594 bp, Unknown
  Obtained from environmental sample
  misc_feature (1)..(594): n is a, c, g, or t
atggtcggcgtagccggtttttccgcccgcgttttcggcgctctggcaagaaagggaataaacgttatgttaatttcgcagagttccagcgaatactcaatctgtttcgcggttctgccggaagatatacagaaggccgacgctacgttaaaggaagagttcgcgaatgaaatccataattgttccattgaaaatccgattatagaaaaagacctttcaataatagccgtcgtaggttcggcaatgaaaagcacttcgggaatttccggaaaatttttccacgcccttggcagaaacggcattaatattgtggcaatcgcgcaaggatcatcggaaacaaatatttccgcggtcatatcctcggctgacgaatgtaaggcgcttaacgccattcacaacgctttctttttcgcacatcagcgttctgtcaatctgttcctgattggcacgggccttattggcggcactttattggagcaaatagccgacaaccgcgaaaagttagctgacaatatgttggaaattaaattgattggagccgccgattacgacaagatgatcttttcacttgacgggcttgatccaaaacaataa

SEQ ID NO: 51634 - protein, 197 aa, Unknown
  Obtained from environmental sample
  DOMAIN (76)...(143): ACT domain
  misc_feature (1)..(197): Xaa is any amino acid
MVGVAGFSARVFGALARKGINVMLISQSSSEYSICFAVLPEDIQKADATLKEEFANEIHNCSIENPIIEKDLSIIAVVGSAMKSTSGISGKFFHALGRNGINIVAIAQGSSETNISAVISSADECKALNAIHNAFFFAHQRSVNLFLIGTGLIGGTLLEQIADNREKLADNMLEIKLIGAADYDKMIFSLDGLDPKQ
